United States Patent Application Publication US 2008/0114160 A1 - sequence listing, part 17

SEQ ID NO: 6078 - DNA, 12252 bp, Oryza sativa
ttatttattcgcatgcagagttaatttacagcacgaaccgtgctaccaaagaccaacaaggcttactgcacacagtcaccgtcatttattccactaccataatatatacacatgacatgtcactcttttaacagagctcgatcagacactgcagcctgcaaccacctccaatgagatggacagtgaaagcactcctcatgcgtctgagcctgcaacggagggtgggaagacccctctcccgggctggcgatcagcaaccgatccgtgccgagttagcaactacatgcagcgaaacatcacatccattatattagcatttttttagaaaaaatattattttaataaaaacttgtaaaaccacaaatttagcaccatgtcgaacacatgacacatggtgtaaggtagggttgttgtgcagtaaaaaaaagtgatatcacatgatccatgagctatgactaataggaaagcaagcaactgtactataggtggccagtgggtaggacctatcgaacaatgaaagtttgataggccatgcactccctttttaccaggcaaataacttcgtcgaacactagctcttcgatgctcttatgtggcaccatgaaaattcatatcactcaatcaaattttgatcgatatacaccctatcaaactttgcttattcaatatggtgctaaacttacaattttagcaaaatagtctctacttttgcaatttcccattaatatagtattatttctaaaaaatattatatatatatatatagaataattagccgctgttcaccatacatgcattaatcaacttggttataattttgtcgtttcgagcgatacaccgcggtttcgtacgtaccttggcgttgacgccatcgggcacgatgcgtccctcgctcttaagcttgaggtactcgtcgcgcttgaacctggtgaatcccctgaaaaccaataaaaagttaaaaaccgagacacatcatcatcagatgacacgaaagaatttatatcatcctggccgtccatcctgacgaacgtaccacttggcgctgaagatgaccctctggcggccggggaacttgaacttggcgcggcgcagggcctcctgcgcgtgcgcggcgttcgcgtcgcggcatcgcacggagaggagcacctgcccgatgcggacgcgggcgcacgtccccgtgggcttcccgaacgcgccgcgcatcccggtctgcagccggtcggcgcccgcgcaggacagcatcttgttgatgcggaggacgtggtacgggtgggcgcacacccggaggtggaacgcgtccttgcccgcgtgcttggccatgtacttgttgcacgcgatccgggccgcctccagggcctcgctcgacacgttctccttctcccagctcaccaggtgcacgcacagcgggaagtcgtccgcgctccgcttcttctgcccgacgtcgaagatgcggatcttcgggtcgggcacgccgcggcagtagcgcgacttcgggtacggcttgttcttgatctgacggtagcaccgcactggccctgcacgcacgatatcgatcgatcgatcacgtcctcgatcgcgttgtcattcaagaaaaccaggtaacaacgccatgcacggcaacggccggcaacagctacgatatgatgtctgtgccgtggtaagttggttggttcggttgttgcttactcctccccatggcgatcgatcggcggcgaaaagtgtggagtcgcgggtgctggtgatcaggaagggtccaggtgcgtgtgtgattttgaagagatcatgcggaggccaggtggttgatgtgcgtatgtatatagatagacaaagaggagggcaggtgagtgcgcgaatgttctggttttgccggtcgggaagacgggaaggcgtggcggcgagaggccaatagacgcagcttgcgtttggactcgacgtacgcggacgcctcggcagcaggtgggtgggccgacctgtgagttgggctgagagggcgtgagttgggctttcaccgagtcgtactcttcgtgggcaagcgagaaacggccgcagcattctcaggacggaacgagagtactcatctatgacatagacggattgtaatggcaccatctctgttgcataaagcttgaagaaatgtagagatagttggcagtttctcttcttttgcattaagaagattcttgcatttgccgttcgtttacacggctcccggatgcgcccacgcgaaccgatcaatcgatcggtccggccatgtggtccggttcagttttcaggggacgtagtacatggggttggggatcttgaagacgcggtcgccgacgtagtcgccctgcaggtcgctccactggtcgccgacgttgccgcggatcctgtagccctcctcctccaccagccgcttcctcatcgccgacttgaacaccgacgagctctgcccccggtactccgggctcctgcattgtaccatgatattgcacgatcagatatcttactttctgaattttaaccatgcaacctatgctactaacaaagtagtattctgccatgggattgcgatatcttgtgcagttcgtcatctgaatgttcagctcagctgccagtatcattgatccattaacttggcagtcacaagccagcacttgacacgaatgctggggccattgaagcataaagattcgcggaattagcagaatgcaggatatgatctccggccctaatgcaggaggaaattaagggctttgttcactttgttgtctaaatcaatcataccaaattttggtaatgctaaattttgtcgtattttggtagtaccaaatgttttttgataatattggctttgcttggtttgatgattttattaaattttggtagaatttcaagagagtaagcttctagaactgttaaaatttggtaaggtagtaatggttaaagtgtgtttactttattgccctaccaaaatttgaaaggtttaaagtgacaacaaactaaacatgccataaaacatttttaaccagtgtaaaattttcacaacatggaacaagaacagaaatgtgatcgcacctcatgatgagcctctcataccccaagaacccctctgactcgagattctctgacgtgcaagtggccagtgtctcttcatccctcccggagaggaggaaaaccttgaaccccttggcttgcaatgtggcgaacaactcaagaaccgcaggtatccccgggcaagcccctttgctagcccacgtcttgaaggccgagggatcataggccctggaataaaaataccaacaagtcacgacatcgctggatatattaatctgtacttgaaagtactaattgccacatttccagcattaatatttttacttgaaagtactaagttttctgttttgataagctcatccaagccgattaaagaaaagattatcctattgatttagctactggccataaagtatcatttttaaaaaatagtggatattttattggataatggaattgcatttggcgcctgtatctattagggacgcacacaatgacacaacctatagaaaagaaaagaaacaaagaaaagaaaggaagacaacgtgaacatattatgcttagttttttttttctgaatgaaacatattatgcttagtatcatctaggctgatagcctgatcctatgttgagttatgtacggactaatttaacgagaagttgaagtacagagaactaaaaaatggatgagttcgaactcttccccatacccgaactgcttggcctcgtagtagagcaggttggagaggcatgtgtcgtcgatgtcgaggatccatgcgtcgaggccgtcgccgtcggcctcgacggtgtcgacgtaggcggcgacctggtccatgacgctgctcaggtccctgccgtactgcccccgcgtcatgtagcccctgacgtaggcgacgcacgccgcgggcaccgtgcgccaccccctggcgttgttcgcctccaccatgacccgccagctcaggcacccggcgtcgccgtccacggacgccgagtggcacggcctcgccgcgacgccgccgccgacgtcgaggacgacggcggcgaccaaatgcggcagcaggacgacgagagcgacgacggccgccgccgtagcccgtgagaacgccattggacgcagcttagctagcctcgatcgacctgtaggcatcaacaagcatgacattgaattatatacgtacacaaagatattcacctagctcatcatcgatcgcaccccatttcgagaccgaaagaaagaaaaagaaagggacacggacagaaaggaaaaaaaggatcatgatccgatcgatcgagacagagagagcagagcactacttcatgctactactactatacctcgatcaatcaactcgatgtgccaagcaattgctgaatttgcagcagctaagccggccggaccgggacaggatattgtacgatcgatgatgccccgagcaacaacttgcgtgtgtgtgcattttatagggaagtcctgcaggcccggcccccccatggcgtacgtgcagagtcaccaccacaaacgcaagagaaaaaagggcatgattacgccatggaatttggcaaggagcgaggaggacggcccggatatatgcacgcgacgcgacctgcttattatagctttaggattaggtactaccttacccctcctccggtgcgtgtgcaagttgcaccgccagcgctccaggtgtgcgccacgtggacccaactccgccgccggctacctcctccgtgacattgcccgacggcgacgtctcggccgtgtacgtgaatacgtgatggtgagttacgttggggccggctctggccgttctatcccttctcctttcttccactttgtagctgccgccaatcgacgagcgctgacgaattaagcttaaacatatgcaggctgctccgatgtaatccgcggctgagagagagatagattctcgagaatattgaccaccgagagggaagcctctagtaacggaacgcacaaacaatgtaggcttttcgccggtagctttactttccggcgatgtaatgggcatggtggatcacttgggtgcagaaatggagcgtgcattagaggcggagctagagctgccagcagctatgcttaaaaaccctcattaaccaatgaggggagtagaatacttgggaacgagagacctgtttggatcatttaatttctggactaaaattagttcatggcctaaaaactttagtccttactgtttagatcaagggactaaacggggagtaaagtcacgtggaccgagggagagagaagagtgaagctgtcactttagtcctataaatacctccaagagagactaatggattttagtcctatatgtactttttaagacccttttagtcgtctctgtttagattcttaaagattaaaaggaactaaaatagagagactaatggattagtcctatgaaccaaacagccaagagggcctgaatcaagtctgttgaagaatgaaatggagtatcctcgttattccccatccaatgagtaggtcaactcacgacaagatctcccaccgagcacgcgcattggtgcatcttcttcttttcgttttcttttaggttgtcatcgacaggggaataaaaagaagatgcattcaccactcgacactccctacatgtctttcaaaactctatcaagaacttcattttaattttacttggacttcccctccttttcttctctatactttctacattgtatcatcgatgtccggttaccgctcaaaacttctaattatggtcattattttgtacaattcaaaattagaactatcagctacctatttatttttagacagatttagagctttaaatcttgcagaatttttgacaaatgaatacaactcgttttgaaataaataaaaaaagatgaacatgtcaaaaaatcgtaatctagagaagaacttttgtaaaatttaatgttagtgcgttgttaatgaatgtaagtgttctataaccaagtataagtgccatgtaactaaatttaactgcaacttaggtctaaagaaacacgaatcttgatacaagatttatggaaaaaaaatcaaaagataggagctaaatatttatcgcaaatgagatagcaaaaccgtaattctaaattgttgtcatctttcactgttgtttatctacggccaagtcgatacgaagggctttgtttgttttgaagccagctagccccttatcaaaattttgacaactttaatagtatcacatagatgtttggattactacaaatttttgcttatattagtgttacaaaaacaattagtatggtaaaacttactaacattttggcactaccaaaatattaagagtaaaaattggctttaaaccaaacaagcgttggagatccatttattgggaagtcaaccaacttgcattgcgagtaagggagcagccacaaactcagaaagatttgtttgcctttgctttaactagcaccgaacaatcgaaagtatgcatttgtaatagaaatggctgtgtagtagccactcaccattagtggcagatggacaatagcctgcaacatatatctggaatcgcccgttcaaaatatatctatataacatgtctggaacgcacctaagaaactttagcatagtatagcccaccagtatcaacctttgtacagctaaattattgtatttcctaggcatgtagcacatatataatgggaatagcaaaaacccattaaccacattttctcggtgatgcacctaagaaaagatcatgcctgagctgtgcatgtacgctccatatcagattaattaattaaggcgcactgaatcatacataattcataaccagcagattttggttcgtcaaatttcttgggtgaaacatataaggggaggcctttaaagagcacgccatggaaacagaccacaaactttgaattctttatagctgtatgaacaattgaaggaacagccaatattcaaaactggctaaattgtagataaaaccatgaaaattttgtcaatcgtgtatacacaagatacttttcttcatgtcttaatactgtaatccaaaatttcaaaaagtagggaaagtgacctatactcaatggagaactcaatgctccactttcagagttaacacgtttagctaaatggggcactaagccactaactcaacatctactgaatttagtatgcactgctctcatcatgcatactaaaaatgtatggaaccgagtgacaaatctgaaatctgtcatgataagtaggctagaggctgggaactaacccaacaagtcattcaagtatttgatctgcaataaagcatcagaaatcagtcaaatccatatgaacctgattcacttattcagataccaatctaaaacatattttcattattattctctttaatcaggcggtattactgatactgttcacaatgtaagtacatgagaaaactattcaggtataggaggaaacaaaattgctcaaaaataagaacaaaaaaagaagaggaacaaaaacacgacctttctccatggctccatgctacgcagtagcaatcgctttgtagccagactcatcaatgtagttggctaaagctctgtcacccgtcttcactatcttgcccttttcctggaagtagcatatcagaagtattatcaataccaattcatgcccttcatgtagtactccatgtgtacctatttaattgatgcttgctgatccactcggtcagacatccaaattgcgacatcattgtttaaaagtgtcaaaatttggatatatgaaacctacatcactaggttttaaaaaaaaatttacaatattattttttatatatattatagtgatggaacatttaaaaagcagtggtcattggtcaaatccaagataccatcaaaaggcaaaattttcataagaaaacaacaggagggatagcatggataatgagcaatatcatacacgtttgctatcttagtatttatacatcttgagtggaacaattgtatataactcacatagctctttaccacctaatggccaactaaaatcacaatatattctgtgtaccaatgtaatgattagccagtgatgagtccaaaagagactctacttgaaaataatacaggattatgtaaattgaagtattaaattcatttgaacaaataaattactatcaattcaagtgcaattgctcaaaaaggaatttgtctatacgcttaccatgatgtgaacatagctgggcttaataagatccaagagacgttggtagtgtgtaatcatcattagagagctgtttggtgtcaagatcccattcactgctttagctacatattcgagtgcatcaacatctaatcccgaatcaatctcgtcaagaagagctaaatcagccccaaggacctataattgataatgagaaaacaaataagaggcacaaatttatcgaagtacataactagatagtcaaacaaattcttctgacaggtaaaaatgttcaaggaagcactgtctcataaaatattatcttctagcacttttttcaggaaacttttgcctatatttattggtcataaatatatcagtgaattgcattttggaccacagtttcacgccgccgcccacggtaagacctaacgaaacaagagcgttgcattaaaaaaaatcacatttaacagaacatggcatctggaagagaagttcagtgaatcttcgtggcataaaacactagtttctattttattgctgagtaataaatgtaagaatatttctccagatttatgttcaaacgaaaagtgtgtaatgttcatttgacaactaaactaagacgccacatagtttcatagtaatcttacagagagttgcagaatctcattgcgcttcctttcaccaccactaaacccttcattgacagcacggttaaggatctctgcattcatattcaaggcattaaccttttcctctataattggataaacctgtatgataaagagaagttatgtcagagttcctagcaactggaaataacccaacagtaagaaacagcaaaacaagaaacgattaggttagaaaacaccaccaagctcacttgtgttattaaaatagaaagttctgcatttatagaaaaacaaacaacgtagacaatggagtctgggacatgttaacttaaccccagtcattcctataagatattaataggataggtcatacatcgaaatagtgagaaatattaataggataggtcatacatcgaaatagtgagaaacacatgatgccttataattccctttgtaaattaagagtgcagttttaaaaatgccttacaccataagtataaattgcaaacctggagaggctctaatgctggtaaacccttcttctctctgcgagcatttaatgccatgagcagaaaatcgtaattgttcactccaggaatctcaacaggtgcttggaaactcataaaaaggcccgcaagagatctttcctctggctccatatcaatcaaattctcacccttaaagagcacggtaccaccagttacctcatactctggatgcccagccagaacctgagacgaaaggatgcaacagttcactgaagttttagatatcacagtaacaaacatggttagtttctcggtttaatcaggatggtgggaaggcacattgaacacttaggggttgatctccaaaagcacttgaacttcaagatcacaaactggattattctagttgcactttcttaatctggactaagaatacacacgaggcaaccagaaacctctttcatggatggcacaatttctcacagaagcaaatactagagaagccaggcggcaacaatacatataaacaattctatcgcaatcagaaaacacttgatgtattatctattattaagatagcttgaaaatgagtcaccatgttcgctttggtggctataaattaccacattaattggaggaaaaagaaagatctacaccgttagatcatggttggtccaaattaacgatgtagcgtgatacaaagtacaattccatcagaagctaaagaattgtttatcaaattcaatttcaccttaataatctattgtatacaaaatacaactgttacaggtgaaaacaaagttgagaggtgtatactaaatccaattcgacttccaaagtttagctcctcgcaaaattgtgcgagacaatctgctatgctatgctaataaaaacaaaaatatacaggaacagaagtgttacataggtaacaggcaatatttccgcacagtgtcgatcctagcaaagttcttgtcctaatatttagttttttggcagaataagaaatgaaagcatcgatcagaagcgccttaccttcatgagagtgctcttgccggagccattttgacccatgagcgcatgaatctatacaaaacaagcagacgaacacccaatctaagtaccctgcaacctcgcagaccccaattattaagaattttaagatagccacacaactagaccagaacgaacctcgccctcccgaatggtgaggttgacgccgctgaggatctcctgcccgttctccttcacgcaggcgacgagatcgcgcgcctcgagaagcggcctcccggcggactcgacagcagcggaggccgcggcgatcgagcggcgccgcggccggagggagacggagctcgggggcagatggcggcgggggagggggcgggacgaagaggaggaaaagagaggggaggaggaggatacggccgcggcggcggcggcggcggcgaccaagggcggcgccatgggagaaggaagggtgaggtgcgtgcgcctccagatgcttcttcctccctcgtcgcggctcggcttcggatgacgagcggcggcgtcgaatgctactttttatgggccgtttactctggagatctcgcgctcgcatataccaggccgaacttatgggcctaatgggcttagaaagttagtgcgttttttgggcggaaaaagtatactttgactccctcaactatggcccgagtataattcatgtcctccaaccataaaaacgggtatatcgactcctccaagtatcaaaaccggtgcaaacaatatccctcggtggttttggaggtggttttggttgacatggcgcttacgtgacgggcttgatcgagtctttgtcatacgtggcgcttacgtggcattagaataagaacaaaattaaaaaaaatatgtggaacccatatcattcacataaaaagtaggaccctctgacatgtgggacccatatgtcatcctccctccctttctcccttatctctctcaggagcggcggcggtggcagtggccgggaatcggctcctctacgtcagagggacgttcgactcccgatatccgtcgcttgcgcatccaacggctccggtccgcgagtgcctgatgtatagcctttccgtacggtgcacatgcgcagaatcgtagctgggagctcacgccaaagggaagcaccagccaccggagccgtcgctcgagccatagcctagcgtcggccgacgagaattaagctctgtccgcgggcgtgcagtgcgcggaagtggagcgctctggtctgcttctcgacgaggtagctagtcggcggccttgctgaggaagctaggatggagacgcctaggaagacgaaggtgcaggcgagcagcttggcagcgtcgttggcgggacgaagtcgccgtagccgacggtggtcatgtgtgtgtccttgtttttagcagcatcctagagtagattgcatcaggtttcaatttctgttggcatcgtattccttcggacgtgcttagttcatgtcgcggcgtatccgcgtcgtgcgctccgcttcgctcgtgtgggatggaacacattcgcggcaatggcagcgaggccacgatgcatggtgagtctttgtattctgcaaataaaaggatgagaaaacgaaaagctgcagtgagccagtgacacacatcaccaaaactccctctgtcgaacaccttgtgagtgcactgttcattttcttcctccagacaatctaggagtttgtgagccaaatcaccaattggggctgtcaaaggacggcgagaagatggggggagccaatcaatgtgtccctcgacgaaataatccatgggaagggtatgaacacgaagcacgccatgaaaatgtcgatcgacaaggacgatgaagaggccaagatgacgatggcggcggcggcggtggcggtcgg

SEQ ID NO: 6079 - DNA, 12211 bp, Oryza sativa
acctaagttcccgtgacttgctgagtacgaaagtactcacccttgctctatataaatatatatatatatagttcctccgccctgaagagaagataaagtgaagagaagattagggtttcgtcctggttcccagccgtcgcctgtggtgttgggtgttagttcgttggttccgctgctgctgctgttgttggtgtttcctcgtccgtgtcgtcggttgcattctcggattgttctgagctgcaacctaagttaaggtaaataagtcgactctatttattttaaggattgctatgattcatatttgtcaccgtgggtaccagcactatgtcctgggactggtaccgagatcgcggtttcgtaggaaacggttcacgccgttttccctacgacacgctcctgtcaggtgccgttgtacggcggtatcagattggggtgtgacaccagagtacatgttctggaatattacagaaacttatggaatatgtctatttccattgtattcaagtaaacctctctctattttcagtcatttccatttctattcttttgtgccacccctttttgatgaagatgaatttctcttctttttgccttctaattcagccccagaattatgcttctcctgtgatatatcttgttgcaaatcttttcttttgtttgaaacatctttctttttctgctctacaccatcctgcaacaaataatatctttctttattacttttttaaaaaaattcaattcatatggatttgtaatttttgttacctgttctcttgtatttttaacctttcttctcttcttccttggcaagtcaaactcaacgtgtttcagagggcacgttggaaatgtgtgatctgtcctctgacaatgactgcaatgatatagttctttttgctgtatttcttccctgattgtcttatatctttgagctggcctgcctttggattttgcaatatctggatccaacaatatttcttctgtattttcctcagattgttgattgcctttttcatgtgagttcaaattgtcttctgcatttggatctgaatcattgatctcctgctcagcatctttatttgaacacattaattccaattgtttagcaattttgtccatctcttccactgcaaactggaaagtttcattgcttttcgatccatttgatgctatttctgcacttttccttgacaaaatgttgaatctcaggattgagctctgtgctaaaggtatatttccattgccttttcccccaagacctttgtactctttttttgtccatctttcaataatatatttttctggtatcttcattgcattgaggtggagcattactttcaatacatggcagcatagaagtccatctttctcaaactttgagcaaatgcagttgaaatcctccttttccaagtccacaataacaaggtacttccttcttctgattacttgaatattttgattcaatgccaaaaaaaacttcataagttttgaacttctctacttcatttatttgaaatctagttgttcttttcaactcaacttgaaacttgatgaagattttgcgattatacattctcattgcttggtactcaatgtagtaatgggaccaaagtttgcttggtttctttgtccttgaaatgtgatcatcaaactgttccaagttttgaattgtatccattactctttcatactctatcatgaagtttgtaatgctgtactgtggaccaacattattcttaaaccttgagttagtcccttcactgagagctgtgctttttataaatggacagaaatcacccttgaaatacactggaataaatctttttctaattgaccacatgtgctttagaaaattgatatgctgaacttcaaagctgtcaatcatttcttgccataaatactcaaattcttcttctgtaactgagttatttatgatgtcttcatactcatcatacaacccttcttttgctttgaacaaatttccaaatagattgaaagctttctttacaatatgaaagaagcaatttatgtgctttgcattttgaaatacttgagcaattgctgatctcattgctccatcctgatcagtaatgattgtttttggttctttttgtgacatagctttcaaaaaagttctgaacagccatttaaatgtttctgaagtctcatcatgcaaaaatgcacaaccaaaaacaattgtgtttccatgtccagaaattccaacaaagggagcaaacgggaggttgtatctgttggtgaaatatgttgtgtcaaaactcacaacatcaccatatttctcataccactccctcgatctcccgtctgtccaaaacagatttttcactttcttgctctcatccaaatcaaactcataaaagaaatgtggatctttttcttttttccttctgaaaaattctaaagttttcatcatatcattgctgcttgtctccttgttaattgtggttctcacattgcttatatctttcttcgtataaggcaaagaagtcaatcctcctcttagaacagataaaatcacaatcatgtgccttgttggtatattacattccttcaaggtccttatgagcattttttcttctgtagtcatgtgtttgtgtgatttgagaaatctcacttcatctcttggacttagttgatgattgtggtctaattgtacccttgaaatattccaaatctcattcctctctgaaataaccagagcacacttgcaatctgttgcatcattttcatttgtatttctttccgaaaccactgtttcctctgcgcttactggtttggattgagaagttggtttgccttgtctattacatctgaacgttactgtcacgcccggaatttctatccaaaattccaaacgcttacatgtgtgtgaactctcgtccaggaatcagccgaggcacacaataacaaattgataatagagtacaattattactctaattaataagcgaataaaatgtcattacagaggtagatagttcctctcaatcaataaagatctaagcagcggaaaaaataagataaacggcgcagacgactccactccacaggcagcttgaccagggctacacctaatcctccacaccatcagcttcactgtagaactcttcctctgatgaatgattgcaaggtgagtatatgacatactcagcaagccacgcagcaaatatgcaagtgcacaggataacaaaggatggcataatagggtttcattttgcaaaagcagcatttagcaaacatttgagaatttaataaaacagttaagtaataattaaacaatattaatccaacgctatacaacataccctgttgtataggcccaaccattctgaacaaccatcccagctgcacagttctatctccaaactaggaatataccattccaaaccaggagctaatcaaattattaccagttatagcatcttttattatgatgagaggtgtgagactaatcacgaaagacattgttagacccgcccataaccgcgggcacggctattcgaatagttttactctgatcagaggtgtaccaatgtacccacaagacacagccccacatcatgtcaccatgtgcctcaataccaccacggtacctcggaaaggagctgtgacaataccccttgcacaacacaatccactacagcgcacctttcctggatcataatcacccccttataaacaaggcatggactccccagcgacccccgtgggcttatctccgtcacttctcagtctggtgctccgcaatgaaccatgctatacaaaaggtaaagccgttgcccatgctggcttgtggttggcacggttaatgtttcacaaccgaaactcgtgaaccggtccttaattgtcatgagcacgaccatcaaaaccatgtgctcacaacccaccattatcaggttttagttggcacattaattaattaaccaatcacgattgaccatcgtgaactatcattaagccatcattaaataatagtaaatcttaagttatcccaatagtgtgctaatgtttctaagcagggctaagcaattatatctaatacatctagttgaaccaatatatatatagcccaactagtcaagttataacaacccaaggtatcaaggaataaagtaatcaagaacaaaaagggctataacaaacaataggttaattccacccaatgacattcgaaaataaatgcaatagttgaatagaaacgatagctttaaacgggatcaacatgctcaaagggttgtttgggatctgtgtgacttgccttgctgaccttggaactcttcaaactcttctcctgcgaaaacggactctccggaaacgacggaatctaagcagaaaagagcaaaatcaccaaaacagcacaaaaacaagcatgaacagtacatgtggatatttttaacatgtagatctcaaatttagaaaaatttagagacttgaaccaactaaatccgagctaagatgaattagttatgaatttttgaagattaaatcggattaaaacacttatatggattttaattgaattatgacgcaataatgaattatttttgaaaaggaaaaagggatttattgcgtcagcggctagggtttcgcggtggaccgggcgcacggcgacggttcacgggaacggacggccgagatcgatcttatccaaaacggacggccgagatcgaccgatccacggccggaccacgagagacgacgacgatgacgtcagcggtgacgtcaccacctgcggcggctcgggagcacaagctcgccggcgaacgatggcgcggcggcgcgaacggagggcaccaggacgtagagggcgacgcggcgaactcaccagcgaccaaaacggcggcggaagatcaacggacggcgacggcgtcgaggaagaagcggcgtcgaccttcggcttgacgacggcgacgatgctccggcggtcttcagcgacggcgaaggggcggacgaggacggcgacgcgacggcgaccacgatggcgacctccccgagcgacggcgacgactggagcgacggcggagcacggctggagcggcggcgacaacggcggcgcgaggctacacggggctagggctctatcggcaacgagaggcgaaggcgagggtggcgacgggtagcggcgactccgggggtccttttaaaggggctaggaggcggcggcgaaggcccacgatgaccggcgacgctatggaaacttcggggttcggaggaaagagaccgatccgattcgacctcgaataaaacactttccaagccgatttagccgatgattccaaaagagaaaaggtagaggagatctcgggaaacatttcccctcaattgatttcaccgggaaaggaaaggatcggccgaatttggaaggaaacggcggcggcgcggcgctagggtttcgggcggcggcggcgcgacgaagacgacgactccgacaggcgggacccacctgtcagctacagcgagggcgcgcgcgcggctgcggactgggccggcttgggccgaggagagagagagagaggatttgggccgactttcggcccaaagccaaaagaagactttttaaaacctttttcaatttaaattattcatgaaatgcaattccatttattaaaaatacttccttagctcaaataaatcccagaaaaatctaggaattatagaattaagcaaagtatttaatgaaattttatctggccccattttatgttggaatttattaattaaaattagatcttctcttcaaagatttttaaaatcatttctaaaaaattccatttaaacaacaatttatatattttgaatttttaggatgtgacaaacctaccccccttaaacagaatctcgtcctcgagattcggaagaactggcgaacagatgcggatgagctgacttcaattcatcttctcgttcccaagttgattcttcttccgagtgattactccactggactttacaaaaacggataactcgattcctggttcttctctcatctatttccaagatacggattggtttctcaacataggtcagatcctcttggacttctatctgttcaagattagcttcttcggtaggtacccttaaacactttttcaattgcgacacatggaacacattatggacgcctgccaaattgaggtaattccaactgataagcaacctctcctcttctactgacaatcttataaggtcccacaaaacgcggtgccaattttcctttggtatgaaaacgatgaacccctcgaagaggcgtgacatgaaggtacacataatctcctgcgtcaaaacttagatctctccgacgattgtcggcataactcttatggcgagactgggccacacgcaatctttcttgaatgattttcaccttttcttctgcttccctcaagatatccgtcccgaaaacctgacgttctcccgtttgatcccacaaaagcggagtgcggcacttccgaccatacagtgcttcgtaaggagccatctgaagactagcttgataactgttgttgtacgaaaattccgcataaggtagattcttatcccaacttccaccgaagtctaaagcacaagctctcaacatatcttccaaaatctgattcaccctttcggtttgtccgtctgtctgcggatgataagcagtactaaagttcagcttagaacccatctcttcctgaagcttcttccaaaattttgaagtaaactgactgccttgatcagacactattttcttagggacgccatgcaaacacacaatccttgccatatacaattccgccaaccgacttccagaatatgttgtctttactgggatgaaatgagccactttggtaagtctgtcgactatcacccaaatagagtcatgacctgatgacgttctgggtaaaccagtgatgaaatccataccgatttcctcccatttccattcaggaatcttcaaaggctgcaacaaaccggcgggtttctgatgttctgccttgattcgctgacaaacatcacatactgctacgtattctgcaatttcacgcttcatacttgcccaccaaaatctttccttgagatcctggtatattttggtactaccagggtgaatggagtataaagtatcatgggcttctttcagaattgcatcttttaaatctttgttgtcggggacgcagattctctcacccaaccatacagttccttgctcatcttccaagaaaccgatagcttttcctcttctcatattcttcttaatttcttgaatatcaggatcattaatttgggcttctctaacttgatcaattagagtgggcttcgcttctaaggctgcaacgaaacctctactgacaattcccaaatttaatctttcaaattcctcgcataattccaatggtaactgtcatcctttctgctaagagcgtctgctacaacattagcctttcccgggtgataatgaattcccatgtcataatccttaattaattccaaccatctccgttgtctcatgttcaaatccggctgagtaaagatatactttaaactcttgtgatcggtatacacctctgtacgagtaccgaaaagataatgatgccaaattttcaacgcatgaactactgcagctaattcaagatcatgagtagggtagttcttctcatgcggacgtaactgacgagatgcataggcaaccaccttcccatcttgcatcagaacacaacctaaccccagtttggatgcatcgcaatacacttggaaacccttctttggatcaggtaaaatcaaaataggagctgatattaagcgattcttcaactcttgaaaactctgctcacattcttctgaccacttgtacttcacatctttctgaagcaatcgtgtcatgggcttagcaatcttggaaaaattttctataaacctccgataatatcccgcgaggcctaggaaactgcgaatctctgaaactgtctttggttgtttccagttggttacggattccacattactaggatcgacggcaactcctcctgctgagatgacgtgaccaaggaacttcacttcagacaaccaaaattcacacttactaaacttagcatacagttgatgttctcgtagcttttctagtgcaaggcgaagatgttctatatgctcttctttggttcgggagtagataagaatgtcatcaataaagaccaccacgaacttgtctaggtattccataaacaccttattcatcaagttcatgaagaaagcgggggcattggtaagtccaaaagacataacagtacattcaaacaatccatacctagtggtaaaagctgtcttaggtatatcttcctctttgattctcaactgatgataccctgatcgaagatctatcttggagaaaacggtggcacctttaagctgatcgaataaatcatcaattctgggcagcggatacttattcttgatagtcatatcatttagtgcacgatagtccacacacatcctctgggtatggtctttcttttccacaaaaattactggagctccccatggagatgaactcggtctgatgtatcctttctgaagcaaatcgtctacttgccttttgacttctgccaactcattggctgccattctataaggtctcttatggatcggagttgttcctggtaccaaatctattctgaactctatatctcttttaggaggcataccaggtaaatcgtctgggaacacatcaggatactcccggactataggaatctcttccaaagttatttggttcagtcttgaccttaaagactcagaagacaatgcatgaattgttacaactcgaccatcatcactggtgagagttactttcctgttagcacagtctatcacacccttatatctggctaaccagtccatccctaggatgacatcaaggtctttggattctaacaggataagattggccagaaataatgatctgagaatttctattctgacagaggggctacgttgcaaagagagtgcttgattacttggggtattaaccatcaaaggacgtctaagatcttctacttccatcacatgatttcccgcaaaactcatagataagaatgaatgtgtagcaccagaatcaaaaagcactgttgcagggactaagttaacaaggaacgtacccaaaatcacatctggagcaccttgagcttctgtagcagcaacatgattgacacgggcctttggcgctggtgcggtagagttgctctgggcagggacagccttcacgcgtcggggcttcggacacttgtcagcataatgtcctgggtctccacagttgaaacacactacgggcttgctgccttgctccctcttggcaggctgttgctgtgttggagctgcaacagggcgtggagcttgattgcggatgttgttgccagcattgttgttgaagaactgacgctgcggacgaacaacagacgaagaacctccctgtggcatggactggggtcctaaagtaagacgcggcctctgattattcccctgttgtgtcttgaattgagcaatccggcgtttcttctgttccatgcgattgtacttgtcctcctggcgaatagccttatctactaacttctggaaatcaggataatccccagtcatgagtggataagaaagctcatcattaagtccttccaagaacttctcctggcgctcttcatcagtgcgtacatcttccagagcataacgagccagacgattgaactcgtgcagatactcggtaacagagcgagatccctgggtgagcgacctgaattccttcttcttgagagacaccactcccgatggtatatgcgtcttccggaaagcagcggtgaactcaagccaagtgataggttcagcagtaatcctattaaggcgggagtgatcccaccattcagaggcagggccatgcagctggtgtgatgcaaatgagaccttctcctgatcagtgcactgaagcaaatccaacttcttttctatggcgtgcaaccaatcaccagcttcaacaggattagtggtactagagaaaataggcggcctcacacgaagaaattctgctaacttgttctggggaggtgcatggttatttccctggttctgctggttctggagttgctgcatcatcatgttcataagttgtgtctgttgagccaggacttaggcaagtgtgggattctctccattgttgttgttgttgttattgttgttgttggggccattcccattgctgcgagtgagcaccatctggcatgggcaggagcataagaagagaaaccggggaaaactacttaggaccgagaattaatttaacttttattgatcttaagtgagtttcattattacaaaactgaagactctcacaccactaaacttaccaactacctaacactcgaaagcaaacaaacgcacgcacttacatcccaccactgatgtaaatcacatgcgagacacacacaaccaaacttaaacaagcaaactaacacaacgatctaagacaacggtttgacaaggcattctaggtcttccgggcatcggagttgattgaaggctcgttcggctcgtcttcatcatcttgagttgctccccactcaatcttggaatgggtgcgctttgattcatctccttcatcatcacttacattgacgaccggaggatccgctagggctggggtaacttctttctccaccacacggacctttggcaccaattggtagcgagggacaaatagagctctcttccttgcggtaagacgaatcctggccttctgcggtggtgcttctcccttcaatgcggctagttccttctccaaacgatccactttgtcctcaagcttgcaaatcttaccacgattccggtcttcacgatcttgggctgctaacacagtctccgcacgggtttcatccatagcccacagcatctcaaccaaatgccttgtggtagcatcattctcaattccctcagtctcaaggtagctgccacggtcacttccctgtggttggcgaggatggtagcgatactcagtgtcggccaactgatcactgtagcgatcaaggagctctcctatggcgatccttgccacctcctgacatgtatggatgtagtttcttcctccggcttcgaacatcactgagggaatatcttcactattactgttcaaggtgactttgactcggcacttctcttcgtgacgatcatgaggaatttgggcatagaaaggggcagtcccaaatcctatggcaaaggacatcgtacgcaactcctggacaaatccctcaacaccaaacaagtactcaggcttgtagcgcggcatctaaagacaagtgaaaggagggagttaagacatttatccaattaatagcacaagtttttggattaatttgaataaagttagaaaatcaaagtaaaaggtaagccaaacttgcaggataagttgaaacagttggaaacaaggtcacaaattttgtacttttgaacaaccggtttcaaaagaaataaaagaaagttataaaatcaacatgctaaatttatttcattgcagcaagattaaactaaacaatattgtaaaacttttgttggtaaaatgagccattagtacagtaatagatgtacagtactaataacgctagaataaattttgaacgagaaccactaaaaaaaatattaggaaatgcatgtgccattagtttggtttaattaaaagagaaggggaggagaacagttctacttttccaatatttttagagggcttctatgggtaaccatttggcataacctagggtcaaggagctctgataccaacttgtcacgcccggaatttctatccaaaattccaaacgcttacatgtgtgtgaaccctcgtccaggaatcagccgaggcacacaataacaaattgataatagagtacaattattactctaattaataagcgaataaaatgtcattatagaggtagatagttcctctcaatcaataaagatctaagcagcggaaaaaataagataaacggcgcagacgactccactccacaggcagcttgaccagggctacacctaatcctccacaccatcagcttcactgtagaactcttcctctgatgaatgattgcaaggtgagtatatgacatactcagcaagccacgcagcaaatatgcaagtgcacaggataacaaaggatggcataatagggtttcattttgcaaaagcagcattt

SEQ ID NO: 6080 - DNA, 8496 bp, Oryza sativa
ttatggaacaaactatctgatgcactttttctataatatctgatggcactttttcttttctatttctttctatttcaattagatatgatttgttttggtttttacatatgtactacttttgaagtatttgataccctgttttttgctcgaaaaatctgaaatcatcttgaaattgagattaaactgcattagatcatgatttcatatgaattttacattgtttctttgtagttacatgtattttcaattgaaattgtagtgttcactctatatatttgtaatacaagttcactgtaactagtttcattatattctattttgagacattgaacaaatcaataatgatctattatctgaaatcttcattttgttatctgatgatgagagaaacattgaactgagatagtcttgagtttaaaacatatcttgaatgtgttcctgaatttgtgcatgattgtgtgagctaaactattttgtttactgaactaatctttttacaatgagttaatactagaattactgtgattcttgtatgtaattttattacttttttacagtaacatgttaagatgtgagttcatatgaattggctcttttgtttgtgctgtatgagatattgaacttttatgtaatattgagttggatgagacaagtggttgacattgagatttgaatttgtcattagtttaatatggtgattatgctgataaaattgaatgtatgacaattcaggatatgctatatggcctagttgttatatttctgtataactgtatgactgtgatatcttcagagtgaaattcagtaaggttggaagactaatcaatctgtcatgtttttttataaagttagtttggtattcatcaatagtacacagtaatactatcatccagaatgcagttttgtagtactgaatgcagtgtagttttacttttaacattacatagttcagatctacagagcaaacatatgaaattttcagttctgagttgttgtatttatccagcaaagtggattgttaaccttgtttcatttgacatattcagcaatttcatgtattcttttgaattatatatttgacctaaactctctctttgatctttttcaggaattgtatataggggataagaattggagccttgaactaaccttgaactggagccttcttgtttctcttgattttgccttcctcttgttttttctttgtgttctccagattctgtgtttcctttgtatggatctcaactttctgttcagaagttgtctttgatttcttctttcctatagaactactctttgattctgacattgtactctctccttccatctgcgatttggatcctctttttctctcttctttctcttctcctagctccatgtttgattcgtgctagatctgtttgtgaactagtagtgctgttgaaaagtaggggattgaaaagtgtggtcccatacatggttgattcacgtgacatgtttttcatctacttggcttccaagtttggtccctactacttttttggataggctgttggattatgatttgggctttatttccttgtgttttgcttctaattttgtatcttgggcctgctttttactaatgggcttttatggatctggatatagacttgggccttcaaataattcgcatgggcgaaaaaatcatgggctttgtttatttgtgtttgattcaaattttgtattttgggccttctttttactaatgggcttttatggatctggatatggatttgggcttttatggatctggatctggatttaggctttaaaaaaatggcgttcaaataatcaaataatatatctgtttttaagtgtaatatctatttgtatcactttttctgagttgttggatgtgcatcctatggtagataaaatctgtatgattggagcttcagaaatcattcgattcctatatagacagccccttctttttttttggttctgggatttttttcctctactccaggctcttctagatggcattgtccattttgtttaaaaacccttcttaaaacttgcattttatatttaggtccgctggacctttttctcaccgttcgtatgtcatcggacggctatgggacattttgaatgcgtggcatgttctcctgctgagaatttggatggagcgcaagcgtgatgccacgtggctcagtgagaggcctgggattagacctgaaatcgtatatagagattgagggacctcagatgaacttattcctatataaaacccaaagtagggtccacgtgtgcccaaaaaaaaaatctatgggcctcaaaacggcacagtgcgaaaacccgtgtgctgtcatggagccatttaaccagtaatggcacggcacagtagtattaaaggcgcccacccctcgtgtccagagataaggctaaagctcaccgtccatcgtcgtcctccgacctcaagccccctctccgagctgacacgaccagcttcagcacttcagttcggctccgtccccgagttcggcagccgaggcgagtggggcaatggtggctcccgcgacgctgtccctccgccccttcgcgaccctcgcgccgtcccgcgccgcgctgccccgcgtcggcgccgggttcgcgctcccgcccgccgtctcgtgccagccgaggcggcggcgcctgtcgctccgcgccgtggccgtcgactccgaccagcagggctcccccgagcctcccgatcaggtaaaccaaaccgcccctcgcctcccgccctaattttgataattttcccgtcccggtttgagacggagaattgtggtggattgggcgcgcgcaggaggcgaagccgaagaagtaccacttcctggtggcgaacgccaagttcatgctggacgaggaggagcacttccaggagcagctgaaggagaagctgcggctctacggggagcgggagaaggagcaggacttctggctggtggtggagcccaagttcctcgacaggttccccaacatcaccaagcgcctcaagcgccccgccgtcgcgctcgtctccaccgacggcaactggatcacgtaagtgcagtgccccctccctccatcgatcgtttcaattgcagccgcaaccgatgctaataataagctaattactagtacaacacaaaacatgtctagtacagaaattaaaacgcctatcataaagagtcgcagtgtcagtacggtattacctgtgtgtagtgtgttatggacttatgatcagcagagaacaaagtacaaactgcaaaagcaccgaaccaacatgatgacaacatcaacagtttttcatttctcttaccactcatcaaatgtggatttaaatagagctttacggtattgctgatcctacgccgacatacatttgcttcagtacatgttctgagctggtgacaaaataaggacgatgccaaaatgcctagtttggttaatatgcaagcattcttcttttttttttgttgaaaaaacttcaaattcagggataagaaatgccaaactattgcaaataagcagtagttttcttatatagcactaattacagccaaagatgctagtagtgccttgtccatcggacttgcactcgcgattgtaaaatgcttcccacgaaatatgcatcctgcgactgtaaacacattctgcagctataaatatatcccacaaaacagtaaattgtgtctcttgcaaatgcaagcggagggatatagacatatagtagaatatttttcttataagagcaactagtcagatttgagcccgtaatgttctgtacaattgtaacgtccattttccaagtttgatgtgtttcaccgggcacatttctaacatttggtcaagatcctgtttcaaatgcaaaagtacaaaagttttttgtagtccttgtgaagtattgtgaggcataggtatattgtagtgttgatatgactggaaaaactcagaactactccctctgtttatttgtgtatgatgctggttagtttattaatgtcaaacatttcagaatggatgaatacaccttatgtaaacgaagacactgagtgtaccttttgagttttgctcaagtcaacagtcctttggaattttacgtgatcctccatcttatttgctatgatgcttggatctgtctttctttgtcatggctcatgataatgatctacaagtgtcatcttaattttttgagaaaattccttacgtgcctctgttttttcgctcaatcccttctataaattttgccacatcccttacatggtcttgagttttcattttgataccctacatacccattccgttatttggccatgaactgaccgttatatttttttccctgaaatgactatactgcccttctctcataattatgtgctagcttattgagaaaaaacacaattctcgatgtggaaaattcttatatatgataaaatcaaaagtgatggaattatttgaccctaaatatgaaagattcaaatttttagcaaacttcaaaatactgataaaattcatacaaaatttcatcaagaacttgaaaccaaaactatttttgtttggcttacatttgaattgaaaatgatttaaaaatgataaatttcagttttaaaatttgtggtcaaagaattataccccatttgttttttttaaaaaaaataatgaacctttttcccattgagaattgtattttttttctcaataagctagcacacaagtacgaggggtaatattgtcgttttggaaaaagaaatctagcggtcaactaatggaataggtatatatgggattaaaatgaaactcgggagcatgtaggaaaataggaaaaattcagaggcatagaaatgattgagcgaaaactagtcagggcacagaggaattttctctgatttttttccacgcaccatactaactgggtaggatttcgagttgtggacattggtaatgagtcgttcgcatcctgaacacactgatttgatgagaaagctagtgaaaaagtaatagagggaaagggacaatcttattggactacgaaactggacaacatgataatacacagaattttggctctgagcatgtgactcagtgactatgcatcacattattttctggatgtcatgatgtacgacatggtgtgaatcgccatgaccagaccagttgtgcttctaaccatccaaaattccagataggaagaggaccaaacaatcactgaaatagccagcatctacacttttaatgatcttgtaattgccgataccatgattaactactttcaatttaagtagcatggcaatcctcaaggttactcattttattcttttgttatcagttttatgaagttgaggctagacagggtcttagcagaacaatttgaagcagaaacgcttgaggaggcattggcttctaacccggtcgacttgaaatttgacaagcctgagaaatggacagctccataccccaagtatgagtatggatggtgggagccctttctacctccaaagtctagcaatggaacagcatagagatgatcggcaatccatatgagcaatgtaagatttcttccatgcaagtgcccaaatgtaatctaaatttttaacaatgcctatgtaatacttggggtgctgtgagtacagttagctacaatagttgcagagttgctgtactttctggtaataccagataagcagtggttttgttttggaagattgtggacggctgtggttggggtataattttcttcatgatgcacattgctgtctatgttgtaaattttatcacgggaaaaatgcagtcttccaggtcctatataatttctgaaccaccaccatgtgcatcaatagtgtgcacatgatttccattctgcagaaacagccaccaagcaaacaacttggtgttgtcaatgattacagaaaagactcgagggccttgaaggtctctctctattagtcatatataatcataacatttcgtaatccaacataatcataattttcattatcccaagacatcagtaccactaactatatactattaaagcttagggtgtgtttgattctttgggtgtaaagtttttgaagtataccgacgcatatttgaggtattaaacgtagactaataacaaaacaaattacagattccgcatgtaaactgcaaaacgaatttattaagcctaattaatccgttattagctaatgtttattatagcatcacattgtcaaatcatatcgtgacaacgtctcgtaatttacatgcaaactgtacaattaattttttttccacatttaatgtcccatgtatgtgtccaaacgtttgatgtgatgttttttgccaatttttttttatctaaacaaggccatattgacatgtgttcatttagaagcagtaataggatgctgttatctcacactttgtccataactaaagaccgtactccataaccccccccccccccaccccccaaacacacaaaaaaaaccaatgatacctgttcaaaacatgttatagatacaaagggaaaaaaaacattccaccagtaaccaagcacacgcttattacaattttaattaacaaaaagaccattgttctgatataggtcacattgttcttcttacatacagaaagcttattggattaggaggaacacaatgacacagatgcgcacaagacctatctggctacatgcctagattagtgaagggtaaaaccaagagttaaacaaacagtactgaaattacagtcatcattacctgcattatgaccaacatacaacaaacactgaatcagtattgactgaaacaatccaagggtaatgttatagctcctagatcaatcttcagatgcttcagaatctgcaaatcaatggagtacattacttgaaggcatataaaaacttggtttaaagccaaacatgtataataagaaagcaatgcgtaatcatataaagtgtagagcatgcaaacatgctgatgcaagttcctattaacatgtggtaggtattcataagcagacgttaggttggcctagcaatcttcatgtgcttaaacgtacactactgtactaatgaaagaacaagaagataatggtccatgtgagaactctatgcctccttggatttaaaagagttatctattagatttcaaacaattaagcttttggaatgaagggaactcaaaatagaaaggaggaaaacaaggagaaatgccttctcaaattctgatggaaaaacacgagtactttaaaagagaggtttggatgtaatagggggaggggggggatgttgattttcaagaaaggggatgaaaacatgaagttgacctcatggattttttttttccaaaattactatggattagtctgttagataataactttaaagtaatctgtaatgtctaatcctttgttccaaaggcctccatagatattatattcctgtagtaggatcatagaacaaacttcccatgttctctataaccctgtttagtgctaatgattttccccttggttagaatattgaacggttttctacgaaatttctatgttttaaacctgtccacaatattttcaatagaaaatcatgtcaagcccatttcttctttctctgccatttcttcaagcaaacgcttattcaaatgacggctgaatacgtcaacgcacaaagggaaatgataggcctaggcatgtgcacgaaagcaccacgaaattgaagaaagaaaaacttgtggtgaagctggtcaactttcctcttagatatatgtggataggaataattaacaaaaccaatgtttaagtaccggagtaaataccaatgaaatcttcgcatgccattttttttctataatgtcgcatttcatggtggtcacagaaaattctcaatgctacaattaagcagatcaagtcaagaacaggaggattccacaggacgatcaagaaaaatttgccgagcagagacacgttgcaatgcgtggatacatacatgacacacggggagaggacgaaggacggcggcctcgctcgccgccgtcaagcgccccacacggtgatcccctgcatcatgcacttgaactcgccgaagtcgacgcggccgtcgcagtcgcggtcgacgttgcagatcatctcctgcaccgtggcgaggttccgggcctcggggaggccgagcttcttgagcacggcctgcagctcggcggcggagatgaagccgtcgccgtcctcgtcgaacacccggaacgcctccttcatgtcgccctcgtcgtcgtcctccccttgcttcccgggctcctcctcctcgacggggccgaagagcgcgtcgccgagcgcgcggtggagtgcctcgaagtcgccgaagcggagccccgcggcgcccgcggggatgtagcccccgaccgtggccttcagccccgcgcggtcggcgccgaggccgagcgcgtcgagcgcggacgccatctcgtcgagcgtgatctcggcgtcgccgttgcggtcgaacaggtcgaacaccctgcgcagccgcagcgc

SEQ ID NO: 6081 - DNA, 16215 bp, Oryza sativa
gttgttgagttcgtttgcacagtgtaaagaaccatttagttacagagatctaaccgtgtcctttttaaggaggatatttaccatttttctttaaaaagcatggatcatagccagtgaccacatgacctccaaccaaactcataaaattccatatatagacggcagaaaatatcaccaaagcataaataaataaatgcatctattgcaatagcttgctaataatacgagcacgggcactcaatgctatctaaattctacattttaagctaattgcactggactataacactgtattaatacagagcaacgctgttagcacagatttaaacacagtttacaatatccaatctgtatggcttgcatcagatgctcaaattaatattgttccaatttctccaatagaaaaccgagaaaatgagacttcatcgtgataagcaagatgtatatcttctggaacaagttggaaccgcgcagtatatccgcatgaacgaaaaacaggatcgccacgagctacatttaatcgccacctaaacgaaccaactcctacagctaccacccggatagcacactcgccagagcgtcaaaatcctaatccatggaagctcacagcctcacgccccccaccagacagaacccaacatgaagcccgttcacttgtccgtgcgcccgtgcgtgcgtaccttcgggttcttcctctcgccaccgtcatcgtcgccgccgccgcccttccccttccccttcttcttcctcgccttcgcgccggacttgtgctgccggtgcgccttgtgcggctgctctcccccgccgtccgcgggggccatggagcgctagggttagcggcggagggcgtttgcgcgcggcgccgctgcggcgaagagagcggcggtggagaaagctagtggggaggaggaagcctggagggggaagaggccgagggttttggggagagggagagagaggcgccgcgtgtgatgggccgagcggggtaagcgctactatgggctgggccaagaaggcccaggcccattttcacgtcacgagattcggacatgccacgtgtagcgcgcaggggtcgcaccggccaccgcgccgggaaggggaaggcgtgccgcgtgcgcggcgcgtggccgcctgcgacaaagccaccggcagttacgcctccgcgctcctccttcccaagagacgcagatctccaccccgcgctcgcctcgctttcccccaaaaagtcttctcgtgagagctttcccccccctcctccacccaacaaatccccagcctcccagattcgtggcggaggctgcggcctgcggctgttctagggttagctctcgctccgccggcatttctcggtattttttctaactagtcttgtttagggcagcgcccctccgtaaatttttatagcggttgagttttctgggtagatgctttgttgatatagaatggacatggttccggttgtctgtagcgcgtggattcccagctagaatttctggccttatgttggcgtcagttcaataaaatggaatgtttactttaatgtgcttatcgtagagatatcagatatgttttagttgcaaatgattttttttatttatgattttgggagctaaaactggtgcacaaactttttttttgtcagtaatagattggctatccgtctctagaacatgacatttacctgatgaaacagctaatctgttaaatgtggttgtaagttgatatcttttgttgtattagtaggtagataaagtattgtaagggcttgggtttgcaaccggagatggatgctaaaaagaagaggaacaagaagaagaaggggaaccaagggaagaacactggtgatgtaacgtccagcactgcagaggctgccattcggtcccacaatcatgagacagcccctaatgaccatcataatggcactgatgctgatgatgcaatgtccactgttggagaggaagctcctcagtaccagaatcatgagccagatcgacaggcaaatcatgatagcacaaacactgatgatgtcatgtcctctgttggagaggggattccatttcagaaccttgaccctgccatgacacatgaaaatcacaaagtcagtagtacagcccatgctgatcagaggagtgttgagatgtcagattccaccgtggagcttgacatgcacagactatatgaagcaaagcttgtaagtatctgtaaattattagattataaatttaccgtattcttatgcaaagttcgtagcttacaaagcttagtggaagcagcttttcctaccacttgaattgacagtgtattttttgcattagattctttaccgtgcaacaatacattagtaggtttgacattaatgctaaaagttggcaatgtgaattttcttttgggaatgcaaaaaaaagggtgctctgatatcacttgggcatgcttccatgttgttggattagtttcacgtgcagccataatcacccatacagtgagcaaagaccatataggtgtcattttttctcccccttgcccatatttttctcatcattcccacctcttgtattcttagtctcctccctgcatttgtccggttgcattgcaaccacttcactgttcttcctatcacccattcttagccacctaccatgtgccaatagttgagctcgtcactgccttacctgctgtcatgtttctcaattatgtcatcttttaacctcagatattgccaatgcaggataaattacatgatacgataaagaagttggaagatgagaagagtttgtggcatcaaaaaatggtttgtatctggctatcggcacttgtggttgacatacatagcactcatttgtatttatagtatataccattgctgttggccaattggtctgaaacatatttttggtaccttagtacaataaaataacatgtatagaatttaaatatctccataccaacctactttcactttttttcctaactacgaggcatgtcttgacaccacaaatttttatttgataataattcatggtccaacactcagtcttcatgtgctgataaacagaaacgagaagatatgtgtgaaacaatgttagattaacttctccgagttctaacagttttatcctgtgatttgtgctttgccgaatgaagcatttttgtttcatctattcatttcctcaatcaggcatctccatttgttgataatgacatttgctgttttgcatgttaaagacttaagttacaaattataatacatgtttggtacattattttgtgtccatatgtttatatctttggatcaaatggtttgttgcaaaatgtgaacaaatgctattttggccatcatagaaatgtcatgtaagaaatattttctcattctttttcctgcagagctccatggagattgaggttgaaaagttgcataacaaagtggattatcatgcacagaatgaggtatgtttatgccctggaatcctggatgcaaccacatgcaattcattcaaccaatatagctagaaaaactaccttactcttcatacccaagattttctgccatgtcacaaagtgaatggacaggtgatatgaattaaaaatctagctaaaatgttgtcttgtgatccaatctctaggtccgtttggaggaaaagctcaataatttacagaatgggtatgatgtgctgattaagaaggaggtatatatttatttattctaatgatttctttgctcgtgtgggtagacataccagtcctgcctatatgcaggagttctgaattttgcagattaattttagttccaatttgtgtttttatgcctctatgaacaacaaattatgtcgtcttcactatgatacttcacagctaagtctcaccaagtatgtctggcatttcattcatggccacagttgtgtcctgtcacacttccaaacttgccacaagggtgggtaactaataattgtgaaaaaaagatgtggcttccacacttcttttgccaaagtgtggtcagaaacaaacatttctgatagtaagcacctctttcatttcacttgatactatagaacccaaagtgtctgtatttttctttttgttgttacattaacttccccctgatatttgaagtgtcttagcccctcatgtgggaactggaagtacgtcaggcttaaatcttgttataactgttaaacaccgctgtgctccttttgttgttatctattcgtggcttcatcctgtaaattttgttctctgacttcattcaggtagctttggataacaaagtcaggtccatagaggtcatcaatgatgccttaactcatcaggaggtaatgcatgaatcacttgttctgttacaatttttatttagtatttgcagcaaatgcatccaaagcccttcctatctgtttttggctgacatgttgctccttttcttcagacgtctcttaaagagagattaagtggactggaggagacaaataaagtactgcttgtacaggtatgaactacaaatccaactatttgtgtttttttttctttgtagttaatgtttgatatcccgttaagattcaagcaagcaaatgattagttaaatactaagattgataggttgttgtgtattatgtaatctgcaacatgtggccaaatatttgtcctctccagaaaggtgttcaatcatatgtaaagttaaaagtcatgatttattcgtgacgattttgaatatgtcggatttaaagctttggtgctttggttttcatttgcagcattagacatagttctgcttatatcatctgatattactatttaataacaaagtctggcaggtgaaggtgctggaggaagcttcaaacaatactgttgaggaaagccagaggttggtaaaaggttttgatgaactggcatcaagattaggagtctttgaagcaaagtctgctcttactgaagcctccgtgactaaaaaggtaaatgttatgcagaacattcctttttgtcacctgtgtccaatttggtagacgctatacactccagtggatctgcctggggagaaataccacttgatatcagtagtctcttctctcttgtgcataaaacacttgtccttccagattctagtgcataagatagagacatgataattgaggtctttgaaaataatgtgatggattaaacggatttgaccagcacagttctcaatgagcagactgttggttttggtaagaagtacgagtctccgcatgcagtgtgacagaatatcaaatgtctggaaaccgccagaattcatatatacttgtatacagcgtaattgttttctgcttgcagggtaatgaactgattgttgatagaagtgtaaacagttctgcagcaattacttctgtggataactatagtccaatcaacagcagtcctagcaacgcctatgttagtaatcatctagaagaagctccaatgcaacttccagaaacaacaatcaatgatgtttcttccgagggcctcattgacatgaatgcacatcaaaggtcaaagcaagattttgatgaaccaagaacaagcgaagaaattctgccagttgcattagatgatatacagattcatgaggaagacccacaaccaccggtagccgatgatgaggcagaggaggttccattttctgatgctccaatcgtcggtgctccattccggttgatttcattcgttgctaggtatgtcagtggtgctgatttggtgaaccagaagtaattctccattaatgccatcaagcagcttgagatctgtatttcttggaaagaggagtcttcctgttttgattctgctcacacagttatctcgctaagattgtgaggatgtatacgatggatgcactgaattcaacagagatatggaacctctgttcagttcttggtagtgtgctcgtgtcactaccagtttttcttcctcccctgtcaatttttcaggggcagcagaagctcttgttccccagttatagtgttatacacacaagaggccttcctgaccatgtggggtgtactgaccatatttattctacagaaactgaaaatttttggtattccaacagatgtttaatgcactgaacaatgaccatgcatcttgaagaaagttgaccatttggatttgatgtattgcattgattggatggttgctatacaatgttgttttgtcaaattggaaccttttggtgtccccgatttaatgtttgcccctggtattgctgatctctgcggtgccgcattgttgctccatttgtttgtcctagtgttggacctatggatgtcaactgttacttggctttctcgtttgcaatttttcatagcgaagacagacaaccgcaaaaccatgaacagaaaggaactaaactgccaatcacgttgtctcctctaccttgatttttctttccccatagaaaaagactccctagtgacaatttctaatgaacgcaagttaccaacaccggagcacagcatgtaaatacaggtcaagaagccagcaaatcaacttgcgcatcatgcaatgcttctacatagtgccagtgctgaaagcttctggctacattgaagaggccatcacgaccagccttaattctaaatgaattgctgcaacctgcaaacatacaaaccagtaaaccacacagcagctcgtcaggcattacgccgaaggaggattggattccctggcattttcgttggaggaatcgcggctctctgaagcagactgccggagctcctcgatcatcctgatcacctccgccatcgtcgggcgccgttcaggggatcgcgacgtgcacgccattgcgagctgaagcatctgcaccagctcgtcttctatgttcaggtacttcatcagctcaacgtcgaacacctcagcggtccactcctcccggaccacggaatgcacccaccttggtagatccacgacatcgtcctgtccttgcgactgaaggggtgcttttccagtcagcatctccatgaggagaacaccgaagctgtaaacatcggacttgtgagtgaatttcctggattcgaaggtctctggagcacggtaaccgacaacaacccgggatgtgctgatggggaagctcatcaaggcactcagcccgtagtctgagacgtaggggttgtggtcttggtcgaggagtacattggttgccttgatattgccatgggcgagcttggagccgccttctgcatgaatgtgtgctataccacgcgctgttccaagtataatcttcatcctggtattccagtctaacggggtcttctcggcaatacccttaatacctgttaatcagaagtttgtgagaaaaatgagaaataacttttggttgcgtgcttgcattgcattttgtgcttgtaaattagctttgatacatcatggattgttagatttctacctggaaaaattgatcaatatcagaaatcaaatgtaaagcatttagtagtgaaagacataagcataccgtgcaacatggctgaaaagctgccggtggcaacatactcatagacgacaagtttctcatcctttgagtagtagtaagcgcgaagaggcacaaggtttgcatgtttgcctaccctcccaatttgctccatttgctgctcaaattctttcttccctgccacgacgtcctttagcctcttaacgaccactatggtgccatcctcaagtatagctttgtaggcagtcccatagctccccttaccaaggacttcggcagaagctctcagtaaatcctccaagtcaaagttataactacatccatccaagaaaaccaatttgttcttctcggccatttggacaccgctactgacttgctctttgcgcttctcaatccttgcattatcagtgcctttaccattgttatccaatccatcatctttcttctccttcctcttagaaaagcacacgacaaatatcgcagcagctagcagaaatacagcaaagcccccaactgcagctgcaattatagagccagtacctactttcttcccacgatgtggcaatgctgatggtggtggtaatgaagattctggtgaggatgttggtgaaggaagagaacattcagctagaggtggcccgcacaatccagggttccccaagaatgaactgtttgagaatatttgaaggaagggaggaattgagccattcaactcattgttgctcagatttaactgtcttaagctcggaagtttgagatcagggataggtccagagagagaattttttgacaagttcagggtagataattgagtaagattttgcaaacttgcagggatttgtcctgcaaaggaattgtaggataggtcaatggtattaagggttggagagaaaaaagaaggcaaatctcctgacagttcattatcctgaagaaatatggactgcaaagaaggaagtgaggtgatatcagatgggatacttccaatcaaacgattagatctcaggcttaacacttggagggagacaagcctgccaagggtatttggaggaattgcaccaatcaggccagcagctggtaccctaagggcagatatgcgtgatcggtccggcgagcaagttacaccatgccatgagcacaaagaaatgtttacatcccaattgagtttgttcccacggtagactgcagaggcaaaagcaaggagcgcttgcttctcagaggcgatgtctgccacggccaatgaggtgaaaagaagtaacgacagtagaaccaaagaaccttcaaaaattttatagcccataagaggtgtctctgaatcaactggactaaatgaacaatatcagcatctgtttatatcagtaactaccagtcctgctgcaatgaaaatggaaaacgtcagtgctaaaatcatgaaaagtaacagtagaactgtaaacataactctaattgtgtcttttaactcataaaccctcaagagaatatagcatacgagcaatcacgacagatgtgtgtgtgctgagtccagaaggaagcacattccatgatcttcaaatgcagctatgcacttatgcagacaagcatgcctgtgtagtggaagcataaagctggcagtttgccccactagaggctcatgccaagaaaaagaccaaagcactttcaaaagaaaaaatgacccatcaaagcctaatgatttaagaaaactcttgtccaaattagtgcagtctgctttctttcataaaagaagctaaagaatgctagtaaaggtgttatcctgccaaataggtcagtgcgaatcattacaaaacatgtagggaaccctgcatgtttttcctctaggagggcctggcagccaatctctttactgagccttgtaactcaccaaagaggtgattctgagattctctatcagcacaaagcagtgtgtaaatcatgggaataaaactaccaatatctaatcaccacaagggacaagaattctacttccaaagaatggcgctagtttaatttcaactaaaatatgcgattaaaagtcaccgaaacaaagcaactaaaggagggttaatctgaaatgatagggtcgacgtgtaaaagacaaaaggcatcaataaagcagagaaagatgaggcaagaaggaaaaatagaaaaaaaaaacataaatatttcaatactagccacatagatgagcatatcacatcgtgcacgctgcactactttcttgaatggaacactaaagtatggcagtatgcttaccgagaactaaattcagtctagcacatcaacactagttgctaaggggtgttcagtttggtgcccacgattaccacacacaactttagcactgctatggtttcttaagtagtgtcagacactgcacgtttaggtcagccgtcagcgtaagtttcttcataggacagcatgcttaagctcgaaattcaagcagtcagagactaactgcggccttacacttttccattctctaaaaaatgataattgcagccttacacagctacacacagttttgagttaatcattgattgaaatcaatcccatcctcattagggataaaaatgtagcagccttaccactgcacaaggctctcaggacctccatagtgcaacaagtaaggcaatggccactataaagaaaggctgcctgatcagagaataccactagacaaaggtgaaaggaaaagcgaagcaaagaaaaggcaaacctgaaccactctaaacaaactgaaatgtgaactaggggaagctagggcgcactggcaaggacggagatgcttgcggggagatgagccggagtgattgcacatgccggtctttgcagcattgtttactgactacaagatcttggttggtgcccaattgtttaattcccacttaaagcgaccacattatttaattccggcgaacaatcgattactggcaagcccttccaaaaccaatgttaggtcatgattttgcaagagctcgcggttcacatctttctatccacctaaaagctcatcaaaaccagtgtcaccgtgcgtatggcgctattctacccaaatggagtataaaaccatggcactggcagtagactggtggtaccaatctaccaatactagatccactattttcagcagaaacgagaaatgtagaagctaacaaaaagatcaaacctaacatatacaagcctaatgctcttcctgtccttagggtttaagcaaaaaagaaaagtattttttcccctgagggattctactctcttccggtcttcactgcttccaaacagtagcgcgctgggagttcagttagaaataggacctactagactgaaagatcaacacaaaggcattacagcggcaatctaagagcatcacacgaagttgtgcagaaagatttgtgagctgttaccataatcgagttcagtaactgaagcctgaaggtctaaaatgcgcgaggcaacgccaagaatgccaaaattttcaggatcttcaagtaaccgggcggaaacgaactacacgcagatataatcagggcgcggctactaactaatccgaacaaagcggaacgcaagaacctcgcggagagaaaacaaacacaaacagagcaaaaaaaaacaaacaaacacatttttgacaggcgaaaagcctcaaaactcaaaaacacaaagtggcgcgagggtgggcgctgtacccgtacctgatccggtggtcggcgctgcgacgaactgatgattgattcagacggtagcaatgctgcggcggaggagtggaggcggagtggagtggaggatgggcagcagggagaggggaagcgtttaaaacgaggaaacggagggggggggagaaagagagagcccgcagtaaagccgttttgttgcgttcgcgtggcgtgggttcgggtgcagggtgcagcgcgctagagaggaggagagagaagcggcacgctcttctcgctgccgccgcggcgcccacttttattgcctgcggccactgatacgtgggtcccaccctactgcggggcccgctcgcctggtcaaaagcccggagtaaaagcgcaacaaacaaacagctgtgctgtaccagtattccacggtttccaccagtaaagcatggtgctcgatcggtgtggtagatattttggcttgtcacggtttaatttgttattggttcactgttacgttatatactctctctcttacactgatcacccgtcttatttaaaaaattttagaattattttttttacttactttattatccaaagtattttaagcgtaacttttcgttttttatatttgcacaattttttttaataagacgagtggtcgcatgcaaaaactcaaaatcccttatactatgggacagagggagtactagcatactgtagtatatcctcacgtcacagatttattttttttatcaattttgtcatactttatgacttacaatttgtccacaatacatttggggttatcataacttacctaatcttagttgtgttaaagtgtggtcgataatcaaacacatacataatctttagaggaggttaatcgctaggaaaaaatgattgaaaaatacataaaatgagatgagtcattattgtatgattaattaagtagtaattattttagacttaaaaaataaattaatgtaatgatttaaaacaacattactatagaatttttaaaaaaatagttactattttttttaaaatagttacaagacaaatattttttccctttctgtaactaacgctcccttagtatttacttatgatttgttataaaacttttaccaagattagttactattactgtatatctttgttcgtagtatgaatgtttgattcgtcggcaaagaaatgacggcaacaggtattcattcatatgtcgctgtggcctgtggcgagcactttcttttcgccgggcctgaataatgagtacactctcaagagatgttaatgctctatttcttactcgctaagattaccaatcatctgaaagcttcagtgaacaaggcaaagaaaggggagtgtgaatcagttcacaattttggaggcggcaggaagggatcaaaatcagatagtgccaccatggtccatcgaactttatatgctggggaggagctgtttggttgaatccgcagctcacatcacatcacaaaaaaatttccatgcttttttctcctctcctttgcttccctggtggcagatgccaccgttcttttgtcctcagtggcatctcaagctggagaccacaccagctgtcaagaactgggggattactgtagtttctgcatcttggaatcgcagttatataatgctgttaatcctgctatgttcaagtgtgtactatgtcctaccttgattctgtgattttggttcttcttggagattggaagttggatctgtccaaaaacttgcagggaggactgtccataggcagcgagacaaaacgctgcccaagaacaagaacttagcctaaaaataaaatgaaagaaaaagagaggaggaggaggaggaggagcaagaacagtattctatcgattatgcagaaaacgcagcaccggtgaagcagcagatactgattcagacaacagtattcatgcagtttggtgcttctgaatcatgccaagttgccaactgccaatatatgtacagtctttccagagggctagctagacactgctattttcgagtttcttcttgcatttgtctcatgtggggacagcaagaccacatcgtcatatataatcacttctatattaactgaattcatgaatgagggaagaagaataagcggaaacatgaattagcatgtgacatttctagttgagcccagggtttatgattccgacgaaatccaatcggatttcgcgaccatctgagatgaatggttgaactgggatgaatgaaagcttcgtatattccctaatcagcgtgtatgcatattgatgtataaaagttaatttatttgggacagagtgagtaaaatatttcgaggagggggcttgggaaataattttctttctcaatgtccaaatcgagttttcattgagcttttcttaatagtttaatttattatattattattctctatcatctgtatttgttaacaagccaaaacgaaaataactgtcatgggcctaacaccctcttgcactagtttgcaccacaaaagaataaaaaaacacttgtttttcacgtgcacacttttcaaactattaaaaggtatattctcttgtaaaaactttttacaggaaaattgttttcgaaaaatcgtattaatctatttttcaagtttaaaataattaatacttaactaattaataatatcttaatagctcatcttattttacgtatattttcaatcattttctttctcctccttccgaacactccgagtatgcaatttagatggatagagtcttttatgatagaattagattaggttagggaattcttcatctatacagtgagcgactctatatagttcagggtaagcattacactaagagtatcgatgtatccgtagcatgcatgtctctccaaaccggcacacccttgaggtacatggctattccattttgttccaaaatattcttgcttgcgacaataacttgcaaaattagaaaattgtaaagagagaatagaccaacatgagcaatttaggactgagccaccgtgccaactatacgagcttctattcacccttgcgcacgcacaccacattcacgcatttacgagtatgatctctctaacacacggttcgtatatataaataccattaacatattcttgatctcactaattatatatgaaaatgcatctacatgcacataatatttgtggaaatttagatttgaagtgaagttatggactcacgactccacctgatacccatgataatttccccctgcaattattttttttcttggttagcgatgatgattctaccaggggtatcattttctttaggcggtgtttgaattgtggttgtggaatgagaaggcactgatttggacggacctattcttatcgaacgactagtaatattctcgtgcattgcaatgggtccattccaccgggccataccagtgggaataagctgggtgtggatgtaatacacatgattttttttagcaaccaccttttttttttctgtttttctgttttttttccggcatgagtactacgtgtgtgtagccagattggtagttaggattggttttgtcatgcccttgatgaggtatacactaaatacaggggagggaggacgaacgactccacttttagtattataaataaatatagtaggatgtctcatcaactgtctatctggaggtctatctggagctggctaatgggcgattgatcgctcgatccccatccaccatgtacactcctctctccctccttcctccttccattcctctcttcctactacactataaatttaaaaaaaataaaaaaaacaaagtttgaaaaaatatataatttaaattcaaatttaaatttgaaacgggtatgtaaacttttgacttataaactttgggtctataaactaatatttgaatttaaattcaaaattgaatcgggtatataaacttttgacttataaactttgggtctatacactttaggtgtataaactttagatgtgtagaaatactatatatataaaaaatatttgaattcaaattcaaatttgaatcgggtatgtaaacttttgacttataaactttgggtctataaactttaggtgtataaactttatatgtatagaaatactatatataaaaaatatttgaattcaaattcaaatttgaatcgggtatataaacttttgacttataaactttgggtctataaattttaggtgtataaactttagatgtatagaaatactatatataaaaaatttgaatcggatatataaacttttgatttataaactttgggtctctaaactttaaatgtgtaaagttgaggtgtacaaactttaggtgcataaatttactaaaatagaaaagtaatgcggtgtcaaaaaggaaaccagatggagggagggggaatccgaatctgatcgctaggggcgatcgatcgccccttagcaatctcgctgtctatctagagtttggttgacagggcggctccattcatgcgaaaattctcaaacttttgaaagcccacctagcacttatttttctgaaatgccaaaactacggaatgtcatattgacgaataaatttaggtagtttatttagtcttcttaataatcatgaaaacacaaggttgaccaataaaagtgccaaagagaaactccctaacccaaaaggtaatttataatcaaattctataattcaagcgggattttcattattgggcctttaaggtccaagacctacgaacccgcaaaaaagagcccagaaaggaaaaaaaatatactttgactcccttaactatcgcccgagtttgattcttgtccttcaaccataaaaccgagtatatcgactccttcaaatatcaaaaccggtgcaaacaatgtccctcggtggttttagaggtggttttggctgacgcggcgggcttgaccgagtctttgtcctacgtggcgcttacgtggcactagaataaaaataaaaataaaaaaatatgtgagacccatatgttattcacacaaaaagtgtgcccactgacatgtgggacccacatgtgatcctctctctccttcccttcttcctaccccctctctcttccttatctctctcagaactcaagagcggtggcagatggggatgaggc

SEQ ID NO: 6082 - DNA, 29830 bp, Oryza sativa
agttatgaggaaggacaagattttggagaagaaccatgctgagtacatgaaagcagagagagatatactgactaaagttgatcatccttttgttgtacagctgaggtactcctttcaggtatgcatttatcatctctgtgtgttctttgttgtcaagctatcatgcatgttatatttttcagtcttgtcccaaattttaaacccagtatttacttggcagacaaaataccgactttaccttgtgttggacttcataaatgggggccatcttttcttccagctctaccaacagggtttgtttaggtaatttcattacattattttatgtttattcctatcgctttgcatgaacatttaattaagcaaccttttgtctgtcagggaggagcttgcacgcatctacactgctgaaatcgtgtctgctgtagcccatctccatgccaatggaattatgcacagagatctgaagcctgagaacatcttgttggatgctgatggacatgtaaggatcctttaatacatatttttcttcaccttctctgactttatctactgattggtatttgggaatttacggaatttttcattgtcttatttaggccatgctgactgattttggcctggcaaaggaatttgatgaaaacactagatcaaactcaatgtgtggtactgttgagtacatggctccagaaattgttcagggccgtggtcatgataaggctgctgactggtggagtgtgggaatccttttgtttgaaatgcttacaggaaaggttagttatttaagcacgatgtttctgcatagaagatgtgtttgcattacagatggtttgcttctatatatccttttgttcccatgctcactcttattatattctgcagcctccgtttgttggcggaaacagggacaaagttcagcagaagattgttaaggagaaaattaagcttccggcatatttatctagcgaagttcattctctgctaaaaggcgtaagttgtttgccaagttgctatgattcaccgcacccatatttttttgcagccttgtgctagtttctagagtcaacctgtttgatcttgggattgaatttttagtccatcttatgtttcagttactgcacaaagaagctggcaggaggctgggctgtggaccaggcgggagcaatgaaataaagaatcacaagtggttcaagtcagtaaactggaagaagctagactcccgacagattcagccaagcttccgcccaaatgttgctggcaaaacctgcatcgccaactttgacgagtgctggaccagcatgcccgtgctcgactctccagtggccagccctgtcgctgcagatagcaacttcgtgggattcagctatgtgaggccagcgcccttccttcagaggccgagtcctctaggctgaagacctccagttgagaccgaaatacatcttgccactgggtatgaagctgacaaaatttactgtttcgatgattattatgtaaaactacctatttatgttgttcggtttgtctgggaaaaccccagtatcttttcttcgttgaagatactagtaaaagatgaacgtggtacttgttgaaaccagacaaatttgtctattgccagatggaacagttgccctggcttctatgatcaacccctgccccctgggccctgggcccctggcacatttaggttttctcggccgttcacgtacatgtttccaaatccaaatcctgctgcatgttgcaacacaaatcctgttgagatgcaaatttaaagcataccgtttatgcatgttgaaatgtaaattcgaacagagagttgctaaatttccacgacatctaaaaagtatagtatcactagtaataagaaatggaccgccccaagtaataagctcacatggacagcagcatatggcccttggcggcataggccgagtcggagtctgagcgtttcatgtcagtatgtcacgccaacttcgactccgattcatccttgcctcgcgggcccagtctccatcacgctcagcaacggccacgcaatccgcctctaccctccatcacctctttgttccttcttacaacctccggcgatcgcagcagcagcagcagcaacacccctcctccgttcaacttgagggagaggctatggcggtgttcctccgttcaacttgagggagaggctatggcggtgttctacaggtacagaagcgaggtggataccttctccgtgcccgtgcagaagcctttcgtctccgtcgcgaagctcaagcgcctcatcacggccaccgtgcgccacggccatggacattcgcgcggcgggggccccaagaagagtgtcacgctgtacagcgacaacaccggcgaggagtacgcggacgaggccgagctgatccgggtccagatcaactagagttgactacaactctaccaggtggacagtgtcgaatctagaacaaaaatagaggggtgctatgtataaaacttacataaaattaagacagccaaatatacatccatgacgtattttgctaatcaaatcgtaaaattaacaaataaatagaaagagggtatcatataaaataaagtaactctagctcatcgtttattatttggaaaagtacttgttaaccttgcttctccgctttaatgtgcagttatatccactaaaatcaggcaaacaaattgaatttgatatgaatgatgtgccaatacactgaaaggtttccaaacctaatttaccaataaagaggctcacgtttacatactacaacagatggattaatgtccagtctagctggaatacgtcgtagaggccctgacaacaaagatgtaatgaggcactaaacaacaacgtttttatttctgaacctgaccgtgaaatgcacaaccatggagctggggctcaagccccaagaagcgtttcttaaccttgcttctccgctttaatgtgcagttatatccactaaaatctggcaaacaaattgaatttgataggattgatgtgccaatacactgaaaggtttccaaatctaatttaccaataaagaggcttttacatactacaacagatggattaatgtccagtctagctggaatacgtcgtagaggccctgacaacaaagatgtaatgaggcagtagacaacaacgcttttattcctgaacctgaccgcgaaatgcacaaccgtggagctggggctcgagccccaagaagccccaacggtggatacgccaatgcaggtggagttgtgatgatccattccattctgtatacttcattgggattaagccaatttaatttgtactacttaaaaaccagtaactaaccatgcaataaataaacttgcatcaacaatgtcacaaaataacccgccacttgttgcttcaaaacattgacattattggtctagtaatttaaattatctatctatgatttgtattcataggtcaatacaaagaggcgcaacaagctactttatgataggatgagagatattgtctttgtcaaattgaactcccaattaataaacaagagagacaacaaagatagggatcctttagagaaggaagtcaatgatgctgtgtctaatgatgagaatgagttcattaatggtattgtacctttttctaatgagcttgctgaagatgatccacaagatggagcatcacagggagaatcatcataaggtcaaggaaaaaggaagaggcttgtgcgccttagaaagaagaaaatcaagagcgtgcactctttgatgaatgatgttacaatgcagcttggaccttcatcatctgactcagaagatggtgatggcaatggcgctggagacgtttcagtgggatccttcgattctgataagtctcatggtgtctctgaatctgattagtggaatgcaatattctaatctacaaacttgttgttcttattttgttaattaatggtcatgttcttgacttcttatgatgaactatttattatttatgtcaagaactcaagtggcatgtttactatgaactatgaaccgttaaatttataagtatgaactcaagtgccatgtatctgtatgatttaatatgaactatgaaagtatgagttaggaactatgaactccatgtatgaagtatgaattggtgataagctttgaattggtgatgaacttaacgtgcaatgaaataagtgatatgtcaatttttagctcaaattctattaaatttttattgttttctcatattttagaaaaaagctaaatgttttagctgtagctatagccggttatagctgctcttagctattggagagcacaaccgctaagagccttagccagagatttagaatattgctagcgactagtgcggtggcagggaggaaaaaggaaaactgattagggttttgtggactttgcacaaatctcaaattaatcaatggtctgaaatttataagatactaggaggggttttctgtaaactgaggagtagacagtaaaaaaaaaaaaccatatagcattgccaccggccacccattgccttttgttcccctttcgtgattgcccggtcgcggcctcgccgctaaccctaaccgatcgaattccttccgaaaaaatccagccatggcgccggcggcgcaagagccttgggccattctggccgcaatccctaacgtggtggggtacaaggaggcgaagcgcatcttcccgccgggcaccgacatctccgtcgcccgcaaggaggtcccgcgagcctccgtcctgaccgtgccgcgccacatctccctcccggcctgcctcggactctacccctatgtcgtcgccgccgaccgctctggccttctcctcctcggcacgcatcctgtcacctccgcctccgccatggtctcctaccacatctgtgatgcgcacaccggtgaggtagtctccctccgcgactgcaaaccaatgcgccccatgaccttctacggcgccgccaacgtcggtctcatcatcaaggacgacggctgtatggtcgctgagctccagccgggatgcaagggcacaagcaccggtggtgccactctgctcagctacaaggtgggggagtgctgcaagtggcgcgagagggagcttacctgctcgcccccactcccgctggactggtacccggagggcgtcgtctcccacggcgggatgctctggtgggtggacctctcctacggcctcctcgcgtgcgatcccttcgccgaggagccgaacctgatccacgtcccgctcccacaagttcccgacgagcttcctgttgatgaccaggttaaccgcggtgcccaccgctgcgtgaaggtgagcggaggaaggctgatgtacgtgcagatacacggcaatcctgttgtgccggtggtcagcacatggttgctcgacgaatcgacctgctcgcccggggagtgggagtggaacccccagctcagcgcgcccttggccgagctctggattgaccagagctatgtggacaccatgctgccgttgaccattcctgcccttgcgctcccccaccccacagatcctaacagggtatatttcttcctcaaatcttgcatcttcgcagccgacctacggttgaggaagctggtgtcattcaatagttttgagatgctcgacccaccgtgtgaactttggatgaagcgctcctcccacttggtccacgcatggcagtatgatccttcaagcagtcgtatgtatcttttgtctctgcccttctctttatcttgatgtgttcagatgatagctcatatttcgatgttcctgccaattgtcattagcatggataaatcaatctgatccaccgcttatatcaaaactctactcagaccactcagaccctgtataaaatatccagtacccttgaactaaaacaagaccataaatcctatcctggtttctttataattttagcttgaagatccacaacttccggaacaccgatatgagctagatagtgtgataattgtgtgtttatacttgtttaattctgaaccaatgctcgctgctatataccttattcctgtacatattcctgtatagtttgtactgctccatttgatggaatactgctagtataactttagtgattgcaagagtgacgtaggtccggaatagttcttccatattctctagaaatgttccgttgcctcttacaaattaaatgatacagggaactgccaaaccgagtgatgggatgttttgcccttgaatggaatgggtgtaaccaccttgtgacactgggaatgtatagatgttacatcttttacagttgtgcttatgaggcacacggaccacttggttttcatggggaattattgatatttttaggtgtattgtttctctgcagaatatttagccagtttatagtgcttataaatcttagttgaagtgtcattctgttgctctcctcagcttacatataaccactgtaatttctttttttaggttctgactttgtattggcatgcttgaggcaagacaaggcaattgcttctaagagcaggtgaccctatacttcactttaacttccaattagattttcttgcatatccttaactttaacttccaagaagtagattttctttcaatggcctaatacaatctttcttttgattcagcttctctggtataattcctgtcactcgtagaactggtatgtactatataatctatgcaattcttcaattgcaattattggatggggtgtttcttttgtccaggttgtagaaaagtgagcaaatttcaaataacgccagacatagtgttttgtcaaacgtactctgtaaaatttgattgaatacgtccttatggtgtgagtatgttaactgtggtgccatgtttttttcccttcggtccagagtttttgtactgaagagctgatattatctgttgtattttcagctaaaagtttgaagagagtttgggattctgtaaccaggcagcagcaaaagcaggagcagcagctgcagaagcaagctatgtaaggtgcagaatctctgaagaaagcagaatcagccagcctcattaagtatgaaggaagggtagagtatattattttgtgcatgatttgccagcctcattaaccaggatttatgaaaacgatctgatacagcatgagcttacttgtgagttcttgttctgtgccttttcttaggcctatttataagggagacgcttcatgtacagcttgagtacaaacgtgaatcttgactgttggatgcatttatgaggattttaaccattccgatcttgagttgtcccaaataagactttcaatagacagtcttcaatgttaaatagaaacatgttaattagttctacaaccataccatgcatgcatgtgtacgtgacagtcttcaatgcttggacagtactatggctgaatatttgtaactgatgtaacggttaggatgtatcaaaataagatagcttgaaaaaagtccatacttttgttctagaggccaaagaattaccatgttaattgaaaaactaatttcaagtccatacttttgttctagaggccaaagaattaccatgttaattgaaaaaatatattatgaagatggctaaaaaagtgctatcttttatttcggaggcctaaaattaccgtgttaatgaaaaaaaaaactacaccattagataaacatatattttaactgttaaaattaatttataagtataacaaacagcaaattaaatagacaaatactactcaaagtttggaaattactgtataactaaacaataatcatgttcagactctcaggtcccaaccggacttgggctaaacacattctttctagaggcaccacgtttaccgtggggactagaaatacccacattaatcgaaaaaaagaaaaggagagtccaacttgaaatacaatttaataataactgaaattaagaattaaaaataatcactatttaaagaagagtccatctaagaacccaatacgaggttaattaatattcggattaaaaaataaaataaaatccgaaattagcaaaagaagaagagaagagctcgagtagaaatacaatttaaaaataactaaaattccaaattaaaattaagtaatattgaaagaagagcccatataaaaacctaatacgagattaattaaaatgcggaataaaaaatcgaaataaaaaaaagaagagttcaagtaggaatataatgtaaaattaactgaaattcggaattaaatataagtaatactaaaataagagtacatataataacccaaaacgagattaattaaaattcagaatgaaaaataaaataacatatgaaattggataaattgaaaagagagttcaagtaggaatacgatttttaaacaactgaaattgaaaataaaaataaaaatattaaaagaacacattatgatattagttaaaatttgaaatagaaaataaaaaaaatcttaaattagaacaagagaaataagatttcaactagggatacaacttataaataactaaaattggtgataaaaaataaagactattgaacgaatagaccataaacacatgatgagattaattaattaatagtcatataaaggtgtaaagtggtggcggttgacgaggcatctaaaactattaataaaacaccaaatagaattctaataacaattaaattaaagggaaggagaacgaacatgtcatgaaataaccggtcaaggaggttggcaagacttctagaaagtaaaaaaaataaacccaattgataatcatatttaatttttaaaatctcaatgatagtaaaaaggagaggcagcgggcgggtcgtacaggagtaaaatagcatagccgctaatggttggtggtacttttagaaagtataaaatgaattccaacgatagttatgttcgacttttagaatctaaataacaataaagagtaggcggcggataggtcatagaggagtatagtggcagcgtttgacatgatttctaaaaattataaaaaatgaaatccaatgagacaacaaattctaaaaactataaggttcgggcttctaaaagtaaaaaaaaaaactccaatgataattatatttgatttttaaaatctcaatgacaataaagaagggagacaatggatgagccgtaaaggagtacagtgacaaagccgctgacgttttgcggaacttctagaaagtaaaaaatgaacccaaatgattattatgtttgattttgaaaataccaatgaaataaatagaataggtagtgacgggcaacatttgacgggatttctagaaattataaaaacgaaccccaatgggacattgaactctaaaaactatggatccaatttttaaaggttccaaggaaataaagaaagatatgacagaagtaagggatatcaattgatgtgacttttaaaaattataaaattagaaacacgaggatgataaggtttggtctttcaaagtcttaagacaacgaggtaactatttaataaattttaagtaaaatattatatttaaaaaatataattttgtattgatgctagccgcgcaattgcgcgggccacccagctagttatattattaaaacagctttgaaaggagatatcacgttcgctgtggaggctaacaattcaaaaatagctgaaattcggaattaaaaataagcaatattaaaagaagagtccatataaaaacccaatacgagattaatcaaaatttggaataaaaataaaataaaattcgaaattagaaaataaaaggagagtccaagtaggaatataatttaaaaataactgaaattcggaattgaaaataaggaatattgagagaagagtccatataaaaatccaatacgagattagttaatattcggaataaaaaaataaaaataaaatctgaaattagcaaaaagaaaaagaagagttcaagtaggaatacaatttaaaattaactgaaattcagaattaaaaataagtaatatttaaagaagaatcatataagagcccgatacgagattaaataaatttcagaataaaaaaataaaataatatccaaaattagaaaaaaaataaaagagagttaagtaggaatacaattttgaaacaactgaaattgaaaaataaaaatattaaaagaacactatacggtattaattaaaatttgaaaaaaaataaattatgaaactagaaaaagaaaaaaaagattcaattaggaatacaatttataaataactaaaattggtgatagaaaataaagactatttaaagaaaagaccatctaaaacacatgacgagataaattaagtaacatgcatgtaaaggagtagagtggtggcggttgatactacatataaaaactatctataaaacacaaaatacaatcctaatgacgattaaaaggagtgacgacaggcaaacaggtaaggcggttgtcgggacttctagaaagtaaaaatataaaccccattgataattatattcgatttttaaaatctcaatgacaataaaagggagaagcagcgggtggggtgtatatgagtatagttgtagagccgccaacggttggcaggacttctagaaaataaaaaatgaattccaaaagatagttatgttcgatttttagaatcccaatgacaataaagagtaggcggcggatgagccgtagaggagtatagtggcctcgtttgacgggacttctaaaaattataaagaatgaaacccaacaaaacaataaactccaaaaactacatggtccaatttttaaaggttcggaaattctaaaatgtaaaaaaaaaccccaataataatcatgttcgattttaaaatctcatgacaataaagaagagaggcagcgggcgagtcaaagaggagtacaatggcaaagccactgacggtttggcgggacttatggaaagtaaaaaatgaacccgaatgataattatgttcgatttttaaaatcccaatgacaataaaaagaaaagacaatggatgggtcgtataggagtataatggcagcgtttgatgggacttctagaaattataaaaagaaacccaacaagacaataaactctaaaaactataagatctaatttttaaaggttccaaggtgaatgaatagaaatagtagtagatcgagcaagcaaataaacaaggagatgacagaagtaagaggtatcaactggtgtaactcttaaaaactatataattatgtaactcttaaaaactatataattagaaacacggggatgataagatttggtctttcaaagtcgtaagacaatgagaaagttatgtaataaattttaagtaaatcatttagaaaagaccatctaaaacacatgacgagataaattaagtaacatgcatgtaaaggagtagagtggtggcggttgatactacatataaaaactatctataaaacacaaaatacaatcctaatgacgattaaaaggagtgacgacaggcaaacaggtaaggcggttgtcgggacttctagaaagtaaaaatataaaccccattgataattatattcgatttttaaaatctcaatgacaataaaagggagaagcagcgggtggggtgtatatgagtatagttgtagagccgccaacggttggcaggacttctagaaaataaaaaatgaattccaaaagatagtttggcgggacttctaaaaattataaagaatgaaacccaacaaaacaataaactccaaaaactacatggtccaatttttaaaggttcggaaattctaaaatgtaaaaaaaacccccaataataatcatgttcgattttaaaatctcatgacaataaagaagagaggcagcgggcgagtcaaagaggagtacaatggcaaagccgctgacggtttggcgggacttatggaaagtaaaaaatgaacccgaatgataattatgttcgatttttaaaatcccaatgacaataaaaagaaaagacaatggatgggccgtataggagtataatggcagcgtttgacgggacttctagaaattataaaaagaaacccaacaagacaataaactctaaaaactataagatctaattttaaaaggttccaaggtgaatgaatagaaatagtagtagatcgagcaagcaaataaacaaggagatgacagaagtaagatgtatcaactggtgtaactcttaaaaactatataattagaaacacggggatgataagatttggtctttcaaagtcgtaagacaatgaaaaagttatgtaataaattttaagtaaatcatttagaaaaatatatgattttgtttaggtgctagccgcgcaatttggcgggccacccagctagtttttattttaataataagatctaggagtataatgtttatactccactaactcaactggtaataaagaccacgtcgcatagaaatcacaatatactacctccattttttatatatgacgttttcaactttttcacataacgtttaatcatttttattacgtaaatgtatcagttttttctaggcatgcaacctaataaaagtctttacttataagtgcttatgattttttttttgtgaattttgtgttttgaattttgtctcgagaccttcatgttcttcctcattcgctgacacgtgggacccatggggactactgtcaccgccacagcttctgctttttcgcgcgcaccgcgatagcgacagccactttggcttggctttgcgcgaggaagcagcgcagcgatcccgtcaccgtgacctcatcctcccccgatcacaacacaaacccaactacaccaagagcttggggattgggggagtcagggggaaaaccctactccgtctcgccaccccacacccaaggccggcgactccttcggtatgccaaactccaccggtagtttctcctttctttctctgtgcacctgtgatgtcgtcgtcttgtccgtgcaggctccatagcgggtaagaaagggtgcaccaagatcgccggcggagatcgtcgccttggtcttgacgaggccagtgagccctttctcccttcctgttcttgagttggcgcagatccgatccatgccctgactctctctcctctttcgcaggctgccgtgaccccaggcgaccggaacgtgaggagccggaccagggacaccgagagagaagcccgccgtggagacgactgccaagttcttcgcctgctccatatgtcgacatcccctccctcggtgagtatccagccaacctgcccaacgtagggtattagtgtccggcttcgtgcgttgctccaaggggctttgtgtgcgcacgcgttcacggcgtggtgatctgttcacgccgccgtcacggtcgataactcgatatctccttcgttcgccgtagagccctcgtgcctgtctccccacgccgcttgttgtcgccgtgacttgctgtgccgcgtcgtaatcgcttgtttagcacttagcagagcatcaggttctggtgccactccaccgcgagtttggggaccggtttcccttttctgatgacttcgccgggcgagattacgacgtttgggtagagtacgtacgtggcgctgccgggcgagattacaggcgagtcgccgccatcctgcggagggggattggctgctcaacgtactacacgattgattgatccatccccatttcgctcaacctactaccgattgattgatccacccccatttcacttcattgcaggacatgtcggagatggtcactgtgcaatttctggatctgagaattcatcgcatgcccgccaacgacgtcctacaacttcgtcgccgtcttcctcctctggagttgaactgcgtccaatccgtggaccaattcaaaagattccaggcgtttgtaagaaaaaatgaggagaaggagaaaagggatgaagaagaggccgagctcaacacttccctaccgatctttcttctaccgttgattcttgctaactgattaactttgctatgtgcgtgtgtttataatgtgacgaattgacactgttcttgtatccagttggcaattgtcacgagtcaaacagatctagcgcgcatatgcgctacaagaggtgaagaactggatgagcttggtatagtggaggagtacgacgacgacgacgacgacgacgacgacgacgacggcgacgagcactatgtgtatggaggcttggatatgttcgagccagccaccaccgatgaagaggacgccaacgcgcaggtggatgctgatgatctttactacctgggggtcagtgacgacgagaatgaggaagtgggaagcgacggcgggactgatgacgacggcggtgatgatgctggaggcgacggcggacgggctggacccctcaggtgggacaacctatgggacgacgacccaccacagtgagtcagtgacggcgtgatgccctgatacaccgatcgaaatcctatcttatttattgcggagtagcagaattgacgaacaaacctagagcttatttatttccttacgactgacttgtgcaaacattcagcatgtcttgtgcaagtcatgttttaaattgcatctggatgacaatgagctatggttaatgcagctataatttcctccaactgtcactgctctttgcctgatgattttctagagacaagaggcagaagatctcgcaaattctgatagtgcataattaattgtttctagatatgatctgtatatataagtgcacttacagtatgtgagactgattgggtactctagaccatttttactggaatcacaagctcatgcatgcattcagcgcatcgaagcccatagcattctacatctacagcagtaaaagggactttatttttgtccctgactactgatgaacagatggttctacacttctactaagtttcatactctccgaaacaatggtattatacatgtattgcaagaatggctctgagctttcactgcagcggaagactgtctactttactgaactgtcagctcttggcttccttctccagcccatgcttaagagcaggtataatatacatttcgagaaaataaaataggagagaggagttagtacggagtagttgactatactattaaacttgcactaaatacattgagcatctagcacatcctcttccttgggaacatcagcaagcaaattcaaattgttggccttcttggtgttcgaggaaaccgtcggtcctctcgcgaagatcgtcgaattgacccgaaagaagccgtgtcacagggtggtgggtcttcgtcggactccggtgcgactgcgacgtcgagctatcgtcacggactctcacggtggtcaacagttcaacaccgcacagctcaagtgggacgcccctcttacggtcaccgcggcgtgcacgcggggagggagccgcccggagccagaaattaaccgtgtagattcaattactagtttactactgctccatccgtctcctaatatgaggaattttgacatttgatttgtactgtttaaccattcgtcttattaaaaaaaatttagaaattatcatttttttcctactttattatccaaagtgcattaagccacaactttttattttttatatttgtataaatttttgaccattcgtcttattccaactttttattcgtcttattttttaaaaaatttatatataaaaatcaagattattgggtcagccgaccccacagtttgtacatacatccgacactggagctgtcggccgggtacgtatgccacacaggtgccgcgtcccagggcacttcatcgagcactgccctaccaacgggcaacggcgacccaagatttgacatctggagggtggctccagctccagcgtcctcatcggcgccgctgcgtggggggaacctgacggcgtcatcccggcggagctctactgcaagatttgccggaacgtgatgaccgacgcgatggtgacgagcaagtgcttcttcagaaattgccgattaagagctacttggagattttcttttcctctcatttgcgtgttgtcatgtagtgtgtgtataagatcaagtagcgtgctatgttgtaatgtagaagatgaactacttcagatctcttttcatcatgtatatactgtacctatgtaatacagtacgtattattaattggaatgattttgtcatcctgtatacactgtatacactctcttgtcatcttgtgattctctctgtctctctctacggagtaatatgttaattggaatgatttttttccaccaaaaatctgaaatcttttgttcctgtaagcgtgactcttccccgtacattttgacgtacgatctcggaacaattgccgtggcgcgggcgcgcgccaacgacgatggcgaattggcgatccaacggcgtcccgttcggcctgacacatcatgctaaccattctacgacggcgcaatgcatgacggctctgcccacccgatgccttccccggcgtgcaacatgccagccagcgccaccggccggagcgcactgggcgattccgctccggcgggacagacagaccagaccatggtcgagcctccacgacgacgaggagctgatccggttcacaacgtataaacaagacacaagaatggcaccttacgtgttccgtgtaaccctcaccattgtcagctgatccaaaaatcatacaggaaatacacattaaaactcgtaataattttcaaagcctccaccgattcgcgactcgacaagtaaacgccgacgctcccatcgcgatgcgacggtggtagtagttacaaaagaggcgaatgcgccgcgtacgcgcgcgcgtctcacgatcgagaaggaagaggcggtggccggttgccggagcaggtccagctcggctcatcactcacctcacctgccgcggagcagggccttctcggcggtgtccatctcctcgaggatgcgcgcgcggcggtaggggtggagctatagcgaaacagaggatggtgccacttgcttaatttactctactttagattgagtataagctaatacagatgtctaaatttgtattgagggggtgcatacatgatgaaaatagatgaggtatagctaaaaaattttcttcactgggttcctaggcacctccctaatatatactagctccacccctggcaacacttgttggggatgggagttgtggggccgaagctgatgtagtgtcccgacacacgacacggtgttgagcgcggagtacatctccctgaaggacagccgacccagtaaactgaaagaagctagactcccgacagattcggtgcctgtttgggggagcttcttctagaatctccagttgctagaaagctcccccaaacagtccagctttttacccatattctgagaatctgtagttatataatcttaaaaataaattagaagccaaaagctgggtttctcagcttctccagattctcagcagctgcttctcagaatcttaagcttcccaaacaggtcctcagccaagtttccgccaaatgttgctggcaaaacctgcatcgccaattttgacgagtgctggaccagcatgcccgtgctcgactctccagtggccagccctgtcgctgcagatagcaacttcgtgggattcagctatgtgaggccagcgcccttccttcagaggccgagtcctctaggctgaagacctccagttgagaccgaaatacatcttgccactgggtatgaagctgacaaaatttactgtttcgatgattattatgtaaaactacctatttatgttgttcggtttgtctgggaaaaccccagtatcttttcttcgttgaagatactagtaaaagatgaacgtggtacttgttgaaaccagacaaatttgtctattgccagatggaacagttaccctggcttctatgatcaacccctgccccttggcacatttaggttttcgggccgttcacatacatgtttccaaatctaagggcttgtttggattgtagcttaaaaaatgatatggttaaaaatagcatcaaagtgaacatgtccaaattcttctgcatgttgtaacacaaatcctgttgagatgcaaattcaaagcataccgtttatgcatgttgaaatgtaaattcgaacagagagttgctaaatttccacgatgtctataaagtatagtagcactagtaataagaaacggaccgccccaagtaataagctcacatggacagcagcgtataggccgagtcggagtctgagcgttacatgccacgcaccaactccgactccgactccgattcatccttgcctccgcgggcgatataagcgacgccacgccacgccatcctcccagtctccatcacgctcagcaacggcacgcaatccgcctctaccctccatcaccctcttcattccttcttacaacctccggcgatcgcagcagcagcagcaatagcacccctcctccgttcaacttgagggagaggctatggcggtgttctacaggtacagaagcagggtggacaccttctccgtgcccgtgccggagccttttgtctccgtcggggagctcaagcgcctcatcacggccaccgcgcgccacggccatggacgttcgcgcggccggggcccagggacagcgtcgcgctgtgcagcgacaagactggcgaggagtacgcggacgaggacgagctgatccctagcggctgcacggtcgtcgtgcggcgccgagtctccgggcctcctgcagagacgatcgtcgagttgacagtaaagaagccaatgtcggagggcggtggttcttcgtcggactctggcgcgccgtcgacgggagctgaagtggacgacgaggagaaagctatcagctccgtgatcgacgccgcacagctcaagtgggaggccccgacgtcacaaggaggcctgcatcgggggagtctgacggcgtcatcccggcggagctctactgcaagatttgccggaacgtgatggccgacgcggtggtgacgagcaagtgctgcttcgacagcttctgcgacgggtgcatcagggaccacatcgcctccaagtccaagtgcgcgtgcggggcgcaggcgcgcgccgacgacctgatccccaacacgacgctccgcaccaccatcgccaacctgctcgccaccaccaccggcgcggcagcaagcgcctcaagtggaaccgacaagacgaggagctccgccggcagcaacgcggcacatccggcggcgccgctgagccccgcagcttcgcaggcgagccgcagcagcaacgtgagctcagagaaggccgagcacagcgacggcggcgcgtccacgtcgaagaagatcgccacgatctcaggtgccctcggcccaagaaaggcgcaggagacggtggctggcgaccactctgcagaatccggagctcgcgccgtccatggcggcgatcactacggcgtcccgttctgcccggcgaccggctacgtcgaccccttcttcttcggcggcatgccattcggagccgatccttacatgtactacggcggcgtgccttacggctgcggtggtgcacccaacggctactacggcggcgaggagctccgtgacaggaagagggcgcgcgtctctcccggaaccggatgttggtgatcggcttcggagaggatcagaagttgccgattaaaagccatttggagattttccttttcgtctcatttttgtgttgatatatagtgtgcataagatcaaagtgaaatgctagagatgaacaaattcagctctcttgtctctctgtattgtacggctgtacccatgtataataatgttattaattggaatggttttccccaaaaaaaaaaatctgaaatcttttgtcttgtgatcctctactaacatgttaattggtattatatattttttcactcaaaacttgaaatcttttgtccctgcgtgagcgtgactttctcgctcaaacacaagacatgcgcgcaaggtgtttgattctgctaacgacgggcattttgacgtacgatctcggaacaattgccggggcgcgcgccgacgaagatagcgaattggcgatccagcggcgtcccatctcgttcggcctgacacaccattgcttaaccagtctacgacggcgcaatgcatgacggctcgccccaccggatgcctcccccggcgtggcgcgtgcaacatgccaaccagcgccaccggccggagcgcatcgggcgattccacgccggcggagctccggttcacgacgtataaacgagacacaagaattaatggaaactctagggagttgcatgtccccaagccaaccgtgtaatcctcaccatgtcagctgaaccaaaaatcatacagaaaaaaaaaatacacatacaactcagtagtaataatttcaaagcctccaccgattcgattccactcgacaagagcaaagccgacgcccggccccatcgcgacgcgacggtagtatagtagttacaaaaagtgaatgtgccgcgtacgcacgcgcgtgcgtgcgtctcacacgagaaagatcggtggccgtaagcactcggctcaatcaatcatcactcacctcaccggccgcggagcagggccttctcggcggtgtccatctcctcgaggatgcgggcgcggcgcttgttggggatgggggccgtggggccgaagctgatgtagtggcccgacacggcgttgagcgcggagtacatctccctgaaggacgggcgggccagcagcgacttctccctggcgtacttggccacccacgagttggacagctcgcggagctccgccaccgcgtccgccacaccggggtccgccctgtccatgttgatcgtcgaccgcaccttcccgatcacgtccttcgtctcgctcacgtactcgtcgtcagacgccgcccgcgccgctcctccgcacggccacagcgccaccgccgccgccgccaccaccaactcgcgcttgttggcttgaagcgcgcgttgaggcggcgttggctttacggcgatggcggcagtggcagcggtagccggggccgtgaggacggccggcacgggggacgacgctggcctcatctcgttcgtgtcctacgcgagctcgcggtgtgaaagggaaagggggaaaagggatagcgcgcgggtttgtaagataggcttgggttgggttgggaaggaggcccgaaggccggaaaaaggtgacacgtcggcttatccccttatcccgactcgtcaccatgcacggttatgtatgggctcgcgggatttccgatgataggccgcccatggtgttcggcaactacacgttgatggttaccggaactcgcaaatgaacatcagccctagatcctaatgatctagcaaagtgacagggtgaataagcgaaaaggagacgggattggccgcaaacattgatcctcatggtctcggataaaactgaaattcacagcagagttggaagcagagttacggtcacaaatacacaaaacggtgtagacacagtgaaaactggacaataattgttgtaaatcggcaaattaggtttttgtagcgatgattggggagtgtatccgaggctctgagcagggtggacgtttaacttaggttccagccttccgacgaccaacttgggcaacgaatccagccttgataggagcaacagatcttgaagaaccacactgcggagggtaaacaaaaccagcagtcaatatttggcttgacgaagcaataacgagaaatggcatgatttggatgacaataatacatcaatccactggcacctaaacaagggtcacaacttgtactaacgggcgccaacaaaaaaaactctcgatatattaagaaaaatccaccagaaagccaagtgaactacatctttttatcctcagatgttgcaattgtttctcacaggttagtcaaacaatgtaggcaataaattttgcaactcatcataggttaaaaaaaaggcaatgaattgccctcttcttttctaaagtaataaaagataaaccaaccagcagaaaatcaagtaaaggggtaactttttatcctcagatgttgcaaattttctcacaggttagtcaaacaatgtaggcaataaatttcacaactcatcataggtaaagaaaaacaatgaattgcactcatattttctagaagaaaaaaaaaaagaaaaaacaaccagcagaaaatcaagtaaaaggagtaactttttatcctcagatgttgcaaattttctcacaggtttaatcaaacaatgcaggcaataaatttcgcaactcatcataggtaaagaaagacaatgaattacattctttattctagaagaacaaaaagaaaaaccaatgacagtgctttatgcctcagaggttgcaaatattatcatgacaacatttgtcagacaatgtaggcaaaagatattgcaactcatcataagcagagagtcaggatttacaaaaacaaataaaatgactagttggcaacaatacaagttagttaattaggacgtatgagtgctgatgcaatgcagcaagaaaaattgtgatagcatctcaagcctcagctacttgcaattaatatcacaaagatacttgtcaaacaatgtaggcaataatcttgcaagtcatcataggcatcattggtatcaaatacatatgatatgcaaaaatagattattattattacagcaatgcaagacaagaagctgaattgactcagctctcgcaactttagttacttgcaaacaatgtaggcaatttcataggaaatgtttgatgatagggaccttgcaaaaaaaaagagaccaaggtaatgctctcaagagcaaatccaggtatggtttgcagtagaccacaaatgcacaaacaaactcttcggactaatataactagagaaccatgtaaagctgtacaaagcaggggggcatgtttgttgcagtattaaagatgcctttagataagctctctctgtatggaaattaactacatttgacacgactggacatgcaaatatatattgaacagcttacctgttcgcaacgaaggaagaacaacctattctccttagaaaggatggtatcaggactcttgcacccattgcatatgacatactcatctgaaaggagtgaaattaaaaaaggatgtaagtttagcacaacaagactttaatgacaatcccacacataggacctcataaaaggaacaagagaataaacgatccagccatatatatagtacccctccaaatcttcctaactctagaccttactgcattaaaaaaataatatacatgggaggtggaaaaataaatagggcccaaggcattaaagaatgtatagtaaagtggttaacagcccaataactcctcctagataactgtatggatacttcaatttcaactggtaaggcttctctgacatctttgtttttttaaaaaaaaccaacatttatctatttctcttaacagattagtaaaccctcttttgaagacagataaggaaagcttcaccataattggtaagattcctttaatttcccagtacaaaacaatgaattggccctataagtctatttaacagaagctaatgaattctggatatcacagctgcaagtttgtttatagttcagcagtaactttaaagagtatgagcaagattcatgtgacattaaggaaacttactgatatatctcctaagtatggcttcaaagtttttaggagcaaatcttccttttataaccaatctttgttgcccatcaagggatccacttgttcccatctcagcaagtaaaaacatcatcacatgttcaggttgcctatgcattctggaagtgtaaacgatgatttcagttagctcatggtaatttatcttctctgaaataaaagcaggcctagagcatatggtatggagtggtaaaaaagtgagatcatacgttttgcacaaatccatgaagttcacaaaaactgtcttctttgtgccttccctaagaacttgaggaggcctcataacagttcttcgtctatcaccagcaagatcaggattattctcacgcaggatattaaatactctgccaagcagctgtcaccaaatagattgaaagggttcattaacagaaacacaattgaatactagttgaagctgagctgagcactacatgagatactaataccatatcaatagcaacaaaaacataagaagatcaaaataaaaaaaaatacttaaaagggagcaatgcttctcctcaatagacaatgaaccttccaccattactactccctccgattccataatttttgacattttggacaatgacacggtctccaaaatacatctttgactatatttttctattataacatatacaataaaaagatacacttttacttttattatagtattttgtaagacaaatctatatgctgttctagtacctttaaactaaatatttcaaagttattgatagttaaagttataaaagtttgacctcaaccttgtcgaaaacgtcaagaattatggaaccggagggagtttaacttaaaaatataattgcaggtgacataatatgaaaactccacagctttctattttgatatgtatatcttatatggaatttacaagtcatgatctgtcaagaacatgacaaggatatagaatcacaaaaatttgaacaggcaaggagtattaacctcttcatatttataatctctgtcagttccttcccaagggtatcgagttgcacctccaagcacaatcccttctccttcttcatcctctccgatttgatcatctgaacaatatatgatcagacaaagcaaaacaacgcaaccagggcaaatatgagcaagccacaattacctatagcatcttcaccatctccagcttcagtaagagatgtatcatgctccacctgaaatttgcaaaattagtaaatagaatagtacagaaggaaatattaatccaacaaacattgcaacaggcatttgtaatttgtaaccaactaaactcacatgcttcttcttcttctttttcatgcctgtaaaacttggctcaccagtctcagcgactgaaaaaaaaaagcaagttaagcatatattagtaaaaatgcatacttggcaattccttttttttttgcagcattaaaagtatacctgtcaagctctcagttttctctgccaacttatccacctcatcagatggatcttggatcacaaccttcttcttcttctttttcttggttgggtcaaaaggagtaagctacaaaacatcacaaacattgtcaacaagccgctggtacaaggaaaaatgatatagaaggctgacaagaaataattgtgaaaggctgattacaaacaaataaaatgctgaaatccaccacggagtaacatttcacttgctttttatcaaattgtgatgttaaccctttgttgcacatgataatccttaggcataacatgtgaccgccatgctcaaaacacaaatgatgaatctaatttgttgatctccttacaggctacagctctacatccgttcaatcaacagaaaaatcccacattgtggtgcatatatcctgacagggccattataacactgataatgaccaggctagcactgacagtatattcagacacaagtccaaacaccatcaaatatcaccataggtgttcactgctaactggttcagtcctcacaagctactacaaaaagatgaacaaaacaaatcattgcttaatctggcctatcactcatctcagatgttttttttattatttttgaagcccactcatctcagaagcttaatccgctcttacagatttcactgattcaatccaagcacacagatcaaacatcctgaagaggcccatggtcgcggattcacgcccaaaacaccctaccagatcacgcatacaccaaacacagacagcacagcacggcaccgcacccagcccatcgctacgccgtttcttcccttccccgccgaaaaaccgaactgaatccgatgtgcagggcaaatgaaaaaaagaaaaaaaaacgagaagggcaggcttttcacctcggagacctcctccttcctctccacctgctcctcgtccgccatggtgacgctggccttcttcacacggcgactcgatccgcggcgcggcgggctggggacctgaactgcaagggacacgagcagcgatcagatcgggtcgggggaatcgaccggaggaggaggaggcgacaaacccttacagggcgagagggaggatgacgacggcgggcggcggcggcggcggcggcgctcctgctagggtttctgatgggcgctttgctaggctttactgaagctatcctttttcttcgactcctctgtttttctttttcttgggtggttgccaggttttcgtttcgtggctgggccggtatttgtagctcgagtcacttggtcgcaacattgtcctagcctagccggcccacatgagagactgtagaagcgacaatggtgggctctgttaactttgttaccacttttaaccctactactaaaccttaatattattaaattttgttagagcaatcaactagaacatatccttatccatattatcacaccaaattttagtaatcatagaaatttctactcttggaaaatttatcaaaattagataaagttctaaaccaaccatgttcaacgttaccaaaattcgataacaccaaaatgtgctacttcctctatctcataatatagtaatctaaaactggatatttcatattacaataaatttagatagaccagataaaatatttcatagcacaataaaatctaaataacctattacttgtgtaagtggtgctcttgtctcacaagaagaacacggagttagggcatgtaaaacaaaaaagtcactaatgcatgattaatttagttttaatttttataaatttaaaattttgatttaattagtattttaaatcaacctttgtatagaaaaattttcgtatgaaatgcatagttaacggtttggtaaagcatactaaaaatgaggtaaaatatgtaggcattgttgacgctttttcgtggccaacacaagatcacctaacgatttgcggtgtaaacaatagagtcatcaaaatcgatagatcaaaatcggctggtgaaaccgatttcgagatcaattcgctttcgtggaatcacacgactaatttataagcaaattagtaaagaagattctatcgtacttacgtgacgacgaacgactagtttccgagcaaactagcaaaggataaccttctcgctttcgtggaaaagcacgaccgtttttcagcgcaaaacggcaaagattaaccaaattctagggttaagcaaaatagaaaataacagaaaagtaaagaacaagaaaaataaaaataatagtagattgattatttgttcggggttccacaaattgacgcaatgccctaatatatataggagcaactaaacgctaggtgcgataagcacggcaactccacgtaccgtatagcttaaccgaatacgattccatctaaacaaatctaactattaaaaggaaatatatcgctacctttcctctgatacgcatataaccagcggcttggctccatctcctctctgaagacgtaaatcgcgccggacgtatacgtacgcaacacatgcgtagcccctgtagtttcccggccatggaaccttcttcgagccgtactcctgacttgatgaagtaataggaaaaacagcccagcgccatgcatcaatcaagcagataacagaccagcaacccaaagcaaagcacttaatctccatcacacgaaatccccgtggtgcatttcatctactcatctactccctctgcatatgattaatatatatgtttaactagccctcaagccaaccaattaaacatatataacagctgctccaatgaatttggcctgctcaaatgaaactgactattattagccaaattatggtataaagaggcatatgtatcctccagtcccccgtcagcgagcaacggatgaaacaaaaacgacatatgctgatgctccatcagtcgtgcaacggaagtggttggtcgacccattggctgccattggttatggcctatgtccctatttttactcttgcgccttgattgtcttcctgcgagtaatgcaatatgactagctgttcttttctgattaagattcagattttatctcggttttcattagcacgtatttcaaagtatggtactttccgtacgaaaatttttatataaaaattgtttaaaatatcaaacatatctatttgtcaactttgtaataattacaacttaattaatcatgtgcttataattttcaagttttatgtgtgtcagcttaatatttatcttaataagttacaaacaccactgtaggacttgactcggtttagaccctgtctctttcagcttaagattattataatctagattattgagtcagattactgtaaactagattgttataatctgtagtagaataagcggttagttgtttctttcctagattattagagcctagattattgggtttgcaagtctaaagagggagtggggtagcatggtgggtaatttttcacccaataatctagaaaaagctcacctaaatgagcttatcagattataataagctgggctttagattataataagctacttcaataagttgtctgtttctttcagtttactcccaataatctgcattataataatcctaagatgaaaaaacagggccttagtcgttacgaatcgactcggtgtgcaattgacatggcaagatttagcacgttgttttgtgacccgcatgctacttgttatgtatctaaacatttgtcactttcgattagatactgcgtgcgattcttgtgcaacatggtactaaaaattaattaaagaggtataactcagataaaacacgcattttatataagtatgaattgttggactgactgggtattcagtagcctcgccatttggtggtgatggtgtgtaggctgggacatgattttttagctcgcgataagaacatttccctcctcttggttgttggggcacgccgctgcaaccaacctgaaaaaggcattccaattcctctttttgcaatatcaggttggaaaattaagcatccaggaatcatcctttctccacgtgaattcccatccatttcctctcttgaccacagtctgtatcttgcaagaaacattgagatttagctgggcagcaggcgacgacgacatgcagatgttaaatgagaaaatgatcaacagagacacggtagtcccctggttctgcacaaatctagctggagacgactgtcacagcacccttacatcagttaaacgagtataaaaacacatcagggttacgtaacacaacgaaaatgaaaaagaaaatggcataaaaagttgttggtaagaaaaattactagcctaaagaaaggccactgaaaggaacaccaagaagaagaaaacaaggttcggtgttgacggtgtcatcgacccattcatctcagaaagtcagaatgtgcacttgagaaaaataacaccccggaatatcatagtccacggttcatcaagatgatacaaattcacgcaatggtgcgactctttcatccaaatatcttcaattgtatcattagactgtacctgcatacagttactctttatcttgcacacagatataagcaagataatcaccaaccatcacggggaaaaaaccaagcaattagtaggttaggcgagctactaaaaaaaatccaatacattattgctcggaaaaaaaaaagctgataagatgggatgacaccgaatacaaagcaatctggatccagacacttcaattatctacgcagctgttagtacaccatcaatgaatatccagataacggcactagtacagtacaacagttcaa

SEQ ID NO: 6083 - DNA, 43140 bp, Oryza sativa
gcgaattcgagctcggtacccaaaaaatgaacaacaagaaaaacatcaaggtggttggaaagcagtgtgacacgaggtcttgcaaaattagagaagccaccatgtttggctgccttgcataaatttttgaaaatacgttgattacgctccaaccaaatgttccaccaggaggtgatcaggcaccctggagttctttttcgctgggtttttggtcgaaaggttgagagcaaactccaccaacttttctaaatctaaggtgttaggcaaagtgttttgacctaaaccctttcaagcgcaaattttgttccccacgttgatggtgaaaaagcattctttgaaaagatgagcaatgttttcgaaagcctccctacaaagagggaaaatccaatcacaaggccagtggcgttgaaggagattttgtgcggttagagttttttggtgcaagatgagccagccaataaaacgatgtttcagttcagtaggagctgactagatcctcgtaaaatcgatggtggtgaagatgccttgaaattgcaacatgtatgcactttttgagatgtaatttccgttaggcgagaatttacaaaggatatcatctggcaaacttggatggagatgcacgttctgaatgagggcgcctaaagaaatcaattcatggatcccctctattgtagtgagctgccgaaaggaacatcttttacatttgtgcataggggatttggaaggaggagaaaaaggacaatatgccactccattcgttgggtttagacaaaatgcacccactaaaatgcaaaggataaaataccacatgttaccttaagatattttgccactttgaaaaattttaagaccaaaatacccttgactgtggagagagaaaaagaaagggaaccgttctgctcgctagtgatggaggaggacggcgttgctgatgggagggaggggacggtggcgctgacaagatggcttcgcgcgctcgcagcttgccgcctccgacgctgcccacacgtgggctcacgacaccgctgtcctcctcccccgtcgttttccgcccttgtgcactcaccacccgccggcggcgagcacggacgccgcccaacttgaccttctccggtgcttccctctcccctctttcttcctttctctccacagccaaaggtattttggtcttaaaatccctcaaagtggcaaaatattttgaaggtctcatctattgagtgacattttaacctttgcattttagtgggtggcatttcgtctaagcccaatgaatagagtggcatattgtcctttttctctttgaaggaacatggatgcaaattgtactagtagtatatttgctcgctaaacaagcttcccttgataatagcagtagatatattaggttgaaccagattccctgaacttcctgcaattcaacatgaaacacgttcgtgctgaatttatgaggcctaaagctaatactaggagaaagaacaacaatttttgaacaaaactaacgccaatttgacagtttatatcgattcaatttgtaagattctccaatctactacaattcagcatcctgttgtgatggtaggtttgttgacttgaccacctccccatgtgttagtgttaccaactcatggcattttctacccaatatgattgtcctttgatcctgtccctatttgaaaagcccccgctccttggctgttgttccggacacgatcagattttattatgactgaaataactactagccaccgacgacgtggttccctttgcaaatcatgtgctatctccaggaaaacgtgcacccaagattcattagtgcccaacacgatccgcacctccccgattatccagatatttgcagccttgcacagctatacgtattgtttgtgaaggaaagaaagaaagaaagaaaaaaaacgaagcgttgaagttccttttccttctccagcttcctgtcaacggttggcgacattactttaccgtaaaaagtcaggattaggccattagcagcctcgccctgtttcttgggtcgtcatctactcatctagatgggcaacggagaggaacggcgactagtctggaatctggatagacgccgggcggcaggggtttgaactgtacgcaagggaataaagcgttcgtcctcgatctagatcgcctagaaacaaagcaaaggcgcccgcgaactggaccgggctaccgatgatgaatcagcggtgccggtgtgcaacagccgacgcaacggggtcggggcaagtcgtagtataagacccgtggaaaatgcacagatcacgtgatgaaaaggcccaaaaccaggagaggtggtggaacactggagcgcggaggacgcgcggtgtgtcaacgtgaggcgtgcggccacatatgcctgcagagactgggagggattgtgtacgacttcgcagcggcgcattccccggccgaggccgcgggttggcgcatgcggccgcggtgaaggcgcgcgcgtggttggctgcgtcttccgttctcttgggagggggctggtgcctggtggtccgagtcgtaccatgcatgtgcgcgagttcttcctaattccaacaacgctgactggctgacagtagtagtaagataatcagccattcagcctaatcataaagtgaccacatggatgatagttgagtttttttttccgtgacataaaagacagcaataccctaggtaatcacacgctgcgctctcccgtttaatacgtaacacacataaaccagagaaagttaccaaattaatccacaaaatctaaatgaaatgctacccaaagaaatgcactagcacttgtataaaatgtccaacatcattttctttacgtcgcacactagcaataatttctcgaacgctggaagaaacggtgagagttctctgcctgactctcccccgttactgtgagaacactgagaaaagtaatttctcgaatttcttcaaattccaatatcatttccttgttttcctacacgctgttttctcgaaaacaatgtcagtcacccaaggcagtcaatgatgagctccctgtggtgtacaatgatccatgcgaagtgggggcacacacatcactgaataatccgcaacccaacaattttcccgaccgatctgagagaggaaagcgactcgaatttcatggtcaccaccaactttcagatttttatgtcacgctgtgttttcacatgcctgccagagcccccaagcgaggtccacaccgggagacgggagtgtacatgatgcccgcaccgctcaccgctaactgaataacgccgcgttttctcgcgtttcgcaggcaacaccgccgtgcgctgcgttgcgccgcgtcgcgtgcggcgtgtgcccgcgtcaactaacgcaagttggtcaagtacaataggctcttcggtacaccaaagatacacataacgctctcgttggtgatgcatacgcgcagatgcggtgtctggttggttaacggcaaaccaccgccatacgaacgcggtttgtacgcggtgagccctctcccccacgttgcgtgttcagtttggttcgcacatgtgtagtgtaggtataaccgcttgccttcttttccggtctccttgccgtactagactagactaatatagatgtgtttggatcagggacttaactttagtatctatatttagatattaatttagagtattaaatatagactacttataaaactaattatataaatgaaagctaattcacgagacaaattttttaagcctaattaatctataattagagaatgtttaatgtagcattacataggctaatcatagattaattaggctcaatagattcgtctcgtgaattagtccaagattataaataggttttattaatagtctacgtttaatatttattattagtatccaaacattcgatgtggtagggacttaaaaaagttttagtcccatctaaacatgctcacagtaatacgtcctagtagtactacgtgcctcatctcatcgtacgcagttgtagaattcgatcaagacgttttcctgaaccatttgacttttacgtgtctacgataatataattccatactactccttccgtctcataatataatggattttgacattttgcttatactgtttgactactcgtcttattaaaaaaattatgcaaatataaaaaacgaaaagttatgcctaaagtactttgaataataaagtattaaagtaagtaaaaaaataaaaaaataatttcaattttttaataagataaatggttaaacagtgcaattaaaatgtcaaaatcttttatattaggggacggaggaagtagcaaacaattttaagacgtcggtcaaaactgatatcagatgtaattatccgttttcttttatcaaattcgtcacgcttacgaacgagccaaagtacatcgaaattgaaagatatcgcctccgccgccgcctggatgatttgggcttgccaaaccaactaccagaaatcaggaccaactgagagaaggcagcagcagactcgctaactgaacgagcaggccgactcatacatagatatagagcccacaaactcattaatctaccagcccagtccaaacgagaggcaacagtgcaacacgtcccggccatacatcggaccagtgtgcctcgagacgaagcaaagaacaacaggtcgagcaagcggcgaagggaaaagaagcggagatcgtcccctccccgccgccgactggacgcatatgcgccacggctgccggtgagcttccccgccggcgacgagtggacctcgccccacgcccggctagatccggtgccacccccgccaccacgaggtacatcttcccccttgcctctcgccccgttctcccctactcgctaggttcgctctcggccactactaggctttcctcgcacaagtcgatctagatgcctgatgccgctttcctggtggtttcatctggggcatatgcgagcgctgggtgtatggattgatctatctggttgaacgggtaggggatcctagctaattcctagcacgtatgctcaagggcgaagccaggatttgggaatgggggtgacagaccacaaggctattgtttatatgtatgtatatgctccattgtagctagataagaaacacgtatatgtattgagatacaagagaaggttcaatataggtagctagcagctagctccaacatcatataaatagcaaacaagacagcacatgttttgccatatgaaataaaattatatctcaattaacttaaatttagctctacggataccaggttgatcaaaggccttaataatttcattggaactaatccttgctgccaaatccctttatacgcaaaattgagtatttgactatagtctccagattaggaactagtaaaagtgttgtttaaggatttagggtattagaatggtcagaatttactccctggctcctgtgggcggcagcttggtcagactcgacaacgccacgatggtcaacgacaagacatgatcactaatcggcattgggcagaggtgtcatgaagaaaccgtggtgttgtggccccctagctgcctatctcgatctctcattgttctctcttactaatgggctggctgaagcactgattgggctgggtaggttgggggtgggtggtcgttgattcaagtttcgccacttcgtatactgctgatgtgatatattgtgtgtatgacatgtgaattctcggtagtggtcactatgccagcatctgatcaaatgatcattattcctgtcaaatcatttatcgtagtaccaatattgttttctttctcagtgcaaaccttgtggttttcttggaaattttacatgtaagtttcaattgcatgaattgtgctagtgaaaacaggtctttatgttttttttttggtctttattattttccagtaatgttcacattccaggacgatgacgtctttgcgatattccatatggagaaattatttcaaactaaaatacctactacctgcaggaatgttcttctggccgttcctagagggtcttttgattcttgcaaatgcattggcgatactaaatgaagaccgctttcttgcacccagaggatggagcatgtctgaagtctcaggaaatggacgatcaaagtcattgaagggtcagattgtaggactcatatatgccacacagttctttaggatgccgttgatagcacttaatgttcttatcattgttgtgaagttggtgtcaggctgatactatgaaggtttcagttgttgggcttgattgatttcaatttcaatgtgatgtaaaagtattcacgctaaatatttctgcagctatattaatttgtctatatatgtgccttgttattgttctagtaaattaattctaagcagcaaattgtttctttggcacgtataccatcagagtatgtttgcctgccaatctgctgcgagggttcccttttccttatttctgttctgaatcaaccacacatttattttcttattggtgtgtgttgtgctcggtgttgtttgatattcagatactgcttaaacggaaggtcctcctaggctcctatggtcttacctcatgtcagctggtgataaactggcccttcgtctggtccagccttagctgagtactagaaaatcggcgcgctggataatttatcctgtgagtttttcccctagggcacatgcatagtttctagagtaattactttaatactgataaaatctatgtaaatatcatatattcaaaaatatcattcaatgtgtacttagttttatgtttgtataatacctacgaagaattatagcatgacagtatacgcaaacaaacggtgcatttagtctcacgtttgtaattttaaaattttgtatataagctgttagaattagtaaaattaaaataaaatattttttatttcttgctatcttaaaaaattgtttaaccttttctataatatacttcctccgtttcacaatataagtcattttagcattacccacattcatattgatgtccatgaatctagatagatatatatatctagattcattaacattaatatgatatggaaaatgctaaaatgacttatattgtgaaacggagggagtaggatattaacatggttaagttacatgttttcagctttaaccaatcacacttagcactaagggcatgaataatggtacgatcaccgtaggagagaatgccacacagtatattttttgatgtggaggtgagtgagaggagagaggatacatacgtctattaattggtagacatatatgctagacacagaattttacatagatagcttaacactatatatgcactccatatacaaaatatagaaccaaattagtaattatataatgtaggtaatatgctatatgaattcttttgtatatcgtgtaaatatgatgtgtgactattatagggcaaccactctctgaactatttttcatgttttttttgggacatttcacaccaacattcctataatagtatgtaaatattgatatttgtagaactacttcctccatttcacaatgtaagtcattctagcatttcccacattcatattgatgttgatatttatctagattcattaacatcaatatgaatgtgggaaatgctagaatgacttacattgtgaaacagagggagtactatatttgtcagtttttatatttgtttatacttatcttttttatacacaaattttattattttttgtcttatttttaagtaatatatgaatattataacccagtcaaagtgtgtgcattttttctttattctgttgcagactataccatactttctctttttgagaaatatatgatgtgttagcttttaaaatggcattgacaccaaaatttgatcatcaatattcattctcattatattattattgactataaaactaatactaatttaatgccacaaataattgtatatgagaccaatatggtttgatttatttttttccaagcctgtcatatatgctacaatactcacatgtatgggttcagctaacaggtcagtgatagctaactcggccagcacaggtgcacagcacgggccaatgtagctaggccagctgggatgattgatttttttttatagaacggggatgagagattaatgagagtgtttggcctagatagcagggacgtgaggtgagacgacatccagaagctgctgttatttttgttttctgccgcacgaagacagcaatacatgcgcgagacactcgatcgtttgccgaatgcttcatggacacgtggcgtaaaactgaatgggggtaaacgaaccaatcagcttgctggagaactatttttatccatcttttatcaattgtatacatgtttcctggagaactatttttatcccaacctattatgctgtgtagtatatggtcattcttagttggctttaacattgtgcaatgctatcactgactttttgttattaatccatcatggacttgttaacttttagatgatatccactggaggaaaatggaattttctgttgaaaactgacgagtactcagagcatgttcatcatgcaggtatgctgcgaacctcgttcttgacaaacaatttcgggttcttcacttatttgacatgcatttacctttaatgtttccagtatatgttgccttttggtactcacaacataaccatatgatgttgacataaaccatttgtccattgacatcttccctatagttaaacacatttaagctaagttctgaaacatgccatgagtacgatcaagcctaaatagtatggagctgtatatgtacttttttttttcaagatgcattcatcatattacaattttctctccatcgacctggatagacactgtcattattatgtccaaatcaccaccctattagtgtctatatgcaccttgcactctcgttaaactgaggtccacaccaaattctggttccacaatgagtttcagtgttggagaatgctcatagtttggcgagagcttcaatacaaacttggagatgatgagggaaattagggttttgagttcagccatagcaaagccctgaccaaggcaagttcgagcaccagcgccaaatggcaagtaggaatgtagctggggttgtgcattggagaagcgctctgggttgaattctttcacatctggaccccacaggttgggatcaaggtgcattgtggaaacagggatgtagatgttgacaccttttggtatatgtacacccccaaacttcagttcctgaagggcctgccttgatacaaaggcgccagctgggtacaaacgcaaagtctcctggatcaccattgtcaactacaagcagagaggacctggaagttagtgagctattgtaacaaatgtacaatttactgcaaagtgcactaatggactgctcatagtcaagtcttgttttgttttgcaagattaaaaagatgcatttctttaattgactgaatggaagatgcagaaaaggaaaggagcatatacattcttcattttctgaagggactgagagtctactggctggcctgcacagacctcctgcacttcttcccgtaccctatcctgccactctggatgtagtccaaggagcattagacaccaggcagctgtgacagctgtgctctcatatcctgcaaaatatatactcttgcagttatccactataaagttctctgcctcagcgagctccaccttactgctgcttgcactaagaagaattgcacgtagtaagttcctttcttctccgctttccttcacaatttctagtattagtttgtgcacttgtttgtgaagctcccacgcttgcttgttcctctttatgggaaaaaacctacaacattcaaaattttatctcttgcaactgaattgaaatgggagtttcaacatgttgtctggaactgacaaaagttttaatttatactcttgcactaaagaaatgacatacttggttgctaaccttaggccagtcatttcagctagtacatttggcttggacacagccttttgtagttctctgatctttaaaaatatattctttcctttgatgtagctgcttccaaagcatgttctagagataacgtctgcagagtaagcccttatgtcatcatcaatctttatgtctatggtcccgccatttttgtctattccttcttcccatgacttaagcagtgtttgcgcagaatctaccatcagatccaccatgccctaagtatgtgaaaaaaacaaagaatcaggcaggcaagtaacactcattgttgtcttctgtctagctgtatgcttgttcttaaatctttgaattctaatttactgatgacaataggagaagaataaaaaacccttatgtaagtgtgataaatagctcatcagaatgatccaatgttactgaaagtggtcctaactagagtggggtatagcacgttatcttggtggatcagaatattgtagttttgctgtcgtgagtggtcctaatcagaaattttaatgctcgtaacacattatctagctggatcagactgtagtagtcactctgctccaggctctcttacgttgaactgtaattctaaattgcgtttgctaagcgggaacatgtagatccacatatttatttctccctgaaactatgaggatagctttgaatgcctacttgctggggcctaaggttttcctccgatgccttcaaatctttgttagcaacccaagtctatttgaacatatatctcactgtcagttcttttttggtggctatagtgggagtgacatttcagagtcattctgggcctcaacctcaagagtttcagtttgccataataatttttatttgcatgtatgatagttggatactaactggatattggaacagtgcgatatattgcacataccttgaccttgtccaggaagaactcacgggcaatgatctttctctggtgtgcccacgcctctccgttggatttgaggatgcccccaccgaacaggggctcgtgcgtcgccttgaggtaggagctcttgcccaggtccagcgacacgcagaggttgatgtcccgaaccacgtcaggccggctcacgtgaaggaacacgacgttccccatggagtaagtgaatattggacctgcaattgatcgtaaagttaaacggttaagatcatatatgaataaaaatcgtaagataaaaaattagattcaatcgtaagaacatatattgaagctgtttggttaaaggaaacgtatgtcttttctgccctttaagggcagaaacccactcttattccctttagttatactgtactaccctatgtattcatgttggttttcctctgaaagtacggcaagggttcattttaccattcgtcaatcgatctgagagctattgaaacacacgattgagaaaatagaggagtaggagaaaaatacatggttagcagggctgcacatataaaataaaagactgcaataatcatgataaaaaaataaccgtttggttaggctatggaaaccataggaatttgagagataataaaagacttgaaaggaaatttttcatgaggtctaaaactcatgttgattttttttccaaaacttgcacggattgaaatttcatagaattaaatagggtaaaatcatttgtttcaaaggagcatttatgaaaaaatctgtaggattgcaatcatgcaaaatttctattcatattctaaagtaccggtttcggcatacactctccagtgctagctaactgaccaatgacagtgtaacatgtcggagctatcttgatcacaaagaatccagtccagaaatgccacgcacgcatccgcttgtccaaatcaatccaacatggaaacggaggaacatttgggaccatcaatttggtagtatcatgcctggctcgagagcgctgcccctatcggaaagcatcagctggatgccctgccgggaactgacactgtggcaccgcgtacggttcggccccgtgccgcccgatcgaaaaccaaggcgcgccgtgcagaggccaaaagccggcaggatagacaaacataacccacggcggcgaccatctacggaacaacagtaatacagcacgtacgtcgggcgcactgccggtctcacgcctccctggcggccgccgcctcgcccaaccaggggacgccgccgcgcgcgcccgcccctgtccccgtcccaccctgttgatctcacacgatcacatcgcaaacgccggcaacggttcggaaatgggttaattgggcacatcgctcaccatcaaggctggacgctatgccgttggctagattagaagtggttgttcgaggcagagtggctgatatacgagtcctaattaataataaatggagtaatcttttttaaaatgttaaaaacaactttcttattcttttcacgttctcgttgaaaaattctcaagacttttcacgtactcgttgaaaaattcttatatggtgctcttttaaggtattccatggctgttgtgggcctggacttgatttcctcacgcctcatccatcgacacgtacgtgcggccggcgttgcatgcggttggcgtaggtggccgcgcgcttctatccgggaacaggcgctcactcgtctaaacgacgtgatatgtcggggttttggtgctatatgcattgctaactatgcaagccatgcccaaccaccaatcgggtaaccgatcttcgatcgtgcactagctagtataggagtagtagctaatagctctgcatcaggattcaggagctagccgtcagcaccatgcaaggctgcgagccgcgccggctatgtgcgataaataaattgatcttgatgcctcttatctttttgtgattcatactcatattattgagatgtgacttgattgtgcccccgatgggactttgattgttgaatttgatggccttttgcggattggttttatagcgttgttgactcgtcgcaccatcgattgattgcagttggtgtgttgtatattccctcggtccacatatatagtgaattctaggttttatagagtttaaggctcgggtgaaattgctttgatatcttgaaagtttacttgattaagaaagactatgactagtgagcaataaatatagtggttagatgatataggtaaagtatacttcaaaatctctacattcgtggacataatatgaatttttgaacataaagtctcttatatatcctatatttgtggatagagtggatatttaggaagaaacaaaataaaatgaatattttttagttgaggggaacgtatcctatgcacacacatcttctcgtgtatacactatacacaccaactaacaaacttcaaaaaaaatttctagaaaaatatatacatatacttttagttgtatcataattatgtctaaagtctcgtcttcaaaatcattctatatatggagaaaaaaaagacaaaattttggactatttatacccttaaaatcgtcagaacttttatcttaggctaaaatataatgaattcaaggttaaaactttatacataagtataatgctatcaaaagtacatgtacattttttctaatttttttagtgaaatatgttagttggtatgcatagtgcgtacacggaaagtttgtatccacatgatgtcatatgtatatatgatgtggaattgatgtggtgcataattaattggtttaggctttactaaatatgatatgttgtataattaattgaattttaattattataaacttaaaaaatagattcattatatatttttaaagcaagtttttgcgcaaaatatatcgtttagcaatttgagaaacgtgttaatgaaaattgacatgtcctgtctcacatagctatatgactgatccttgggaaaaaattctttatttgtttctaaagttgatcgattctctcattttatcatggtaaaattggatttttccttttatgctcttcattctcaaattttgttttttatttgtactttccgtacgtgagttctctgtcaacatagcattaattagtacatgtgtgcaaacatgattttgccattgtgcatcattttctgtgtatcagcaaagcttgtttattaattataaataaattatagattaggttttcacggttaagatgtatccataataaatgaagcaacaacaatagttttagggaagactttgatactgcttcttgttaaattaatgggctaggcccaattaaatcctaataaattccattggcctacattaagtgttatgggtaataataccaccttggaaatctaagtgaagaggtctcaacttaaatatggagctagtggagagtctctgttgaccggttgagatggtgcgcggacaactaggcggggcgaggcgaggcaaacagctgctgcgctctctcgttttgtaacggacggtaataaacaacggatatatactctcttcacgactcttgcactccgagttcctcctcctctattcctgagctgcagaatccttccccggttctgttcacctgcgcgcacaggtgtacaggacgagcaggtgcctccgaaactccgtccgcttgagaacttgcacggataggcgggcgatcaagtttttgggtagcgcttcaagcgcgactgctcttgttcttcgcggctactgctgctgcatcagcgccttcaccaagatgtcaacggagattggagacaagaagatgaacgacatcaacggaggcaatactgcctcaaaatccagcggtgggacattttcgaggtatactttcattctcccgattctattagatgtttctttgttaatactcttcgcaatggcagcattgcattactatataaatgtttatgcttatttcatattaagcatactcaagttgtatacatctagcactgtcactagatctactcatattgcaaatgtcatgtttattgtcttaatattttggattaaaatatgccgaattatgaccaaattttcaacacttcttagcttagttgttgaaagtcctagactgcaaaataaaaacaaaaatagctataaaattaagttttaaaatttaaattcgactgactgataagatgacgagcagtcaatgacaattaatttgggcctagcccattaattgggatttaattgggcctagcccattaatccaaaaacttagcctcgaacaaaagtgtacgtgctaaatgtacttcctatcaagtttttggattgttggaaatttggtcataattcggcatattttaatccaaaatattaatacaataaacatgacatttgtaatttgagtagatctagtgacagtgctagatgtgtacaacatgagcatgcttaatatagaataagcatcaatatagataagagaacgcaataatattgcgacagacagttgtaggaaacgaaggacgaatggtaatagtgaaacgttataccccgagaatggccttccgctggagtttgaggcagtattgcctccgttggtgttgacgagaggctccttctccttgtctccagtgttgttgttgtcgccggttgtcgacatgttggtgaagatgatgcagagcagtcgcgcttaaagcactacccaaaaacttgatcgcccgtctacccatgcaggttctcaagcggacggagtttcggaggcacctgctcgttctgatcacccgtgcacgcgggatgaacataaccggggaaacagagagacagcgcaggaacagaaggagagtatcgccaaggaacaatagtaggaggaagacacacactttgagagcctctgccttgcgttatatgtagagagagatctccattaccacacaaataaatctcatttgttgtgaaggttatcacaaaataaatcccatttgttgtgaaggttaccacataatgaatctttcatttgttgtgaaggttacaacaaataaatctctcatttgttgtgaatgttacaacacaatgaatctctcatttgttgtggaggttacaacacaatgaatttcatttgttaatggtgactttattctagtctgttacaaaacgaaagagcagcaggcaggcttggctcggtcggccgcctcgcctcgctacgcccacggccgaggccgactcggcatacgcatatgcgtgtggcagtccaaccatcacctcaaccggtcaacagggaatctctaatatcaccctatttaagttgaggttcttccacctaaattttcaaggcagtattattctctctaacattacttgtgggctcttgagattttaattgaattaaattgggcctagcccatttattccaacaatccccaccaaatttcatggctcacaagaaatgttctcaaaactgaacctgttagttataccagtgtttcgatggagactgttaagttgaacttccacctaggaaaagagctacaccagatcacaactgaacaatagactatgccttgaattattagtcttgtgcgattcaggtttcactcaaacccttaactggtattgggctgtcatttgcatcctctctgtttggagcgtataagtcatactcctggccttttcatgagtatctagagatcacctagatctcataaactgtgactagcagtcggactcatataggtgtgttccttctaagatgttctgtaggccaacatctctgctttatgaaaagccactcagatcacattaaggtgtataccatcctaccatacagattagaagagaagtgcatcatgaaaataggctcattttagggtctcttctctcagctacacaatagtttatttcgccatccaaattcacgggatctccgatcacaatggacaggtttccactattgtgcaactctaagtgggtctcaagcccatctccctcgatgcacagtctatcacattacgtggtagccccttggtaaattgatctgccagatttttagccgtctggacatagtccaatgctatcactccggagtttttatgctttctgacagtctttagtcttcttttaacatgcctggatgacttcatgttgtccttcgaactgttcactttaataatcactgtttgattatcacagttcattaggattgctggtactagtttttcaaccaccggcaaatccatcaggagctcacgaggtcgttcggcctaaactgtggcagtatctaaagctgtgagttctgcttccattgttgacctcgttaagatggtcttcttgcaagacttccaagaaacattgcaagacttccaagaaacagcgccccctccaagtgtgaacacatacccacttgtggcatttatctcatcagcatcagatatccagtttgaatcactatagccctctagcacttttgggtacccggcgtagtgaattccatagctcattgtcccttttagatagcacattactctttcaagagcatgccaatgatcatctcccggatttgaaacaaaccggctcaacttgctcacagcaaatgagatgtcaggcctcgttgcactagctaagtacatcaatgaaccaatgatctgagagtatcttaattgatcccttgctattcttcggtttttccttaatagcacactaggatcataaggagtaggagctgccttgcagtcactataaccaaagcgactcaagaccttgtccacatagtgagattgcacaagtgtaatcccaccctcatgtcctctcagtagtttaatgttaagaataacatcagccactcccaaatctttcatttcaaagctttttgacagaaagtccttgacctcctcaatcacattgaggctggtcccaaagatcaatatgtcatcgacatataaacacaagatcactccctctcccccaccatagcgatagtacacacatttgtcagcttcattcacaacaaagccagcagatgtaagtgtattgtcaaacttctcatgccattgcttaggcgcttgtttgagaccatacaaggacttcagcagcttgcacaccattcccttctgaccttctagtacatacccatctggttgatccatatagatctcttcctccaactctccattgaggaaagctgtcttaacatctatctgatggacgagtagaccatgagaggctgccagagcgagtagtactcgaatcgtggtcaagcgagcaaccggtgaataagtgtcgaaaaagtcctcgccttctttttgggtataacccttggccacaagccttgccttgtacttttcaattgtaccatcaggcctaagctttttcttgaaaacccatttgcatcctacaggcttgcacccatatgggcgctcgacgacttcccaagtaccattagacataattgagtccatctcactgcgtaccgcttccttccaatagtcagcgtcaggagatgaatatgtctcttcaatggttcttggagtatcatccacaagatatacaatgtagtcatctccaaaagactctgcagtcctttgtctcttactctttcgagttgttacaatattatcctcctcaggatttttctcaagcgtttgatcaatatgttctatcggcacaaagtgctcaggggataaaataggttctttactagaagtgctaggtgcatttttcataggaaattcattctcaaaaaatatggcatttctagactcaataattgtaccaacacgcatgtcgggtactccagaatttactattaagaacctatatcccacactgtggatagcataaccaaggaacacacaatctacggtctttggtccaagtttacgctttttggctataggtacatttaccttggccaaacagccccatgtgcgcaggtgagagagatttaatttcttcctttcccattcctcgaatggtgttacttccttatgcttagtaggaattctattcaggacatgacacgcagtcaatattgcctcaccccaccattccttggaaagtcctgcagtgtctaacatggcattcaccatctcagttagagtgcggttctttctttcggctaccccgtttgactggggtgaatagggagccgtcctctcatgaataattccatactcttcgcagaaagaaataaactcattggaaaaatactctccacccctatcagacctcaactgtttgattttcctttccagttgattttctacctcagccttatagatcttaaagtaatgtaatgcttcatcctttgttttcaataggtacacatagcagaatctagtgcaatcatctatcagtgtcatgaaatatttctttccccctttagtcaacacgccgttcatttcgcacagaccggaatgaacaagttctagtggtgccaaatttctcgcctcagatgccttatgaggcttgcgaggttgtttcgattgaacacaagtatggcacttagagcctttgactaaaatgaattttggaattaaactcatgttggctaagcgtgtcatactaccaaaattcacatgacagagtcatgaatgccacacattagactcatcatcatcattgcttacatggttcacaactttattacacatatcatccaaggaaaagcgaaacaagcctccgctgtcataaccttttcaaataaacgttccatattagatacgacacatttattagattcaaacacaagtctaaaaccatctctacacagtagagagtcgctaactagattcttctttattgaagggacatgctgcacgttcttcagctgcacgatctttcccgaagtaaacttcagatcgatcgtatcaacaccatgaacagctgcaagcgatccgtttcccatcaacaaggaggaacctctcccgacctgataggaagaaaatagggaaatgtcagcacacacatgaatattagcaccagtatcaacccaccaatcaggtgagtgacagacagagagaactgtaggtaaaaatttaccatacctcgatgttcctccgccctcactaataaccatgtttgcagacttcttgtccttgcgctcaggacaatccttggcccaatgcccagacttgccacacacaaagcaatctctttttgcctttcccttacctttcttcttaaaattggttgtagccttgggtttgacgtcaggtttgactttcttgttgttgttgtgggatgcgtgagggttcttcttctacaccaaattggcgctagaacctccctcgatctttttgcccaagttatcctttgccctcgccttctcctcaacacccaaagagccaatgagatcagtaagaccgaactcttgcctcttgtgttttagagaagtagcaaagtctgaccaagaaggtggcaatttggcaataatgccacccgccataaacttgtccggcaactcacaattgttgttctcaagttcctttgccaacatttgaatctcatgagcctgtctccacaacagaacggtcatcgaccatcttgtagtcatagaattgctccatgacatacagctcgctgcggcgtcggaaactccgaacttggcctcaagtgcatcccacatgtccttccccgaaagcatgtgcatgtacacatccactatattgtcagtgagtacactgatcaatgctccacggaacaagcaatccgaagcctctaacttagccttctcctcaggagagagaggcggttcactcggtttgccccgtgagacaaagaaacaatgcatcgttgtcaaccacaaaagtgtacatggtttccatcttttataatttgaaccatcgaaagcatgtggttttagtgatgcaacaaagccaactaccgaaaaagacctagactgcaaaataaaaacaaaaatagctataaaattaagttttaaaatttaaattcgactgactgataagatgacgagcagtcaatgacaattaatttcacacaatatactaaatttaaagaatttcgcataactcctgattacgaaaataccatttaggttcaggagagaaattcaaccttttgtgcataacaagctagtatagaaattgctgaccatgcatgaaacaagttaaggggaaaaagttgtgttttcacccgcctactaacgacggtaggttgatggaaagctaacggaaaggacaaataaaatatgaaaagaatgagaatgaggagcaaatttcacgagagcaaataagggaatcaatcaattccgaagggcatctggaaagctaacgaagaagtttctccttggttttaagtggaagtctagtgcatctgaacaggctggcaaaaatttcaatttcctgcggtaactaaaactatttgactaatcgccgggtacatcaaattaatatgattgcattctagtgcaatcatatcatctgaacaacagatttaattaaatgcatgctcgactgcgatctttcaaatagggaaaaaggctaggttacttttatgggagcagagttgcacatggtgcagcatgtatactcagcttgatcccagcagtacttgtccttttgcatcgtttcgggccaaaactacatgacaggatctggctagctattattcaccccgttccataatataagaaattttaatattttacttatgttgtttgactattcgtcttatttaattttttaaattattattattattgacttactttattattcaaagtactttaagcacaatttttcttttttatatttgcacaattatttttaataaaataagtggtcaaacagtagaagcaaaatgttaaaatcccttatattatattatgggacaaagggagtactagcttatatatatataattagtcacctcgacactcattccagcttaatttctttatgattttaacccctttcaaatctttacatacttgtcatgatcttcacctttctatcaaatagctagggtccaaagaagttgtagaagaaggtgatggccagctcacctaatgtaatcttgctatccaacagtaacagcgacggggagggttgcttaattagcagcaacgagttggacgtgaacagtagtttagccaagctgttaacgttgggatggctacaattaaagtaagatcaacatcaagatgcaaatggtggattgattaattaattttagaagtaatcatttccggggcctgaaagggatgtcacttggtgacacagtagatatataacgtcgtaatacctttttttttcattgaaagaagaaattaaaccttttccgttttggctactcgaaattctgtctcagtggcttggctagctcagtaatgaatcaactattgagcgactctgtgttctgttactgtagtatattgcactcactgagttgcacggctgctgccataatctgttaactcagtgatgttatttttaaccaatcctagagaagcccagattccattggtctctagctactagtacctaaatttgtgggacccatggttccctgaacccacattttaaatataatataatatacttatggttactcttatactcacttttacatttactgtcaaatataattgatatcgccaacggttgcggagatatatagacaaacagtccaatagtacatcatggtcaaacaaacttgagtgaaaacaccagtactgataatagccatatttacctcagatgcgattagtgttagttttggtttcttctaataattggcctttgtatatatgcagtacgtgcccagcctccttggaagattaattaattgaagaaaacattgaatatttttttatattaactaactaggcaacaaaataaattaaaacgctaacgccaacgtaagcagagcaatgatagataaatcgcacacatgcaccaccaaaattaattaaacgatcgttcgagttcgatcgagcagctgatgaggcgatcgagagagcacgtacgtaccgtagtcttttctccacttctcgtagaagggcagcacggcggggcggtagtcgtgcacgatgccggcgccgctgccgccatcgccgctgtcgcgtgctcgccgtcggcgtcgcgcctccgccagctgatgcctggcggccgcgacggcctcccgcatgtcggcgaggttgccgtaggggaaggaagggcgcggcccgccgatgccctgcctcctgaactcggcgagcacccgccgcggcgccacccacacgacgcggtacaggtacgccgcgaggcagcacgcccccacgcaccacaggctcaccaacaccttcgccgccaccaccaccaccatgcccacctccatctctctctcactcactacgactctctctacgacgttaattaactaagcttctcctcctagtgtttgtgtttgtgtgtgtgcagagagaatgtgagtgtgtgtgtgggcgcgcgcgcgcgtgtttcagctggtcgtcagtgttgtgcgtgtatgtatagacggtgtccggccggggggggagaggggccggggttgcgagagctagagtccaaatggtgactttggcgcaaaaaaaaaaagatactgaaaaaaaaggagggaagttgcactcacacatgttgtacatgtatgtaggctacttcctccgttttatattataagattttttagcattgcttaaattcatatatatgtaatgaatctagacatatacatatacatagattcattaatatctatatgaatgcgggcaatgctagaaagtcttataatttgaaaaagaggtagtatgttatgttagctagggggtgtaataatacaatgcctccaaagtgcaatgtctatccattatgttgatcggatcccttatgttttagctttgttggtgaatatccatctcgcctctgtgatgaatgaacagatcaggggagagctagctgaagtgcagctctcaactaaccgatcttatcccggcaaagacgtgcgacaacctagctgctcattatattttcgccttttcgggtgtaaaaattagtcacatcgatcattggatacggatggcaggatggggctttggtcgcctgtagtcactagtttttcacaagcaatgcatgggtgcaaaaggggtaaagatgcatggggtgtttgctttcacccattcgatcggatcaataattggcatagtgtgtccagggtttgcattatcgtcggtttacgttcggcaacagggatttgctattagtgtgtggtaacggaaatcacaatgtatattcaccaagtttaatttttattttttaagataatattttttgtgtaaaatttgtctagtttttattggttttgcttggtaagtggtttggttataccgctaaccgacggtaacaaaaaaccaaaaccctgacagtgtgccatttatttaggagcaattttacggtctttaaggatgtacatgaggtaccacgtttttttattgtaaatttggtatctctgggtacctactaccttgtcccagaaaaagataaactctagctacgagtccaggttcgtagctactaacatggacatatgcatgtgtccagattcgtggttaggattggacttttttttgggacggagggggtaggtactgttaggtatcaaattttataataaatttttagtatctcatgttgcctcctcaagaattgtaaaattgatatttatttagagtgtgaatatgtgtgcaccttgattcaatgtacgagcagaggccttggatctgcaattttaagtacaaaaatgtttcgtaaaagaaaccgagtgaaaaagggagaaataaagtccatctccggtacacaaaacgatgtatacattaatgcatgattaattaaatttagctattttttaaaaaaatatattaacataatttttaaaaacgatgtatgcattaatgcatgattaattaaatttagctattttttaaaaaaatatattaacataatttttaaagcaactttcgtatagaaaattcttgcaaaatacacaccgtttagcagtttaaaaaacatgcgtgcgaaaaacgagagagatgagttgggaaagtgaaaaaagaactcagccgtatatcaactaagaacaagttgaaggagaagaaaatccatatttttttaaaaaaaaagaggaaaatcagtattatgcgcattgctttgattccgaaaggagaaacgaagtccatacattaatgatatcttttgtttttgcttggacatatttttgatatcgactaacaaacaggacaaaaaaaatgtgattccacacgtgggagtgcaaaaggaaaaaaataaagcctatatatattattaacatattagttatatggacaaaaaggaaggccgaagaggcatattttgagcacgtatctgaattctatggacattacttaaagagagcgctgcccacatatcaatggcagatagattcgatcctctctgcgatcgatctcacgaaagaagaaaaggcgaaaattggacatgagcacaaagtataatcacacaatatatcagtgcttttggagtagtctttcaatcgatctgccatacatatatttctccacatacgttgtactattatttaaaagtaagtgttgatgttggatgtgtctagctagctaagtgtcatgcttgtgcggccgtgcatgcatacaacggatatataggaatatatatattacatcgtttgtctaatcggacaatccaaaaatatcaagagctccatcgattggcgacgagctgatcattataatgccaaatgatttattagcgacccaagattagtatatatatatccttggagacttaaaagtcggatgctgaaaaagtaaatacatcaaaaatatcctaaaatcatctccaaaattaaattttaaattaaattttggcagcgcttaatttcatataggacaaacaatgagactgcaagagttttatgtgttgctgaattggcgggtccttagtccttatatgtgtgttgctatcatccttgttgctatcgtgggagatgatttagagccttcttggcacatttctttctaaaaggctacattttattttaaattttagaatttggtttttaaagttaattttaagagttttcttggcctcttttattgcccaagcctttatttcacgattgttaagaagatgactaattttttaacccaaaactatttaaaataacacatttaaaaatttaatttcttatggtactatcgaagtggagtttcgtccgttcgtctgtcatccctctcccgttgctcacgcagcaaattaaaaatttgctccgcgtaaaaacctagctagcccattaaaaaaaaaacaacccaccctctatatgaaaagagtcccaggactaatataaaaactgcatataggaaaaaggaggaattaattggtgctaagagacccacacctgcaaccaaatgaaaaccaaccctttgcattctgcgttaaccaaatagggcggaaagaggagaaaaacaaccatacttatacaccaaatgtcaacctggaatatttcttttaccttgcatgagttgcatgacaaatttagatttctgttgcaaacgtataggcaattatctggtactttagaaaatgcaaccaaggtgaagccttaattttttattacaggaaacgataagggaaatgtggatggtggcaggtagatttacatgcccaatagctgtaaaacaagatacccgatgacagtacagttgcagtgagagagatagagcgctgatggattacaggttggttctgggctgtccggctggagttgcgcccacaactgtgaggcagtacgaaacattagatcatctgggggcctttgcattgcattgcctttgccctgcatgcctggcctgaccaagctgagcaaagcccggccggccaccagccgcagccagcccatgtgccattcatcaattcctctcctcgcctcgtacaacagcgtgcaggctttacacctgcctgccgccctctggattagtttcactgctccctttatatccataaatataaaggattttagattgtttagtaaagttaaacataaaattgcttggatgtattgaagagtttattacttgattagaaaaaacaatatccttttacagtgcttaattgtaaggtatctcacatacctcccaaactcctaaaaatccaccgttgattttgggagggtaattaaggaaaaaaaattacgcaaacatggtttgcattgtgatttgtccttagacgtgattttctctaattcccttgcatttgttcatttcttctcccacggcgatgaaccccttatccctgattttcatcttcctaatcaccatagatttataaatttattgcatcttgaactattatatcagttaattaatatttagttacatatgattaattatatagttttataagtagttacatgacctatcatgccaataaattacttagttttactattaatttcgtaattcctgatcaattacctagttttggtacatgatctgcagcaattcgtgatcgatattgacaccctgtaatcagcgttgctagctcctgagtgtcatctttaaattcctgttaatatatttttaccgttttgcctttcacactttgacgtggtaatgatacaaattatctacttaaccttccactaaattacctagcccacatatcaaataccttctaataggtacctttgtgtttcaaatcgttagattgaacagaatcaacggatctcgttattttgagaaacacggatctttcggctagctcaataagggtgggctagacgatctgggtctgaagtttcaccccttctagttatttgatattaggtcctttcgtaatattgatgtcttttttcttagatctccttatttccaagcacaatagaaggtattgagaagatagtgctcctagcaatgtactattgtctgacagaattgagaagatagtgctccaaaaccccttaaatttgtgaataatttttaaaccccagaatatgttactctttatatcttaaaatataagaatctagaatcagatatgatattttctaatactacgaatttgaacagacaacctgtctagattcgtagtacgagaaaatattccatatgatgttactccctccgtcccataaaaacccaacctagtattaaatgtaactcatcctagtactacgaatctggacaaatatacgtccagattcgtcgtactataatgtgtcatattcagttctagattaattttttttaggacggagggagtatattccattattttaggacggactactgtatactacctccgtcccaaaataagtgcagctatgagtttccgcgcccaactttgatcgtccgttttatttgaaatttttttataattagcagttttgttgttataagatgataaaacatgaataatactttactcatgacttatgtttttaatttctttcaaaaaaaatttcaaataagacgaacggtcaaagttagatgctgaaaaccatgattgtacttattttgggatgaagttagtactattcctatgaggatcaccgtactgattttgttggatatattcgccgggaatcgtttcgatcagctgagctgatatgatgtttgtggccaagtggtggttgagtggttgatctgcaggccccgggcggtaggcactaggctcgagtgtcaccgtgagtggagagctaatagctgccccgtacagaatgaggccaaccggttgagacgataaggccaaccggctgcgtttccagagttgaacagatattttttcgcacgtatatattttaaactactaagcagtgtatttaaaaaaaatctttttatataaaagttgctttaaaaatcatactatctatttttgaagtttaaaatatttaatacttaaataattacgcaataatatcttatcttattttaagtatcttctcaatattatttattcctctctctcaaacacactaatatgagaagcattatagtaccatgtagactaggtttatgggtttaaaatttgagttttcagcaagacaagttgctttaaggatggttttgattttatattctagtccttaataccttttgttttagttatcatattttctcaatttgtgtggagattcaaaatttacaccgaacaccctagaatccagaaaaaaatacaaaaatctccatcccccctctctcccttatcctctcagcatctccctcaatctcgctaatcgctaccggcggtgactcccggctcccatctccttctgaccaatgctcctcatctcctcccccgaccggcggccctcctcccctggctggcatgcgcgtggagcatgttgaaggcgagatcgacggctcgggagtgggggatggcaagacttggcggtgcagatttgggacgagctagctcgagctcctctccctctccccctcatgtcttcctcacggccggggccctctcctcctcccccaaccgacgcctctcctatcctctcctctccaccccacctagtcgacgcgctgatgagttcaacggtgcggcacgggggaacaatgatgagctcagtagcgtttgtcgagggcagtagaatgagccgacaagcttctccagcccccaccgccttccccatcgagccgtgcgggcttctccagcgtagatcaaggtgggcggttagggcaccatcgacagcccaacaagctcccttcacctatccccaacctccatccctcaccaagaaaatctgcattcaccacctccactcccctgctggcacccatctcccttcaccactcgatggcgacagcgagatccacaagacggtgaccacgagctgtggatgggctgagggtttgagaaggccaccattgggctactgcggcggacgggtcgaggccaccgccaccttctcgagctcatactcatcgtccacggccgtgatgttgccgacgcaacccaagtgctccacgaccatgaggatgacgcccggtcaccctcctcccctagccaatgaggttggcggcgtggagcgcaggttggcgatgaggtccctatcctcccttctctagcggcaagggacatgagtgtaggccagacctgcaaattttgagcaagaacctatggctcatcttgtctccgcaatcttcatagggcaacgagaatggcagacgtggcacctatggctcatcttgtctccgcaatcttcatagggcaacgagaatggcagacgtggcatggaatctctgacctatcatgctgaggctgaacgacatctcagtgcattgtgaaagcaccaagagcaagttttatagtgaaggtgacaattacctttaattttagtcatatcatttactaggaataatcattgattaagagataacatgtacatcaatttacacaaatcccaataattttttgttggttcactctcataccatctcactttgctcttggaatttgagtagtggtggctcatcctctctcttctcacttctccctttcacctcatcatctaatcttatatggtatttttagagtacttgctctaaattgatcggcgagcgttcacgatacagctggataagctcgatgtaattcaaggatctgagtgatcagcaatatgaattgtagaccccggtgagtttacctattggtagttatggatttattcttacttcttacagtacatactcttgttttttagttgtcggtcaatgtcgatccagaacccattttctcgagtaggtaaacctgcctgtgtccaagtgtttgcgaaaataggaattcttcaatcggataacacaaccacgagcaaaaagatttttttgcaggagaacgtgttatgctgcccatatgaaaaagaatttcggcgaaaaaaattccaaaaaccaaaccctagcccccaacccagaaaaccctagccacccccaccgccgccaccaaaaatacattgccgcacggtggtgtaggcgcccatgccgtcttcgagctcccctgcgccggatccaccatctttgaggtcatagtcatcggatccgcgtcgttgaggccgttgctgccacccgctcgtggtccctatcgttggatccgccgtcgatgaggtcaccgctagcaaaaagtcgttttttaagtagtcgatgcctcttaatatcatcttgacttgaggcaatgtaaataaaacatataggagtaacttccttcagctatgtaccttgctctaaataatgtcaggccttattcgttttgaaggattcttaaaggaaatctcaatccctttggaataagcactattcatgcattcggtttgtaggattcaaagaaaaattttccataggaacattatgccaatcctctaaaaaacctccaaaatgtactaattccataggaatgaaaacatccactccattctcttttgtttagctcattgtagaaaaaattcctgtgttctaatcctttattttacacgtgtatttctatattatttctacgtttttcctataccttgaaccgaataggccctcagtatgtgtgtctcttcaaaacaagttgcctgcctagctactaacgtttgcagcctaaaattggtcgccagtacagtgaccacttaagcgcacctaatatgtcagcttgttcgatccttatcctgttagtatttgtgattcattcgctcatttctccataataattgaagtgcagactacacttcatcctcccgttcttggttagttaggcttgcatatattactttatattgatttgctagagtttgtatcgaatacatatgatctgtttatatatcttgtccttcacttattatgttcgagtttttatagctgtttggtttgcacgcacgtcctgaagccacatgttctaatgtgtatcttaacgatgatgacactagtggtaaaaagttaattagttggtttcactctcaatgcatgcggaatgtgtgccccaacaggaagattcatcttgtatccttgtttggcgttacgtgggccgaattgttctgttgtcttcttttttcaaagataaactagctgattgccatcctttcttcttacgtggtgtcacctggaccctttttttttccttaaaaaaaagataaagtactccagattgtccagtgcaattttgcacggagttaatctgttttcactagaagcaacctacagatccaatgtaacttatgggtattccgaatacccataaactttagacataaacctagcatacatagggtatactagtaatacatacctccatatcctagctagatttaatatctatacctctaacaacccaactttatccccttctagctatcctctgtccaaaagatcgagcaacgggctctccctagtccctcccagtttggcaccattcatgctaatttggttagctcactcgcttattggcttcagcaattgatgagcaattagttaagactagtatatatctctgaatgttgtatattcttctatttcctctgtgcatatagcaatagagcttggttgtagctagcttcacccacctagttgtttttctctccattttgttatgtaattgatgccaattatcttaaagaagaagatccattcaattgccagtagtttctttgtggttgcaagtttttttcttcgtcaacacaagaagttaaaatatccttgctacataaagttgtcaaccagtgcaatataatctcccaaaagtctgattgtttggtactcttgacaccttaaattaacatgcagagctcctaccaaattttcttttttaaaaaatggtttgatgccaattataacaagtcatcaaattccttcttttaatatatatatacgcacatgttgcgatatgagtggtgtaattaagaaaatggtgtgtatcaataccatcgacatattgtatcgatatcactatatctaagcaagctactatagtagtttacaaatccgaatgcctccctaagaagatgaatctacacaagaaggagattgtgcaaacccgttttcggcgattcttgtgtagaatccccaaagatgaatctacacaagaatccgaatgcatcgagcaacactatgggcccagcctctacacattttattgacataaaagcttctacacatcgaggataggattgtagtttcttcttgcaaagaaatcctctcttcctcccttctatccatatgatttgttcatgtaaagaattctgtacttgattatctttcaaccaaaattcaggtggggaaacccttaatttcttaaagaagaaaacccgaatatcctataaatcctagctctaccactggttgggcctcaagccagcccatttgtcacccagcatcgcggcctaatttatatggcccagaaccgtgacattgattttgactgttgacatttttacacctatccatttgtgctttgttttggacgtctatgaaatgcaccgtttgaaaattctacaagatgacttgttggcattgaaagaggccaatagtgatatggtgatgttgtataccattgcttgtcatggtgatacaagagaatataggctgtcctatttatgaccttcgaactaatgtcagtaaaaacgaggccataacttctctaatacattactgcacatttgctgcacccaactgtttttttgggtcatggccatttgacaaatcctcatatgccagagtataccagcatttagccaatttatgggaagagctcacatatggaaaaatcaggtgaaaccggtatgttagtaatagtaaattagtaatacacaaccaaagctcttataagcatgcttaaaatagcttatagaggagtatttttttcacaaaaaaaaaacggaactcatattttgtgacacatagaagataaagtattttaggacccttgtcgcatttccaagatggactgtgaacttccttcctttcctttgtactctctgtgaatttgtcatcttaactcctaagttatcactctcgcattgcttattatccataatctgctataccagaatagcaagctttaatgtcctacaagataatggcgttgcattgcctctattgtccaatcaacaattccatggcaagaatgcattaaaataataggcatagatgggctaccagctggagtagttacatcttttcctttatattgtatatcatggaacataaactctactgttgtgtggtactattgccattgtggcccttagaagaagaggtgaagagatgtctggaaaagggaagaggcgaagtgctagattactgaagcttgaagagcagaagaacgatgacactactgccactggttgtctcctagatccttggcagataatccgaaacagcattgctggtgttcgagggaagagaaaaaggaatgaagaaatccaggtaattgtctgtctaggtagtcattaggtaccctgatgaactctcatcaaccttgccgttctcatctcatcttgatctgtatgttctttcagcatttgcagggagaagcttcttctagccaagcactgtgtgcaacaaccgatatcagtaagaatatttgtttctttttgttgtctcgatgtggtgttgcttgtgcaaatctgaatttctgtaagagagagagaaagcagcatatctgaattctgccgcttcgtctttcagataatttgtcaagcaaaagttcagcagtacaaatcattgagtacattcttgatacactagagatgtaagtttgaactatcgtgttcttttggcttccacatcaatcggagcacagattttgtatgatgactgatgttaaggatatatatatatgcttatattatcttatcttttcctctgttgcaggagagacactcatgagttatttgcaatgcctgatgacatccaagtaagccatggaggaatatatcaaaaaatatttaagttcatgttaaagaatgataatacgctgtttgttctctcatgaaaaaaaacattaacaaatcacttatttcttggtttcatgtgctgatgtactatgtgttattatcttatagaaagataatttaacatgttaacgcaggtaactgattatgcagaacgggtgaacaggcccggtgactttgcaacattaaggcagaagaacaaggatggcatgtacaacacactggagcaattcgaggtccacctcgttgctcatttcccaaatcatcctctcttctgaacatataaagctgaatattatcagttttatcggcttcctgaaattcatatgcaactgcagaatgatgtttacatggtgttccagaaagcaatgtccataaacagcgaggacactataccttacagagaggtcggttgtatcaaaacttagatagtacggagtatatcacaatcacatcatagatgtatcatgtatcaaaactttgatgataataagctcactaattcgcatggacgttttctttgtttcctctcttttgcaggcaatgtcactgctacatcaagccaagcaggtattcctgtccctgaagagcaaccagatgtactcggagtcagagctcgcagcgtggcgccagaaaaatctggtgagccagtcgccggccaagctaaacgggaaattcgatggcagcaaagtaggctccggctccggcgccggcggcgccgctccgaccacaccacagcggccgagcgcgccggcgaggaagaagatcgccgccaaaaccggcgctgtcgccgccgccacctcggttaagagcacaacgaggcagcgggcagcgagggagagcaacggtgcgccgggaagaagagcaagaaaaggtaagcgagctgttcattgagtgtttcatccgccgtgatgtgatcgagacgccttacatttggagctgcagctgcatcggtgacgccggggacggcggagcacggtggcgccggcgccagcgccaccgtggagcagagacggttagcctacgccgacgaggctgatcacggcggctggcggccagtgcccgtcgtctccactggccagcacgccactctcgtttacgtaagcccggcctactgtatcgagagattagaatccatctccagcagcctagcaatgttccattctttgaactgaactgaagtgaagctggcttggcgccgtttttcttttttttttcagcggccgcagacggcggcgcacacgtaccaggatagcctccggcgattcgtccggcacgccgggcttaaggcgcgcgtcgccgccgagttcaggaacctcgagtgcgacgtacgggccaggcaggcccgcccggcgccgggctactgccgaactgtggtttcgcttccagctccggcgccggcacggccagcaggtcgttcctcccgcaacggccgctgcccgccgccgtctcctccgagcgcggcgttcggaggcggcggcgctgccgctgcatcatctgccgacgctgccggcaacaaggcgccaccgcggtgcaggctgaagacggacgaggtgctcaagctcctcgtgctgatcggcaggccggcgttcatggagagagccaggagagtgctcggccatgagcgccaggagagcagctcaaagcagggacacgatcagaaaccagctgtgaccagagccggtgacgacgacggcggcgcgaaggccggcgtaacggcggccaagccagggaagaagaagggcagtgccagcaagccagccgccgtcgagttcgggccattcgcgccgcccaagctggtcatccccggccggcagctgggcttcagccagttcgccggctcgtcctcccaaccgttcaaagtgacgcctaccactccaaatgttcctgacaagaagaagaagaaacgaggttgaaccaaacaagctgcagcttgctgctccaaccacatcagcttattaccaattctttagtcctgttgggaagaatggcacaataatcttgattcacttcacccttattatgcgtttatatgtaaactggaggatgactactacctctcgttttcgacttttcaaagttaaacaagaccaactccaaaattcatacgtagctcatgtagtacagtgatagacaagaccagcattaacatgcacatctgatgatgtctccttgaacattaacatggagcttatttatagcttaaaactcttcctaacaccatcgctcttaaagcgttgcacggcagtaagccccacctacagggtaagctttctgcattagctaacctcgagagaccggaccatcagacgaagagtaacagttgcatcggtattaacttttccagttatccttggtcttcctaacttctcgcagggcctcaactggcgacttggcaccaaactttgcctgcaagatcgatggcattatctgcataagcatcaccggcaaaggaactatcttcgaaattaagaattgatagttgttgattcttgtcagtaagaccgcaagtttctaaacaatattagctttatcttgctgtcaacctccatggacgcaaagatttttccaacacagccacaaagaaacatagcatcatgttgaacagatgtaactaataagtggattagaacctgtatttctggcagatcaacacgcatgaaggtgtttgtctcaaattcctctcctatagttgatggaatagttggttggtttgcttcacgctgcttttgagcccattctagtttctgcttcactttttcgttatctggctcgaccgtcagtatgaatttcaggttcttcacagtgtactgtaagtcataataagactagtaagaataaagtatggctgttaccttttttttttcttttgaatgacaagaaccataccatgataagtagaagtacataacaaagggcaaccaaaaatttccttggttgcacacataaactaatggcaatcacgttatcctccatttatgaagaactgacagcatgaacttatttttccttaatgcagaaggccagaccacattcttttttttgccagaaaagaacacgttagttattatccttcagttaaggctgcacatactagcctcatctagtttgtaatctagattcaaagcttccagcatctttaataatggaggtttatggacaggtccaaattaaagtaagaaaatagcatggaacatgaagtagaagccaaagggataaaacatcagttgtcaacacaaatcacgaggaagaaggaaaaaaataaggcaaggcacacagcatacatatcctacatatttcactacagattcacatccctcaaaaatggaggaagagcaaagaagcaaatgggggaaatagaaaatgtacctcatgcccgcagtaaacttgagttggcttaggcagcgagcccagtgttacacaaagggattggtacatttgctctgcagtgccctcaaaaaatctcccacaaccagcaatgaactataccaaaaaggaaggtcgatatgttaaatagaaaaggagccatcactgtaagtcagatgcatatactaaccaaggtgtctccagtaaacactgctggatcttcctcctctttactagtgacgtaatagctgatatgtccttttgtgtggctgttagaagaagggaaatgaaaggactatgagatttaagtaatcaacaagctgttacagaaacatataaaaggttgactagactgtacaaccaatgcactacagcaatattgtttaagtctttgtgctatcaactatcgcttagttgcatgcgaagtccttgaacataaatgtttcataaacttctcaattggcaaatctgcaggatgggttattatagtgagtacaagtggaaacatgttggatttgcctatctgttattgtagaggtttaaatcctgatcttcagtgcttctatgattccatcgaagtaatcacactgatgataccataaatgaaatgtgacttataaagaaaacagcataccacggtgtgtgcaggcatagtatctcaatgtccttcccaagggacaatttggttccattctccacctgatcagtgcatcctttcacattgtccagggatcctccatagaccttaatccctggcactgactgcgccatcttttcattgccaccagcatgatccctacaaccacaaccacggattagttgggcttttcaattaccacttctctacatcgttgctaatgaattcagcaaaatctggcaaataatattctatgcatagaatgcacctgagagtaatcctaaaaaaaatcaatccttttaatgtatttgtgtttattttatcatatggtgcaaagcacttcctcagccgcatgctcagacaccgtatttctcaatttattataaaatcctaatgcaataaatcccaatctgcaactaactaaaatcactcactttctggtggtaggtgattggtccctgagggtgggattggggaaaattttggcacagcactgattgcatcccataggaaactctggaaggccaacatttgggcggaatttttccataactaaactagaaggaggactaggacgctcaccagtgatggtgggtggtgagtacgcagtcgatgcggacgccgacctccgcggccgccgcaagcaccttctccggctccacggggtcgacggccgccgccgacttggtgctctcgtccacgattcttcaagaacaaaacgaaggataatcaagaaagagccaagaaacaagaaccgaacatacagacaactgacaaggatggattcaggagggtacaggtaggcatagttgtcctccaggcaagcgaccgggatgatcttcatctgcttcctacgcggagagatttggattgggcttatggtctcttggcgagatttctggagccaacaccgagtcgcgacgaagatgagcaggtgtaaacgggaggattggtgtgtgtggaaggtttaagaaaggggaaaacaggaaaacgcagccgcttaacgtagaaaacggccagccgcttaggataggctgacaagggaaaaagattgcttagccggcacccggcagctcatatctccgttccaaaatataacgatttttagctacgaatttatatatgcatttatctagatttatagttaaaagttattatattttagaacagagagagtatatcactagatttttaaatattggtatcatcttatattacttgatacctacatatataaatttgatatctactccctcaataaaaaaatgtaagccggcacctggcagctcatatcactggattcttaaatattggtatctacttatattacctgatacctacatatataaatttgatatctactcctcatatcccaaaaacaaatctataactagctgtctagatactacacattttagtacaacgaatctggatagatatattttcagattcatagtgttagggtgtgtcacatccagtacaggttagttttttatagtaaagagagagtacatagtatctaagggcaatcacaatcagtagcgtaactaggatgtaaagtaaaggttgtccatctatatgtactgtgtcaattaaaaaggtggttcactgtataatttttattatattaactagtacatataggttgtgtttagttcacgtcaaaattggaacgatgtgatggaaaagttaaaaatttatgtgtgtagaaagttttgatgtgatggaaaagttggaagtttgaaaaaaaaattggagctaaacaagaccatactatagttttaaatttttagtccatggaccacagtgccacctagctagctacgccactgactacaatatggttcaaaagcaggtagtaagtaatgaatgcattcttattaataagatataagcattgtggaaggaggtaacaacaactactggttgtagtgctactatcgcgagtagcaatcatagcaagcaaataaaaaaacaatagctttacactgcagatgaggaagatagcaattctactagataggaaatatttttttttcttgatggacctcatcttattctccatggcaggcaagaaacactgtgccctctgtaatgcactacctcctgttgcttgtgctcatactaataccaagttgggtgaggatgcctaaacactaacaggtaccagatctggcatctaccaggtattatctgagaccaacagatatcaggtttggtattgtacagatatcaaatctggtaccgcacatgtatcgttggatcctctgttctcaaagctgcttttgccaaaccccttcgtgtagcttgtcgtcaccgccatcgttgagtccctttgagaaaggtaattctaggacactgggagaatgaaaaagatttttcctaaaaaaccgtcaaataaatagaaaaagaaggtgattcatcttacaaattcgcttgattgggcctgacctctgctgccaagtcaacaaccttgtccaccaccatgaaatatcatgtgcgacacctgcttccccaacctccgtgagctctgctactgagcatcaccatggtcgctagcacgcaaggacatacaatcatcgctacctcaagtgtggccatggagaccgtgagcagagagatctaacacaagacaaggctactccgacgagaccgtcatagctgcccacgtccatgctttcgacctcatcctccatgctctggatctcatccaggagcttctcatccatcaccaccactaataacaaaacttactagtagcacataagataatttgctactatattccccttccagtcctctacaatcaactacctactcttgcatacccaaaatccaaaatctctcaatcctcaatccaaatcccaaactacgtaccaagctcgtctcgttagctagtggaagaaggctaattaatcaataagcttagcatattggaggaatcaggaggaaggcaagttggctatcgagtgaatggaagagaagaagaaaaaggcaagctaagccatgaaaaataaagaaatctaattcaatggagctagccaggaggtatttgaggatcagtcgggaagctatctctttgcccaaatcaccgttgccaccgcccacatcgactctgacaactccgcgcgacgtgtgctccaggtgcctcgtccatgcgtgcgctcatatgtctcattgtgcgaggatatcggtacataacatttccttttttaaaagtaattacactataattgggatgtaatttatattaaacttatatataattgatagcatagtgcgtgtggctggttggctagctagcggatgatcttcttttcgagctatttttgttatgtgaagcatattccaaacgaaaattgcgaaaaatatagagaagttattcatatttacaataacaatgacacacactgctattcttttttttcgagataatcacataaagagggtcatataaatattattaagattgagaaaaaaaattaaaaaaaggataaaatactatcgataatgttggttatgtaccgaagtgcacgtctagataccatgcatgaaccctacaaacatatgcaagatagtgaagcctagcaccaaaacaataaccactatacgtgaccgttcgtcgctaagcggagactcccaaaagaaaggcttggttcagtctgtcgaatatatggattacaataagcataacttgaaatgttgatgatatgctagctgcagcgcatacccatggtggcaatggtgcaagaagtactaataatgaactagccctttttttcacacgaagaataattcaccaatctttatttattcgcatgcagagttaatttacagcacgaaccgtgctaccaaagaccaacaaggcttactgcacacagtcaccgtcatttattccactaccataatatatacacatgacatgtcactcttttaacagagctcgatcagacactgcagcctgcaaccacctccaatgagatggacagtgaaagcactcctcatgcgtctgagcctgcaacggagggtgggaagacccctctcccgggctggcgatcagcaaccgatccgtgccgagttagcaactacatgcagcgaaacatcacatccattatattagcatttttttagaaaaaatattattttaataaaaacttgtaaaaccacaaatttagcaccatgtcgaacacatgacacatggtgtaaggtagggttgttgtgcagtaaaaaaaagtgatatcacatgatccatgagctatgactaataggaaagcaagcaactgtactatagg

SEQ ID NO: 6084 - DNA, 6251 bp, Oryza sativa
attacttgactaatcttttgctcctgttttgcagacaacagagtcctcccctctcatcaaagtaacaatggcaagaacatcgaatatgctttaggtctaattccgaatggatgtggattatctcccctgttatcggctaccatgcccccaagacttcaactctccttcacagcctaaccagggaaccagccgatgcaggcaagaaaagaaaaaccagatcatcggccgtgagtaccttggccttagctccaaagaaaaaggccaaattcaagaaaactaagtcgactgataagccggctgatgatctacccgccttggatccatctattgaacaagctttagatgaagaggaaattggtgaagatgttgaccaggctgtagccgaaatgagtgacacagaaaaaacaccatcggcttcacccaagcaaacgcctccaactccttctgcccccgttcattttacaagagtaagtatctctctttgacttcttctaaaattacttccctcttcggctaattactgatagactttgtggatgcagaaaaagaaaactgctgtgaagaaaagccagcagcaacgattgccaagtcggctccaccagtaaaatgtttttaattcttttacttaatcaaactcaaccagctctatataacacttgtctattctacagcctcctcctgcttctcctcctgtacagcaaccgtcaagtgaccagactccatcggctgtggggagtcatcacatcgaggaggaagaacaaccagttgctcctgctatcccagtaagttttcctttgtctcaacaatctgatcggctacattttacccagctcttactctttctgaaattgtctctgcaggttctagccgatctcttctcttttgacatcagggattaccttaatgaagcagaagaagatacttcaagcaaagctctagctcccctatatgatgacgtgagaagaacacttgaagatatctctcatcggctagaagcctcctctttagataacttggtagttgactgtggatcaattaggtcacggctgcatgaagttcaagctctgattctcgaagatttggccgatgtcctaactccagccgcttatctcgagcaacatcagttcaagctggaaaaagccaagctaagactagccgaacgccgtgagcgcaaagagattgaggccacaatccaagctaatcggcagcttgtgcatgaagaaaaaaccacacttgatcagctatctgaaggtccgatcaaatccaatattgatcggctcgaagctcgcaagattgagctcttggcacaacttgaagaatgcaatgccgagctagatatggaacacaaaaagctagccgatctcccaaaatcaattgaagaacaaaaagtaaggctcaatcggctatcaagaatgttgctgacctaaccaagtccctgaaagtcatctctagaactgatgctcaagatgcctaagctattgaagaagtagaacaaattaggcaaagggctattttggctatccagcgatacttgtctcaataacttttgtgtaataggacttagaaatttttgtaatcggctataacgttctagtactttgttatcttgacaatccttttcgccgattaatatgacttcgaaattcgctaaaaaaatttgcctcaaaaaattttcattgcattttgatatatatgtgcccccctaattttacaatgtcaaaagcattgataaaattataaaacaactaagggtgatataacaatatcggccattgtacatcggcaaaccacaaccgattacaccatggaaaacaactaagggcgatataaccatatcggccatctcaaggcggtgtaaactcatcggctgtcatgcatcggcaatgctagccgatcatgcgttaacccaaacacttgggtaatatttctttgaatatttgccattgagcgctcgcccatagacttcaccatcaagcccttgcaacatatatgctcccttagacacaaccttataaatttggaacggtccttcccaattcggcgaccacttgccgaatttactatcacgagtaccaatcgtcaaaatcaatttccatacaagttctccttccgaaaaatctttaggtaccactttcttattataatgccgagcaacatgttccttatccttggtaacctttgcaagggctcgcaatcatgactgaaccagatcctccttctcatcggccataaggttgtaatactcatcagttgttaaatcgttttgtaattccgttcttcgagagccgattctaacctcccacggcaaaacagcctcatgcccataaacatgtttgtaaggagggacttggattgacccatgacaagccatcctataagaccacaatgtttcggccaaccgagtatgccattgccgaggataatcagaaattttccgcttaatcaatttgatcaaacttttattagacgcctcggtttgcccattaccttgtgcataataaggtgaagaattcaacaatttgatacccatgctatcggcaaactgaacaaactcgtcagacacgaagattgaaccctgatcagttgtaatagtttgaggaataccaaatcggtagattatatgttcttgaacgaacactgatgcacatcatacctccaatcatcggctgtcattgctgcaatttcaactttaacatctttgatcatcggcttataccccgatgccccatgggccaaatcattagcttcaatattttgttctcgagagacatgctttaaagtaaccagccgaaactccttctttagttcttggcacttctcattataaaccatcaatgtatcattcttgcattcatactctcctgccaattgactgattactagcagagaatcccccatgatttcaatggtttcggcttcaactttcttgagtaattgcaaccctttgagcactgcttcatactcagcttgattattagtcgcatacggtttaatagtataagcaaactcgaaataagcccccctaggggaaattataaccagaccgataccacaaccatgagtacacaccgatccatcaaagaataaagtccatggcactatttcaaccgagccgattgaatcatcacgatgttccacaataaaatcggctatagcttgtcccttaatcgccttcagcgactcataccgatgatcaaactcggttaaggaaaatatccactttccaacccttcctttcaatattggagccgatagcatgtacttgacaacgtcggctttgcatataacagtacactcgttggatagtagataatgcctcaaccttgtacacgaaaaatatagacataagcataacttctccacaggggagtaccaagtttcagcattcaagagccgacgactgagatagaatacaactcgttccttcccttccaactcctgaatcaagactaagccgattgacttctcaccggccgataaatataacctaaacggtattcctttctgtggaggaatcaaaataggaggagagctaagatattccttaatattatccaaagcattttgctactctgcccccccccccccccacaaaaagtaaaaaaaaaactctgctgatcggttttcaatctcaacaatggtgtaaaaggttctaatcttctagacaaattagaaataaatcttctgacaaaatttatcttgccgatcatctcttgtaattctgtcttattctccggaggctgaatcttcttgatcgcattaacactcctttgagttacctcgatccctctttcatgaacaagaaatcccaaaactggccagccgatacaccaaaagcacattttgtcgggttcatcttcaggccatattttctggttctctcgaaaaccttcctcaaatcggctatatggtcctctatttctttagacttaacaaccacatcatcgatgtagacttcaaccaaccagccgattaaatcatgatatatgtaattcatggctctttgatatgtagctccagcactcttcaagccgaaagtcatgacaacccattcaaataagccgattgcaccagggcatctaaaagctgtcttatgcatatcttcttcagtcataaagatttgattatatcctgcgtttccatctataaaactcaaaattttgttccctgatgcagcatcaaccagctgatcggctactggcattgggtattcgtccttcggtgtagctttattcagatctcggaaatcaatgcacaccctgaccttgccattcttcttaataactggaactatactagaaacccattcagcgtatcagcaaggacgaataaaaccagcatcatacaatcatttaatctcagccttaaccggttcaagcatatcggctttacatctcctcggaggttgctggcgtggtctaacccctggtttgataggtagccgatgttcaacaatcgatcggctgagtccaggcatctcataatattcccaagcgaagcaatctctaaactcttttaagtgctctatcagcttggttctaaactctagagataagttcttactaataaatgtcggccttggccgatcgcctggacctatgtctatttcttccaaatcatcggccgacatgaaaccttgaccttgcttgtcattgagatcatctactgtatccttattgtagacatttgaaccctccacgacgccctcaaaataatagcttgggttctccatcttcaattggctatatatcagaatcggacacttttagaaaatctccatcccagacttttccagataaacaatcaaggccatccatctcccaaagagttaaattggcactggcaacattactgacctgtcggctggcacgatctctatcttgtcgccttgccattgaatcaaacattgatgcatagttgaaggaatgcaacaattagcatgaatccaatcccttccaagcaacaagctgtaagaacccttcccatcgatgacaaaaaacgtagtaggaatagtcttactgccgactgtcagctccacattcagaacacctttggtttccgatggattaccaccaagtctttgagcaccatgtttgtcttgatgagatcctcggcatttctacccaacttcctgaatgtagcataaggcatcaaatttaccgcggccccaccatcaaccatcattttagacatcggcttcccattgacgtagccgtttatatacaatggtttaagatgccgattctctgtcccctcgggtttctcgaacactgcctgttctggtgatagaaccaacttagccgattcctcttccacctcgttgacatcggcttgatcgatcccgaattcggctagcaaggtaaagaccatgttgaccggtgctgtcacaacactcttcccttttgccaacctcttcacctcatcggctgcaacatcatcggctacaggaacctgattcttaacacgccactcctgccttggctttgctttcctcagccgatgattaatttcttgttcaacctcctgaaggcgctccctgttcctcaatctttgaacccttatcttctgattcttcgtgaaaataccagaaggacaccattgattcttcctgattacattgtcctcttggccatgatcttgattcactggacccaatcattgatgaacagaaactcttgtctgccttagccgattacccctattatatgatcggcttgagctctcgacgatatctctgcacccagggcagttttcaatagatggcaacctcgtaccttcattccagcagaatctaaagaactcacaaccccaatgaggatcaaaaccatcttcgtattcttcatgatgcctctcctactgcttgtcatacttcctctgatatttgtcgataatcttagccgaattcgcttgaaaaccccttgcacggaccctatcggctgtttggctagctgaatgcaccatattaacaggaaaagggttaccatcgaccttcatcggctttttggaatcatcaaacctaatcttgcctccctcaatggccacctgaatctgctgtctaaaaaccttgcaatcgttagtagaatgagatccagaattatgccatttgcaatacctctttttgcctaattcctcagccgatgggattgtatgactagtaggaagttgaatttgcttctctcggagtagcagatcaaagatcttgtcagctttagtaatatcaaagtcatacttctcttcttttccagaacttt

SEQ ID NO: 6085 - DNA, 17072 bp, Oryza sativa
ggctgccgatacaagcttccagtctcttttggtttaagcccaaactgttccctcattacgtcagcaatcacatcggcccacggtcgttgccgagctgccccttgtgactactgttgcatgggctcgaactgaccgtattgagacgcaaactgaggttgagccaatccccctggctgatattgggcttgcggggaaggaggctgatattgataattcaagttacccccttggtaattatgaaggttcggctggatattgcgtaccaagtgctcaggaacaacttgaggcattactgtgccatctggctgtacgtggtgaaccagatgttctgggacatcttggcttaaaaattgttgtacaggctgaccaccaggcgttgcaaacccggccgatgcgcttattgaaccttggtgctggataggctgaacgatttgctgtcttaacggcgtctgctgaatcggctgcaggggctgctgccttggtggtgtttgttgaactggttgcatgacctgttgccgaattggttgtacaacctgctgaattgggagtgtctgttgaatcggctactgctgtattggatcaacaacaggttgagatggcagaaacatggcagcaacctgatcttgggtcagccgactcgtaacctgcccgccatgctgtggctgctctctcattaacaaccgagggttcatcggctggcctggcgccatcgctgatgaagcaggtaggggagttgatgtcggcgctgttggctgagttgttggtgcaacggagggaaccgcctgagtagatggctgaacatctgtaatcaaagaccgataatttgggaagacacctccgtgcaaataaaccgggcctgcagcctgatgctcagctattgaaccatcggctattgacttcatcatgtttgataaggtattgactaacaccccagactgattgatcaaagcatgatgcacagcgtaatcaacctgatcttggaagttattgaaaaaatcctgtgccacatcactattctgattaagatttcctccctgcagcccctgagcaccgtcaccttgaactccatgcaccccgtcaccttgtactccatggactccttgagaattgtcgccttgatttcctagagagccgtcggtagcacctttgatactcggctgagccgagccgtctggagcttgtttcccatctccatccttagaagaactggtcccaggatcatcagcaaccacttttattttgtacttctgaacaagtgtccccttgcgggtctgcatgaatgatttcaagaactgatcccgtgcttgctgcaatattgcttcaaactctttcttctgctcaggtgtgaatttttctggatcgatcggcacgacgtttccttcattgacgtcagtcaatcctaacttcagcatcttgtccttaacagagcatgggctagatggtggtggtggttgtttcttggccatgaggaagaattgttggctgacttctcaaatgtcccaccaggcgtgccaaaagagtgtgccaaaagagaagagaggctaaatcaatcaaaaccatttggatagataaaataaatcaattttttataggtgagtgagtcgtcatatccgatttaggttgagggaggaaaatcggagtcagggcatctgttgacagaaaacacgaggcctgggagatctgcttaactccagtgcaggtccaaagctcgccttggggtgtgctagcgtgccagttgatttgatcctgtaatcaataagaaatagaagcaaagaaacctcggttaaatctataaatgatagccgatcggctaggcgccgatgacatatcatttatctttgagccgatgtcatatgtgaatcgatcggcagttgtaaatagacaataaagaactaaatctattcgatcggctgtagatatttccaatatatagttcttatatcgatatatacttaaatcaagtgattgggatagatcggtcgccatgccgagacagtataaatcacttagatcgaaatatatattactaacaggactatatatgtttatagcatagccgatcagatagatctagcatgtatcggctaatactccgatactactctatcaggatattaaaacaggtataatatatcaaacaaaggcctaatatacttagatacagcaatatcttggcataaagggcagatttaacatgtcaatgaagcatatagagcaaatatagttaaatcggataagatcggctgaaacttcgatgctaccctaatcggcaaccagaaggcaggctagagattgatattctaagcacgacttaatagatcaaactcaactgatgcagcattaagtatgaaaagaagaacaatatctagacaatcaagccgctggaagtttcatagagtggtagatatcttatataatctaaatcaacgtcaaaatctaacctaatcagctgccctcttcgatagatgttagtcgattgtaggttagatagcgatattaccagagattatgtaagatatatgataactctacgaattacataaacaagattagagtgtcataaagatagaagcactaatcctgagaatacaagccgtcataacaagttttgcctcttgttgaagatcaaaaccgatgcaactcaacccgaaagcaagaactcgttgaaacagaactaaagcaaaagggtggcggtgcgccgaaattgtattgaacatgtgtgttcgaagttatatagggctcgggtctatttatacccgagaattacaagatatgtccataacggatacaactactatctctaacaaactctaagataccatacgtctttgcggcagacttttgcccaagcgtatctctaaggagatcacataaaacatcctaattaatagatacaattgccttctcaggactctatccatgtgcggcaatcaccttgaagcgcctcaattcaacctgatatctcattcatcaagttgcattgtcggaatcggctacaccggcttacctagtccgactcagacccagccaatcctaatcgtagccgatctggtctccagccgattcctgctctgttttcgaactcgatctccgcctccgactttgcttcgatctaatcttctttcctgacgccgatgttatcaaatttggttgttaacagcatcgtaaagggaagcataataattatttttttcttaggattttgttgcaattttttgggcctgacaaatccagctcacagattttcattggatggaagggataagtttattttaggtctctcaaatttgtcgtaaagtctgaaattcgtctctaaacttgtggatgatgatcctgttttgtaaattgagggatccattctctagtatttcagtttggggacaaattttaggctcggcgatgaattttattccttggatggaacgggaattaaatttgaaaagatacattgttttttaatattttatgtttatatacatgcatgtaaaatatttgcacaaatatacctcctccgtatgatgggaacgcgggatcgaagcggtgccgcgctttcattctgtgggaccggcggtcgcgtagcacatccgtgtggcaccgctcgctccagcagcccaggagagcggcagcgtggtggagggcggctgcacgcggtgctgagacggtcgcacggcaccgatgcgcgggaccgatccggtcgcgcggcaccatggcgtgtggcaccgtcccgtcccgtcccgcgcgtgcacgtgtacatgtcgcggtcgacgcgcaccatgcaagcatcacctgtcaagcacgcatggtcgcatgcaggcagttgatccagtcaaaccctacaatacatagtcactagcttaagggatttattaaacctaattaattcgttattagcaaatgtttactgtagcaccacattgttaaatcatgaagtaattaggcttaaaagattcgtcgcgcaaattagtcacaatctatgtaattaattatttttttagcttatatttaatactttatgcatgtgttcaaacgtttgatgtaacatggtgaaaaattttagggcgggatttaaataggcctagggtgtgttcgctagtataggttcccaaccaggaatgcgcggaaaatggagtggtccattagcgcgtgattaattaagcattagctaaattttttaaaaatatattaatttaaattttttaagcaactttcgcataaaaactttttaaaaaacacaccgtttagctgtttgaaaagcgtgcgagtgaaaaatgagagagatgggttggaaaatggaggtgccgaacacacccctaagctagtgcctgggatttgactggatcaactgcctgcatgcgtgctcgacatgtgatgcttgcatggcgcgtcaaccgcgacacgcgcacacacgggacgggacggtgttgcgcgaccggcacggtcccgcgccatgatgtcgcgtgaccggatcggttccgtgcatcggtgccgtggaggcggtcacctcgaccgtgtgcagctgcctataccacgctgccgctctcccgggctgcgggagcgagcggtgccacacggctgtgctgcgcgactgccggttccgcagaatgaaagcgcggcactgtctcggtcccgcgtttccatcatacagagaaggtatatttgtgcgaatattttacatgcatgtatataaacgtaaaatattaaaaaacaatgtatattttcaaatttaattcgatggaacggtgggttgagcccaaactgtcttcgtccaactccaatccccaaattcctcgtctcctcgaatccggccgtctctcgtcgtcctccacagcgacgctgctcagccacgaccgagggtagaggggtggttcgcaagcggcgccgccgaccatggtgagagcttcgccttgccgccagaactctctggaggccacatcggtgacggtgccggcaccggcgaagcagccatcgccgtcgtgggggcacgaacacctggcaccgcgctggaatcgccgcgtcgttggacgggtggtcaaggggttctctgcagcccaaacacagcaacctctctgccacggcgccgcgccccaggggcttgccgccgttgccgcgcagtcaggcgcagagccaccaccgccaccgccgccgctgcccacggttgttgatgtcgccatagcgaggttcgccttcctcaccacccccatggccgtatccccaccccaccataccttatctgacgcctctgctacgctatcaccaggggaacaaagatgatctcgcgtcgctgccggatcggagaacatgctccgcctcaattgctggtgagtttccgctttccctctgccagaagcaacattccaatccatggatttgcatccaaagcctaaactaaaaacagctcactaagatttggtcgataaaccgatgaatatcaaagattgttgtaatatatttgccagtttactgcttgatttacgacaaatttaatttctgatctcactaaaaaaaaaactccatgttctagttcttctcattttctcagttaccttttagatgacagtgaacttctgcagaatataatgcccctttattttctagaactttacgcggtggcactccactatatcatgcatctcctacatgttaaccaagctcgctcacatgtcaacttaagttacatgacatatgtaaaatatgtgcatcatttacaacgatcatagtccattttctactggtaaatctttgagtgcatttctcatcatgttctggatgttcccaaattgttcaagaatgagtccgctgcctcaacttcttcgccaccggataggaacttcatgcacatcggtggttgcaccttgaacatgttgagcaacgctgatggcagtgtgaacagcccttctccacatatcaagcctgccgcaacggccgatgacagcatctctgcactttttgcattcattcttgtccaggcaagcagcaaaaggctccccacgcacatatcgatggtgaagtaggagccagcgaaaaacggcagcgcaatcaccgtcatgctggggatgtacctgtggatgctccaacccctcttctgagagaccagcacgacagcgtcaatgatgaccgtcacgcagaaggcaacgacacagaatgtcatgcagtgctttggcagctctttcacccctccagtgccgatcaccccgatggcgcggtatagacccgcgaaagggcatgggtaatcggactgctttgaacccaccggtgcgttgggcttcgttgtggactggaaggcaaggaagacgcatgggcagaggatggagccaacggccacgccgaagatctgtccggtgaccatggcgcgtggcgacgttagcgtcatgtggcccgacttgaggtcctgcatcgcttgcgacgagatgtggagtgccgccacgatcaccccgctcgcaaggaggctggccacgacagcgccaggcttggcgatccatgctgcaaagacgaaggtggtaaacttagcataggttggtgccaccgaccagtcggtgagccctgtcgcataggtgttgcagaaggtcacgactgggatgaccatgtaaagcacggccagatggtagaatttgatctggttgaacatggctgggattgcaatcgtgctgatggctgcacatgtgatataggctgccactggcacagggattgggatccggttagccaagaacacctcaatcctcttgcgatcatcatagttgaggcttgggtgtttcttgaaatagttggcaagccctaaatcatgctctttccttaattgatagaagttaattgatgctgtagtgatgagtgttagaaagtttatcatcccatcagtaatgatcagtgtcacactgatgaacacctgttatataagttatatccatagaaaaaaaaaagcttagaagagtatgtctcactagtgaaaaagtagctagcaaattgatcaagacagcaatatagcctacatcatcaaaagtgctgcaatgactatgcacatgtttggtagtagcaacagatacagctcatggtgaaattaaatttaaaggtgaaaagcttgattggaatctcaaaattcttagtcaagtgtaatatactaaacgaaatatatgatatgaagtatgtgctcagattgttaatgaatgcaatacctccctgatctgtattacatgaaagtgtatgtatgaattttctcctttcttctgcaatgatgccaacttttgaatttatgtattcttgatttttgatgcaataacactagttactataacataccatcaacaacaacatttgaatttatgtattcttgatttttgatgcaatgacactagttactataacataccatcaacaacaacaacaagaatgtacagtaccatgaaatttgcattggtagaatgataatgtgtaattttaaccccagtaaggtggtaagatacatatacttggtccaacttatagcaattacctagttttcatgcatgtcttttttccccttgtttgcaggtttgcaaccaactcacagatagaagagtggaagttgttgcatattaaaagaaagagcaattacacatatgttcgtatcatcgtacggtttgttcaacttaattggttattatgggtgtgagatgttggcatgcttggacaccttcagatgcattttagtagagtagctaaaataattggtgggaaaaatatgtctttgcattgattagtagcagaaaaggactgataaattttagacaacccttcagtagtatgcttcattttaatttttttcgtacataccttgtatccattttgtccattcaaacttgtagggctgtcagtttgataccattgcccacgtttagtttcaaggaaaggatatagaaatccccaagagatgatggccccaaaaaataatccaaaatttactatatgtggacaaatcattcccagaccaatatatgtcgcagagaaatcaaagtagaacctgtaggtacagcatatatatatatatatatgtgtgtgttagtacctcacttcgactgatatgcttatcctgtaaaatatattcaaacctgtacatggattgactaatcattgtcaaactcaattcctacaaatggcatcaattcaatgattccgtaatgcataagattcctatgaaccatcaatgaaatttggactgagttatttattccctaccctagcctatagtaaataaatcacattgatcaattcaatgttgccatttcataggacgtgtatgatctaattgtcattagccattttcatatttagtgtcatgtcttttatgaacatgacgatcttagacttatatatgtcaaataattctttttttatagaaatacatgacttgcatacacactattgagataattgtgtaataaactatttacacagttttctctataaccattcagatcttttgtgtatgataaattgataatatgttgatactcaaaaacattgattaatatatagtctataaaatgtcatctttctgtgaaggtgaggaggacacaactgtaacgcatgtaacatcgttctttagcagaattgaatatatttatcacctgtgtttgtataatcctagtccaaatgttggaaagtgctgaaatccacaatcatcgcctgcagtatagaaccactggaacatagaccaagaaaaactgccaaaaaatactttgaaaatggtcgcaacctgcattctggattacatgcaaatattagtgcacaaaatcatgaatatagttaaatgaaattcaatctgtcaattttttactaagaaaacaagacttcattactttgctacgtaagctccttcaggggtatgaaagctattaataagctgagctataactgttcctgttggaaatagtaatttgtagtcaataatcatgacctgcagtataaggaaatcaacttatgaattatgtttaaggatgagaataatgcaaaacaatcttagaaatgttaagtagaaacttctaaaattaaaaaaaaatgatcaatcagtgaaagaagaaacctggttaaatggcacatttattaacactcccgtcataccaacaaggaataggtatactatccattttccgattggtacatggtccataatatctcttggatctggatcatcagcaagtgatctggccaccgtagaagtcattccaatgatattggtcgcaaaaccacctaaaaaatgtaacaagaaaataggccagttaaactagaaagagatacaaaatgtaaaaaaaaaaaactggctacaaattatttgagtattttgttttgaaaaaagtattccaattttgggctcttaaataccttgtgtccaaaaggtttacttttaaatataagttatggaaggatttaattcgaagttaataaaaatggtttcaaaagataaaaacaattcttgataattcaatctctcctcccccttccaaaacctattttttaggcgcacaacttccccaaaagtttggttttataggtatgctactttctctactgaatgttttgttttttgatatatcaatattttttatttcaaaaggtattgtctgtataaatggatggacccaggtgaatatgcatttacaataaccacaataatcaatttcatatctcatatgacaaatctccaagttcaaatcacatcttttatgtctctttactaccttaattataaaatttctcttggttttagaggcatgaaattatcctgtggcagtaatcgaggaaatacagttactactggagattttaactacgtgagtgtgatcgtatggtaatagtcctctaaattttctccgtcttttctggcagcacccatgatattcaaaatagatggttaattatgactggaacttgctgatataataagcctagattaaatttcatactacctccgtcccataataattgtatttctaggattcaaatttgtcccaaaatagttgtgacaatagagtaataattgtcctaccaatcacttttcattctaccctcaaccatccttctagttttatctatatactatttaatgaggggtatcatagtcttttttctcaaaacttaatatatactaaacaatctagaattacaattattttgggatagtggtagtagttgtttccactgggctcctatgtggagtttagagtgagactagtactaactactaactgggtaaaaggttcatttatgtatggaacctttgtttaaaacataatatattatatatctacttcatatttactgttcttcattatttttgttggcaatagtgtttacgttttgtttatgtcattatttcctacggaaagttaaatctaactacctatagattcacttatcttctggccttcttatcaagctttttagtaatttccaaagttttgatttatgttgcccctccaggttattcaaataacttcttaagaaaagaatatttcacgtacttctgaggaatttattaatttatcttgtcattactcatgcatagataattgtattattgatgagaacaaagtcccaatacatttaaaaggagaaaaaagaaaatttttggttgcattttaatttgcacattttttgcaaatccaagttttgttagacaaacatcattcagaacagtttcatggaatattttaggaccaaaattttgttttgttgtccttagaccagagaagttttgattatccgatattttgaactctgtttttttaatctttctggcttttgcaacaagattttcatgttgggatggctgcttgagaacctggcagaagataaataatttcgatgaaccatgtaactcttgacaccctgaagaactactatggctaacactaatacttttaagctagattttcaaaactgcaactcaactagcagaatttaaagtagttaatacttaatagtcctgattgaactgccagaaaataaaatagtttctgttcttgtttcacatatcacaaagccacaactggttgaaggataactgtaaagaaacctactgttttgtcacctccccagtttagttgactgataacttgtaagatgaggtgatttgtatgaggtcgcatgctcaggtgctagttttatgtgccctttcagctgtacgctgtaagggagagagccacctgaggctggtgattgagtcagtctatctagtttttttttctttttctttcacaagtagtagcacagttgtaggcttttccatctaaatatataacatgtagtatttcctatacttgtgggagaagtatgttttcgcaatatttacccaggcatataatgctgatgcttacttgtgagggccaggttgaggcaggtgatgatgcaagtcaggaggaacatattttcctggcgtgtgaatggcagcatgggaaagccacaactctgtagcagcctgatgagccacttgaggaggaagaagctgaggatgctggcaggcatgttgagtgccggcactatcccggccgtcatctggatcctcatgccgacgaagcagatgacgacgctgagcaccaccgccacggccatggcccgtggcgtcaccagctccctgaattccggcgatggctgcttctcgaacaccgcctccaccgatgtcgctgacatgggatcgccgatcatcgcatccatggcgattaaagctccaggtcaatggaggcaacctcctggagggtttttgggttgtgttgtgatggcacaagtgggtggtctcctgggttggctctcctaggaacaatgcatgggttggtctgaattgggaggtggtgagggaatgtagtgtcgctgtggagcaaaaatagcgtctgtttgttgaaccgatttctctgattctgttccttatttctatattgatgaaacagatgctgctgagggcaacatacctaatgtttacagggtggaaacggttacaatgagtgtccagaaagtagttttaaccatttgctttaagatttgtacgaggtctatcaaaactatgctaggggttaaaatagaatagaaatttgaattagaattagaattgatggatgtgacatgtagaataccaataatttcgcactcttttgcacacacttcaaccattgatcaactcatatatgcttaagaacacatttgttaacgaggtttatagccaaagcataaatcttgacactctaattatggatgctactcctcaatcaatagtacacctaactgctataggcctatgacaatgctgccatcctcctcgtgagtgcctacattgcattttcgtcaccatgcatagttacattgtggtgtcctctatatttaaagagttgatacgttacaagagtcaaaagctaaccctaccctatcacctgtattaatacaacactttgcatagaaaaatatgctgagaaactcctgttgagtaccacaagcttttaagattttgtactgcattatgttagaaaacagtgaacatttgtggaatagtagtataattcatatttcaactacaactttattctgtggcacttaactataacaagcatctcttacatgttgcaaccaaagctggctcacatgtctacttatgtcaattacatgacatatatatatgtaaaatacgatacgtgcatcattatttacaatgatcaataatgattcatagaccacttaatttccaccgagatgtggtaaccaattaaggagtactaacagtcaatcttaatttgatgagtgcatatattaacttgatctcaacatcgatcggtcatgtcttgggtactgttcctcccgagctgttcaggaatgagtccaccacctcaacctcttgtccactgggcaagaacttcatgcacatcggcggtagcaccttgaacatgttgagcaacgccgatggcagcgtgaagagcccctcgccgcagatcaagcccgctgcgacggcggccgacaggatctcggcgctcatggtgtcgatcttcttccagaggagcagcagcaggccgcccaggcacatgtcgagggtgaagtacgacccggcgaagaacggcagcgcgatcaccgtcatgctcgggatgtagaggtggagcctccaccccttgagctgcgagaccagcaccagggcgtcgatggcgatggtcaccaggacggcgatgacgcagagctcgacgcagtactttgggaggcccttcacccctcccatgccgatgatgcagatggcgcggtacagcccggcgtaggggcacgggtagacggagtccttggaccccagcggcgccccgggcttcgccgccttctcgaacgcgcggaagatgcaggggctgaccacggagctgagcgccacgccgaacacctgcccggcgatcatggcgcgcggcgacgtcagcgtcatgtgcgccgacttgaggtcctgcatcgcctgcgacgagacgtgcagcgacgccatggtgatcccgctgacgaggaggctggcgacgatggcgcccggcctggcgatccacgccgcgaagatgaagggggagaacttggcgtaggtgttcgacaccgaccagtcggtgagccccgtcgcgtaggtgttgcagaagccgaccacgggtatggcgaggtagagcacgccgacgtggtagtacttgatctggtcgaacatggccggcatcgcgaccatgctgatggccgtccatgcgacgtaggccgccaccggcacgaacattgggatcttgctggacaagaacatctcgatccttttgcgttcgtcgtagttcatgctagggttcttgctgatgtagctggccagccctgacgtttgctgttgctgttgccttatatggtagaagttaattgcagctgaagtcacgagtatcagaaagtttatcaggccgtcagtgacgatcagtgtcacgctgatgaacacctgccatgtaagtttatatccattggagaaaaaaaaacaagaagtttagaatagttcgtgtcactagtgaaaaactaccaaaattaatatggctttcatccaccgcatgcatatatctggaaattatatcagaaggtttgttcaagttataaattggatacatggatcatgacaaaaattctaatatactaggtattactatacttgataccttcatatgcatttcaattagtactactcccccgtttcataatgtaagtttttctagcattgcgcatattcatatagatatgagcaatgctagaaagacttacattatgaaacggaggaagtagctattaatttgggggacaaaattctttccgtgcattggttagtacgtaccacaaaatgagtgagataaaatcttattagatgatccaacaattgatatgatcttattatttacgtatatatatctttattgtttctctgagttcctcagttttgaggcttggagtttaagaactctcgtaactttcggctatctgtggataaagaggtaggtcggatttttatccattatattaagaaaagaaatgtaccttgtatccattgagtccgtctaagtttgaagggctatcagtttgataccactccccatgtttagtttcaaggtaaggatatagaaatccccaagagatgatggccccgaaaagtaacccaaaattgactatatgtgggcacatcattcctacaccaatatatgttgcagagaaatcaatgtagaatctgtaggcacacacaatacaatatgttagtaattcagacgcttatatcctttaaaatatatttaaatttgtacatggatttactgagatctgcatcaattcctacaattagcagcaattcgatggttccataatccgtaagaccatcttccatcgatgaaatcaggactacattttttattgtctacccccctaaatctgcagaccagattgagcaatatattcagtctcacagtttcacatgacatgtatggcccaattgtctagctagctattctgaaaactccttgccacttttctctagttatcagcataataactatattggcattaaatattgtgaaattactaattgtttcttacatatttaatcatttctgttttggaaatggatacacaacttatatacaaattgttaagagaatttcgtgatacgctatatgtatagatatataattttctgtgtgaccgttctagatcatctgttgatgatactatgttgatactcaatcattgactaataccattattttaaaaaaggaatatagctatcacctgcgtttatatagttccagtccaaacgttggaaagcttgaaaatccacaaccactgcctgaagaatagaaccattggaatatagaccaagaaaaactaccaaaaaatactttgaaaatagtcataacctgcattctgttgacataaaaatattagtgcaaaaaatatgaatatgtagttaaatgaaattcagtgttttaattttcactaaaaagacaagacttcattactttgctatataagcaccttcaggagtgtgaaagctattaataaggtgtcctatgaccgatcctgttgggaatagtaattggtagtcgataatcatgatctacagtagaacgaaacaactcataaattatatttaagaatgagaataatgcaaaactattaagaatgataatatataaatacaaaactatactattagaaatggatatccctctcattgcattaagaatttagacatgcttgtaacatcactttacaggcctacatattaattaagtactaaatgagtaaaaatatagcaattaatagggaatgctaacttcatgtaacgtattgatgggtgtactgaccaaacaggactaaatgcatgttgaattttatagaaataactaagttaagttgattcagggggtgtttagatatatgggtgtaaagttttggcgtgtcacatcggatatacgaacacacatttgaagtattaaacgtagactaataacaaaacaaattacagattcctcctgtaaactacgagacgaatttattaagtctaattaatccgtcattagcaaatgtttactgtagcaccacattgtcaaatcatggagcaattaggcttaaaagatccgtctcgcaatttacacgcaatctgtgtaattagttatttttttcgtttatatttaatactccatgcatgtgtctaaacattcgatgtgacagtgaaaaattttgccagtggatcgccctcactaatatagcatataggatggaatacatagttgtaggcttgtaggatgtaactttgaccactaaaatatgtacatattttagttgttccaaactagatcagtaacgcacgaaaaacggagcagtccattagcatgtgattaattaagtattagcttttttttcaaaaatggattaatttgattttttttaagcaactttcatatagaaactttttgcaaaaaacgaaccgtttaatagtttgaaaagtgtgtgcgtggaaaacgagggagagaggttgggaaaaggggtgccgaacccaacctaacttccgtatagcttctcatactaagggggtatttgggaactatatttgggaactagagactaaatttagtccctctcacgaaagtacaagtccctatggtagggacttatgtttttgtgagagggactaaagtttagccccactttagtccctccaaccaaacaccacctaatgcatacatgaaaaaaaatatttacaccatgaaagaacatcagcaccactttttgattcttgccctgcttttacatgaaggctaagggtgtgtttgacaaggaggggattgaggagattgggaagataaacaaaacgaggtgagccattagcacatgattaattgagtattaattattttaaacttcaaaaatgcattaatatgattttttaaagcaactttcctatagaaattttttgcaaaaaacacaccgtttagtagttcgggaaacgtgcgcccggaaaacaaaactatctttctctcttcctcatgcgctcgaacgaagcctaagccatcatgtcagtaaatgcaactcgatgacaaaga

SEQ ID NO: 6086 - DNA, 120651 bp, Oryza sativa
gcatggaccaaaaaatttagggatccttctaaacgccgtcttacgggctccatggtcggaattgctctatccaagccgtggtaggttctcggacctcccctttaattatggataaattgaatatccaagtcatcgcacaagaaaatgaaatatccccgcctccagagagaaatatggagacattacgggcccttaagcctcccagtcaactcaagcatgatatgtgccggtcaatccactcgaagccggtgaccagatgtgttacccattcagaagacgtgacaaacatggctaaagatctacaacatctcaaatattgttaactcatactcatgtgaatctagttcccaggatgggcgttaggttcacactttcatctctagatgattatcacataccaacccataatatgataaaggcgtttatagcttacattcctattagttcacccgccggactggccaaataatcatatagagcacggaagccttgtcttcccaatcatcaagcaccccggcatgccgttcacaacagtaattgcaagacaaataacggtctgtcgtgcgttcagaatctggcgacggtcatgtgtcagtctggtgagcgcgacgtgcactgcgcagcgatagtcagcacccgagtatgactaatgatgtccccagattgataccatacatatctccatgaggccagaacaactagccacaacagatacaagaacattcattcacaactttgcaactgaaatacctgcagattgtttcctacagatcaagagaagaatgcaatgatggtaagaagaatataatgatattctgataagtcaatttctgatcaagttagcatagttgcacctaatttcccgtccttacgtcggtcattcagtttgaaagcctacataaataatcacactccatcttttgaacttgattgagagatttgagattgaactcgattggaaaagacttgagatccacttacaagtcaatgatatatggcttgttttggttgcgttgagcaagtcgagcaagcctttgtaatatcgttgataaaaagtttgccatgtgtagagaaaatgctacctcgttttgttcttcttgaaactatttagagaaaaacacagtaccagtgaaagaataatgtagtaagaattatatgaaccatattttttgcatgcttcaaaaagttattagcaaaatgcagacaacctcttgcatcatcaatatgcaaggaattcaaccatgttgacggaaccctgttcggttggtaacgttattgagttctggacaactccttggatctacaagtatatccttccagagcaactacattagccgtatgatgtctagggtgttcatttagcaaattgtgtaaaatcatcagttgtttcatcctgtcaacatatgattcaatactaggatgatatgtaacaaacacaactattgcttaatctctagagttcaccccataaggacatgtccttaagaattcaaggagatattcgaaatgcagtaaatacattggcccaaaccttacaggaaatatagtgtaaagacttgtataatccctagcacatgggcttgcatcaaatgacactgtagggccatgaagaaaaatcttgttctggccaataaaagttgtattaaagctcaactcttcacgatgcagtctagtaacatgcatcaacaccttttgaatattgtagaagatgaaatccaagaaaaaccgcatcatggggtgcaatgattccaacatcttaaatatctggatgtaatggaatagtacagtacaataatccatcactaacattgcatttttgatcgattgtcattggcatgcagcaaaacacaatgttatagacatatataaataaaggaaattaacatcagttttaaatagataatattcactgtccggctctttctcgataacgaatctcaataattaagttcagtgtaaagggtactccgacagtgatttatcataatctaaaaccttgccataacattgtataggtgtcttaagcattgactcctatcttttgacatgcagaattaactagagaatcaatctttgtattaaatacatccacttatacagatacactaacaccgcatgccttgacaaatagtgattggcagagaaataacggtttgctcctggttgagaatgtggtgactgtcatggaggcagttgttgcgtgcggctggcaccgtgctttgctgttgtacctccgtgtttgactaacgatgtcagtgaagcggatagattggttaagtctcaaaactctttatgtgcaaaggagaatggacagattggataagtctcaaaactctttatgtgcacaacttttccaactaccatccataataaataagtacattccaaaaaatgccattcaaagtaaaatgagcacacataatttgggttctttcccacaaaaaagtgtttaggacaaaaaaaaataacaaacggtaacgatatgcgagagcgtgccagtgtaactaaggacacaaaataaacagaaaacatagggaacatgtgctttattaatctcaaggatcataaatacaaattcccaatgtaatatatatgtatatatgtatgtgcgctccatagcctgtcgttggacaaatctaaacttggataagtggtcttctaattcctggggtctcgaaagactcctagttaattactgccacaggtttaggcctacagagcacctccgattaagctgcatgtggtcgtctcgtcgtcttcgcttcacgttctccatgcacgatgaatgttggtgaagattgtggatatatatctaggcgccggcaacgcatccgcggcctcatcggtccgtgcgccggtgttggtgatgtagccttcatataggctccgcccaccctcgtcgctccgcctcatcagtcttgagcaacgtggtggagtagatggattgatcttcaacatgcatagatctcgtgtcgcttggatcagcaacgacatcaggatggtgttaaagggaagaggagttggtcaagtcagttggtgtacacaacagccgaatatccatggctgggcacctcctgacttgatgggatcaaagtaacaaagagttgacgatgacagttggtgtagatggcagccggatatccatggctaagcacctcctgactcgtcatgtcccttatacaacagggacttgtaacgaagatgttgatgaagaagttggtgcagacaataaccgaacaaacgtggctttggcacctccttcggatgatgaatctactattgatccggttgatatgatgacgagcctgcaaaaggggctctatgagtgtgccgatagtaacggcgaccttggaagaagtaaatgcctcatcggcggaatagccgaggacattggttggtgtagatctaacacgaacggtacattggcatcacagacggcactattctttcttcatgttgatatagacgagcgacgctccaatacacaaacaagcggcggcatattgatctcgatgaagagggagagaatcacggacggacaacatctcatcttggcgtgatgaagagagagtgcatcatggacggacagcatcgatctcgccatgacgaagtggaagcgttgtagacagatggcatctcatcatgttactatagataaaaggagacacggacggacggcacgatgactctggcttgacgaggtgaaagcatcgcagatgaacttgacgacggtgtgcgggcaccaagcgatggtgctccggtgtgatgaagggatggcttcacagcatcacgaacggcttagcaaccccagcgtgacgatgcgggcaccgagcagctagcggcgcttcgattggcattctcgtcacgcggctcaacgacgagtgtgaggaagatggtaacaccaccgaagatggccggcggacgtcggcgatgagatcacagcaacgagtagtgtcatcaccagcgactcgactggatgatgtcgatcagatgattggcacggcgactccgacgagggcagcaccatggctccgagggcagtgcgacaatctccatcgcccaatgatgtgtttggttgatgtagacgcgggagacttggcgacgtttccgacgactccgacgagacctcctcagtcgggcacgactcgacgacattcacgatgccgtgacaacatgctccggcgaggtagcgcgacgaggtcattcggccggtcatgacgacgtagaaaaacggcggcttgcctcctggtcccacaaatgacacttccatgagacttggcaaactcgacgacggcgtgcgggcgccaactagcagtgctccagcatctcatcaccatcgccatctcatgcatgcatgaactgaaaaagaaaaatcaataagaaagccacaggatcattacccatggtacagaggttgttgatgcccatgatctgatgctgcctcttgttgtcggtgaggtctcctcccgtcgagctggtcccgcctggctactccgatgaggctgcgtctgcgccgcttgtgcaaatcgatcagatgaggaatagaagagctgcttttgatatcgatctctgcatatgtgtgtgttgatggtgagtgaattgctcgatggctgtgtcgttgaatgtgtgaggaatgtgtgtgaatattgctatgaatgaatgcggatgaagggttgctcgtcaatggatggatgtgtgtttctccccttggcctggcttgctttcgatgggttttataggcatagggtggcctaacgggtagacgcgcattctctggcgccgctacgaccgcgcgtcagatcgattcgatgcctctgggttcaattgctgtggattgccttcatttgaatcatccagataagaatgagtcatccgacgttatccccacagcagtagctcactcccgttggcgtgaatatccggctgcacatacacacgagcagcgcaactactggcaccagcccatatgcagcccagagctagtcccagcttgctgcttctttaagtccatgaaagatcatctattatacgtatacgtatttgctaagtaaacgaccacaagcgcaagcacatgaatcgcacatatatatatatatatatatgcaactccactctcttgttggctggttcatgcatatgtatatatttagcacacatatatagttgagtacatgagtcatatggttggccagactgatacatccacacatttgcatggcccatgcatcaagctagcttcacatgtatttagtgatcatagataatcccttgtttcttgctttggccaacacaaatattccttgcatatgtataggataaccaaaatatcatcaaacaaaaagactagacaaaagttatgcgaaagttatcggataaattgaggaggtgggaggccagactaatccctaactgctttggagggagttgtctgaagtcggttgtcgccaaatgtgaattggctaacaggtaagtcatgatcttcctgtagatgttcatggtactgacgtactgtcatcaaaatagtccatctttgttccatcccaattgttcatgtatctcatgcagaaaaagccacaatcaaacctaggagaaaaaaataagtgatggcacaaggtgatgagataggaaaaacagtataatgaaaaaaaaggtgaaacaagtaatttaaaagcaatttacgcattggactgtagtgggtactgtggtggagtggttctgaaactttgttatatcttttattgcaattttggcatcaagcgcaaccttggagaagttaatcagctacattacataaggaaaatgttgaaacattagctcatggattgcgaacaagaatatatgttgtgttgaaaaagttgtagaaaacaagatggaacatgcatagttactatgctttgacaaatgcaggaacattagttaatgagttgcgagatacaaatgtatgttgtgctgaaacaattgaacataataaaatggaacgtgctgacatagttaccaggttctgagagtactggaaccattttgagtcattgcattttgggtcgaaataattgatctggtcatgaagaatattcatgcataacaacacctagtgcccgtcccaaacaattgggaagaagagctaggagatagaaaaaaatgaactaatgtcagagattctctgtgcatatgtactaaaacaataaatatgtatagtctaagacattttagtgtgagctaatgcaacaaaaacctaccaattcatgaaaagaaggaacaatatagagaaaaaaaaagaaacataccagatcttgttttgcgagtttttcctccttgttaatcgtctgaagctttaaacagctctgaggtgtgaacttctctggctcaacgatcaactcagtctgcaaaagaaaagcttaggaagcaaaaaaatcaagcacattaaaaaacagaaaatctacgcaacggtgtcctgtcctaacgggataaattaatgacgaaatccattcaacagatcagagtatcaggccaccacacacacattgccttatcctctggaccttcgtaaagctcatccccccctccccccaagtctatatctctctctcccttgttcccctcatgctcgtctgtcccccttccccctcatgctggtgaatgtccgtgcaaccaccatttatgtcgacctcccccacatcgccgtcgctctgggctcaatcccccatcttcttgccctctacttcttccacttcggtggcacgccctttgttttctttggagaaggaagaggatggagatgatgacgttgacaatggaggatggagagagcttgccatggactatataggtgatagggagtacaagcaagccgggttccttggcagcgacaatgcctttcagctctattgctatcggattttgatattgtctttgtgtcttctcttttgggatggatggatggtgcgaggcatagcatggctgttgccaaaaatgccgatcaggtagcatgttggtgtaacatacccgaattctaggattaaggaatttctatcaaaactagttgaaaggaaagttcttcaattttgtaaaccaaaaatttccattttaaacctaggtgaagttgatctaactcttgcatgataaaattttaaaacaaattaaaacctttgcatctctaacctaggacaaaaatataaatttatgtgtaagcatgcatactctcatagacatgtttgacttgagtccttcatatgcatttggatttggattgcatttggattttcgatttgcatttcataataggtctcatgaatattaactaagatctagataaacaactaaaccattagggcctagtgctagctagaggaagttaaaatagaaaccatacaccttaaaatatatcaacaaggccaatgtcaagccccacaaaactattttggtcatccatctgaagactagtcatgaacatggaagtgaccaaataaattatatcatatagggtatattctatcttaatcatctctataagcattctcttaatttaatactaaagtaaacttgtgcataataggtaaggagcttatgacctgtgtaatgtaaattgtaattctaacatatcaacatcacctcaggttaatgagagtccaaatataacttttataaacatttacatgcatttaggaaagggaaacatatataagacataagtcttgcgaattatctaaaataattcgtgcaagataaaaccatgggaaaattcatgtaggctctaatcaacacatgcaactcactgtaattttggtatgatttaataactaaatttggtacctcaaataaatcagtcaaactaataaaaactagattaactgtagttcttaatcggctaaaaccatactttgtctaaaagtgcatttaactgcataaaagtgtataagtaaaataatttattcaaatactaggtcatttataatgaataaaaataaattttccagaatttatcttctctatttaggtctcctaaaaattcgaactagtttccaaagaacccatattcctctaatttctgtgagtaatctatccataatttttgagtgcaaccaaagaaaatggaaactaggtacatacacctacctccagtaaaatcaacactagttaatctgatcaacacattaagtattgaagctacaaaattagaggagaaaataattccggaaattcgtccaaaaaccaagctcacccatgtctctgcctacacatctctcttccacctagtttacttcgacctgggcccccttgtcagtccctccggcttgcccttcctctgtgcaacttccctagccgaccgagaaacactgagagggagagatcgagcgccgaccggctctggacgccgcgcgacgcgtggccacgacgtgtcgacgccctaaaaacgccgagctccatttctgcctctcccagacgcgtcgccactcttcacccaccattccagtgccgatccatccgagggagagcatcctcgctgctcttctccactggttctccatcgccggccacgaagaagacaatggccgcaatcgttgatgagccgcggttgtttcctcttctcttgcgttccatactctcctcaccatgccgaatatttctccttttgatttcatcctctctggtgcagccaatcggcgggaacgctgccgtgcacaccggagctctggagcgcgctctgcgcaccgccgcagcgacatcgtcgccgttgccatcaatctagatcaagccggagcgagccaccacgccaccagcttcacctcaacctcctctccatttcccctcaagaatcttgaagaatggtgctacgagtgtggagatcgtccaccgtcttctccacctccggtcgccgtcgccattgtcgattccgcctcctccggtgagccattgtccgattcttcgcgtatacaccatccctgggacctcactaaccccatgaaaacacatgcatgtcaattcgatgagtggatcgagccgttgccgtcttcccggagctctacaccgtcgccggaccatcttcttctccgctgccgctgtccagactttccggcgcctcgttcaaggttcggtgagcacccttgagcccataggattgcattcatgcatttcattcacttagaattgagcaccaactcaacatgcagtagcagcctaagcacagccgccgctcggactcgccgccggcgttactccgatgtccactgaccaagaaaagaagaggaatggaatcgcaatagcatgatcttcattttgtcttttggtcgcaccctcaaacgagccaccgtttgccgctggcaagcttgagatcgagctcagccatggctgttctgcctctctgcgtgagaaaagaagtcagggaccttgtttcgagaatttaaacaactataaggtttaatgtgcaacttttcaattcactgacatatgagcctaggtctgcgggttgattcttagaaacctcagggatctttttgtatattgatctctcactgacagtggaccccttggaaacaaaatctggaattataaaagaacagtaactaaaacttgtaaaatccatataaaattaaatatagctcattttaagatgattcaaatttctgtgaactcaccaaattgggaaatttgatgttatggaataaaaacttgcactcacagtacaaatttagcctctaaaatttatccaagttaaatcacacataaagcacgcacaaatttataaaatgcatacaaaattcatttcaactcattttagagcaaacttagtttctacagatccaccaacatgttctctaaaaataaattaaaataaaacatataaacactttacatcaaatgcctctaaaactattatctttaaaataactagtttggcataagatgaactttagaagtttatataaaactcatcttagatcctttttgaataaacccaagttctgtataatcaccaaaacatatacttccaagttataaaataaaattatatacttacttatgtaagtaataaccatcatagagcaaccttaaaatgtaaaatttgtagaaaattcatctttagtctaaatgaagtgaaccaaatatctatagaaccagcaaacagtgggcttcaacatagtaaaataaaatatggaaccttctgtacaggttatagctctaaactttaaatttataggataggagctaatcacatagtatcgattgagcaatatgtatatatataaatgtacatagaaatacactctagctataatgaaacccaaataaaacttgttagaccagtgaatgcatagttccattcccatccaccaaaacttaaggcacttagcttatgtaataatttctaggttgatataataaattgctaacatggactagagctcccctagtttataaaatatgaaccatgataataaagaccataagcctatgaactaaggttagattagttaactaaaatactcattttatacatcactagctagatgaggcaagttctagacctaaacctctaaagccatgaacctatagaacactatacacctataacacgttataatttgtaaaatacataaagaattcatattaactctaaaaattatgaaaccaaatgtgttagtcttagaaaacacatatcttcaccccagcaaacataaacttaataagaatcaccttataacagcatttcacaatagtacctaagtaaatcctacgctataccgatgaaacttctaaaattcataattctcaaatgaaatgagataaaatagaaattctttcacctaaattcattttagaccagtacctattcgctgtgcacaaatcatccattttagagcattttggatttttcgcatatttcggtgtttaattgcataacgtgtactttgtatagatgattgcttaatcggtgaagaagtgatttaggtgctgatattttcctgattcaaggcaagtcccacctccctctctttgatcactttgaacctatgttttggaggttattgaaaatgtttgcaaatcttgcatgtcgattgtacactaataaattaaaattttgttaaacttgttggacaaactcctattgtttgcattcaccttgaccccacatatatccatatccctcactcctaaccttaggaacaatatgactataccactttatatatgacttttggtgacactaggttactatataaagcttagccatgcttagaattgtcttccttgtcattatgggctcattacaaacatgaaaataaatttttaattaatctggacagaactttaatacttgtgattttgataaataaaatggtggaaaaacatggattttaggtttgggcctcaagtggtgcacatatggtgattagttgtgtaccgatagggggagagtgtgcccaaaccgacctaaggacttcactcaatgtcagttcatttcgtatacagtgcaaccacatgtgctagtatgggatagcccaagcttagtaaattatttatggtttagccttacattctggtaggctggtgtgtatgagttcggataactcagaggaacttcctatttaccccgacgtggtagtttaggtgactaagtctgtccaatacaacggtattgtgccacgtgggtgggttcccgttgtgtccgccaccacggcgttaagtttaaggcgtgggcccgccacttaacggttctaggtcatataacgtgtatggcttaggatggagtaacacgtatcgtgctggtgtaaggctaaatcatgaattttggaaaagctttgttgtgggtaataaatcgggtacttatgtatcgcgtgacatgctcttgcatgattattatttcgcatcatgtgggtaaagtgtacaaactctgcagagttaaaactaatcgattagccgtgctcgcggtcatgagcggcgtgtggatatgtattgagtatagacttgtgtttactctcctaaatgctgaaatttaccttcaaattgtgatgagatttgagaatgatctccttgctgccatggatggcaataaggtgaatatttatacatgattaatgcctaccttgatgcccaatacgtcaaatactagcttgctgaaatttatttgaaagtaaacctgatttagaaatgttttatgcaaataaaacttgctttatgctaaaaagaaccatattatgccttccttgattatatgccttgcaagtagggtcttaggcttgtcttggtgcttgccagtacattatttctaataatgtactgactcttgctatggaattaaccttttgcttgcaggatttagacttagcctttgagtgatgcgggtgatcgactgcttcttctaggacttgaacttaatggggtaaacccctagtcggtgtgcttgtggattgggtagacaagcttccgctgttctatatatttatttggccagtcggccgatgtaactaaagtagatgtagtttataatcgctttcatcttatttgtgtttgctatgtataatcatgcttgagatgaaagtgtgaatctagtgcacatcctgggaactagattcacatgagtatgagttaagaatatttgagatgttgtagatctttagccatttttgtcaagtctcctgaatgtgtaacacatctggtcaccgccttcgagtggtttgacgggcacatctcaggctgaagttgactggcaggctaaaggcccggcaatgtctccaatatttctctctcgaggcgtcggatatttcattatacttgtttgatgacttgaattatacatttcatctctcaattataatggaaggtccggagagcctacgacagttggcaacaacatctctagctccatggttgctagacttcttttgtcttctctgttttttgttgttttggatggatggatggataaacagatagatgggttgcttggatcgtggctacttttggggtagggctggtaccagcctatacatgcacattaccagtgtgtatcaaatatgatacctaggtattaagcatgatacatctaagtatcaggtatgatacatataggtatcaggtatggtacctgagacttagatatggtgcatataggtatcgtgagtactaagcatggtacatctaagtatcaggtctggtacatataggtatcaggtatggtacctggtacccatatatggtacatataggtatcatgagtattaagcatggtacacctaagtatcaggtctggtacatataggtatcgggtatgatacctagtacctagatatgatacatattggtatcatgtttggtattcattgatactggacatgatacttggtacccggtctggtacatgtaggtatcatatatattgtgtatggggctaggtcggaccttgtactcacatcaaagacaacactggctaattttccagtgagtggtggctgcacgtggccttgcgataggagaccacatgcaatgtcttacgaaaaagaaaagaaggtagcgtggtaggagactaaagcttgatgtggacagattcatttaactatcccgtaactctctatccctcacgggatcccgtgcgctagcaattctcattaaaaaaatgtaacaaaagctagataaaaaaaaattaagaaaggagagaagacatattttttttatgtttgattgcatcttgctctcttctctacattcatcgttgaacatctgtatccaacaagccatgacttcattgttcgacctctagctttcattgcatcgcaaaaatacttagtgaaacatggaatccatccatctttaagaatggaggtggtagcatgatatggaaaatatggaagtaatcaaactaacatgttagtttgatgtaacaaaatgggattatgtgataaaacaagtatgaataatatagttctaaaccataaaaaaaacaaatgtgcattgcacatgtatgtgcagtgctgatgtaacataatcataaatgttgtgaaacaagtatatgtgacatactggagcatttaaacacagtagtatgaaaaaaactggaacatggaggtagtgtgttgaacaaaaaaaaacaaaaggtattgatgcagcaaacatgtacagtctactcaaacatatggataaaatgtcctgaaacaatcataaccattgtactgaaacataaaagaggggcagtatgcagtggtcatctatgtatgtgcatgcctgatgcaacataattgggaatgtgatgaaacaagtatgtaaaatgtggtgggacatataaaaacagtagtgtgaaacaaccatttgttgttcactgcaacatgtaagaattagcaaaaagagaaaagggaaatttgaaactcacacatcactggaggattccttgctcctcctgtttggcatggatgtaacacatctcgtgtaaacattccccacttcagctatggttctcattttcttctcatctccaccacatcatcaatatccttccccttccttgcccttttcttccttttttttgtcatgagtgcttaggccactacttgcatcacctggatgcagacaaaaaaaaagacaggtatttatagttagtgacaaaaaaaatgatcaacaagaaaataaaaaaaatatttgtggtaattgttatacctgcaggtaaagacaaaacaacaatggtagatgtatttgccgttgtcggagactgaggtactggagaaggagacctcattgctaccagggaatgatctgcaggagaagctgacgtagctgctactggagaagatggcctggaagctgacggagactgagcaactagagaaggcactctcacaataattgcagttgcatcattcatctcacaacaattcgctaaaatttatggtaatccatggaaggtagaacttctaatatcagacatggtgaacaccatgaacctatatttgctgtgaaggtaatgcacactttctggctgatgtgcagaagcatggaatgtttaggcttacctctgaaaattgctcgtgggccaatgatcttgagtgcccaaggtgaaaccaaagctccttagccatgtgtggtgcaaaagaagaaagcaacagaacaaaggattcaataaactgactttggttgggtgtcccaccgtaagaagaaagcattataagagaagtaaaagaaacacgtttactagagtacagatattgtggccaatgccatgttaaactgatcttgtcatccattcttttacagttcaatttgaatattcaaggcatcctattgggttttactaacatcaggtttataaattgcaaaaggttatgtgcgaatttagcaagtgctaagcagaaaataaagaagtacatgcataaaagttcttaagcacattttaagcctttactgcacgaaagcacatatataagcttgtttggatttgaataattgcagtacagacatgaaagatctatgtactagaattgccttgtaaggggagattggaatatctattatcctaagagtgcggtgattgttttggtgattaatgacaacccattgttggaactaactattttcatgagttggtgagattaggttaagttccggcatcaagttaaaagattgaagctagaagatggacattataccttgatgaggagcaagtgaagacattgatgatgcggggtatgaaatggctatctatggcaaaccggtgaagagaaagcaaggctcggctagaagatggacattataccttaatgaggcgtaagtgaacgcattgatgatgcggagtatgaggtggctattaatggcaaaacggtgaagggcaagcaaggctcggctacaatggaccatgtgtggggtgaagggcaagcaagaggcttggcgccgatggaccgaatccggtggtgaagggcgagtgaaggctttgtcatgatggtcatgatggaccgtgcgaggccatttgaagctatgagtaatccgtatcaattataagaagaccgcaagatggaatgtcgaggatcaagaggatgtggttcttcgatgaacatcaagtcaaaatccaaagtgggcattgatcaaagcaaaggtataattgatttgggactaatatgcttaatgagtgtaggtgagaatagtcccaatagcgaactggcgttgacgttgacaaccctcaaggtgaagcaagaagatgacattcttagtggtgtattagtcccaggttgcttaggagtgggctaggatgcttggagaccccccaaaacaaagcggcaagaagacttggagccgagttagactagtttaccttttcgctttgagtttaggaaaaaccgtactattaagaggggttccaagtgtggttctgagataacacaagtgctcttagtagtgtccaagtgttgaaatatttttaggagctatttttgaaaatggctctactcgggacagagagtcccacccgaaggttctgtccggaacttcctggcgccgaggtgaggttgaaaattttcctaagtgctgcccggaagttcctggcacttttacccggaacctcctggcaggtttccagttcaaacttgtgagtaacgtctagatgacgtcacctagccgttatatatattgatctcgtccccacgtcaccctttggccattccactttagttcttgtgttccctagcttgttctagcctctcccaatgtgattttgctttctccacccaaatcttgtgtatttcttgagtgagagagtgattttgagggtggtggtgaggattggagaaggttttaaaggctaggatgacttgagcacttggggtatctcgttgggctgttatttggagcttgttactcttggagggtgacctcctagatggttaggtgtcgcccgcgagtttccaacaaggttgtggattgacccgggcaagtttgtgagggcgttattccacctccgaaaggaaacggaatacacggtaagtgaattccgagctgaggtttaggatgtcgtcttggtagagcaggcctcacttgtggtgttctcttggtgttcaagttggggatcttagtggtcacttgaaaccaaagagaagtacctaggggtgttggcttgaataccggagacctcttcctaggcctttgcttggtaaggcaaggggttaattaagacccggctctttggagctcctcaacggagacgtaggattctcggtggagaatccgaacttcggaaaacaaatcttttgtctcctctcactctctttatctttgtgattgtgatgcttatctccttatttgcctagttgtgctatcatgtctcccattgtacgatcacttgtgatatcttgtgtattttcatgtgtattactcttgtttgagatatgttgtacctctctatggtttaggcttccttgtaatttaatttacttgttgtgaggtgcttgaaatagcaattcacaactgcccggaagttcctaggaagaactccggaagttccgggcagctttctctgcttgtgagaaaaagttgccaggaagttccggaccttttgccaggaagttccgggccctgattttaaccgctgcgatttgaagtaaattttaggaacgcctattcaccaccccccctctaggcgacatcaaggccctttcaagacaccagttccatattcctgtctgaacaactaatcaatgactagcgataatataacaatggagacatatagtaaaataatctgaacaaaatattttgcaaattcaaggcaaataacttgaattttaacaaagcagacacattttttaaacttatgttcatatgggaacagtgtataaaaaaataaaactatgtgtcttatttaatagcaagtcatctggcatggaacttaaatagataatgtgtaggcaactacaaaatggatatgcaacagaatttatagatgaaactatgcatgtaaacatagcttaaggttaccttgtatgcagcattcacaaattccatcattgctgaaattgcaatgttaaatcttatttcttgaatttcctctgtgacctataaaacctagaatagtacattatagtaaggagtggcatgaatcaccaatcacatcagcacaactacatgaaaaacatttatcactgcataatcatgtttagcagtaaggagaccctgagaattggctgatgatacaatcttgaaatagttagtacataggcaaaacttttcacaagataactgataggggcacagttgcgaagtaccattacaaataatccatctcaatattggaagcataaaagattcaaaaataattgaaatggtggcacatgccgtaaaattaattaataaaatttatattccccaagtgcatggcatgtataggaattatgtgcctggaacttggtagaactgttcaaatttccaaaccagactgctagtaaacctaaaattttgaatggctttcattcagagtgaattagtgaaaagatgttatttggtcatgctatcaactgtgacctactcttgcaatgcatttgtgaagaactcggagctaatacaaggttggttctttatcggtaaccgtagttctaactccatatgatccatctagtgtgaaactaaagcatttcttttttgactactgcaggaaaaaacaaacaatggagataccctaatactccctccgtccacctaagattgaaggcgatattccatagtagaactatttgtccagattttctgttctatgaaatatcacatccgattctagatacacttatattgggacgaagaaagtatttttgaataagatgagtggagctatgcacgccctaatgtctataagcaagaccagtggggttgtgcaattgaggtaggttgcatcttggcttagctgttcacgagaaactacccccagtcgagattggccacgccttgatttgagttgatggcgtcttcaggggtaagagccaaagatccacactggggatggcctaagggggagttttgatggtcaccatattttgccacaactttgataagctactttgatcaacttatcctagtgctactttgatcagcttatcctagtgtttatttggctgccatcttttttctgcgctatctttttcttttgtgtccccacctgtcatatatacatatctttgccaatacttgcctaacttgtggccaaagattttttagccacacaaattgtgtcatgccacaccttagctataaaaagtttgataaacaaaaacaagcatccaaatagccctaactcatgccgtgtttggaatgatatattgctatagtctaattagccacacataaaacgagacggataattagtgtataattaaattgaatattaacaattataattttgaaaataaataatttgtttcttaacaaaattttatagagtaaacaataaaaacgtgttaggaaaaaacaaggatttttcatttcaaggtgctaaaaaaaacttaggggatatacacgtggcaaacaatagggaaaaaagatactatctgtctagactatccagatgtcaccgagagcaaaagaaaaacacaaccctcttgttgtctagcaaacgatggcctactggtggcggcagtgttgggctctggtgcatcggtggcgcgaaaaactatagtgtactcactttgcctcaaactataacacaatattagatggaatgggattaaagttttggaacgcggtaatttccacaccctgccaagcaaatattttgtccaaaattttcatttttttcaaatatttgtgaatttggtaacaatttattcaaaattcaataaaatgtgtcaaaatttcattaaaaaaatcgttcgaaatatccgaaatttcagaatttcaacacccacagaaattttggtgccttccaaaagtgcaaaccctggatgggatataccttagttttattatgaatttaaaaaaagcatgtatccagattaatagtattaagatatatttaatctagtcttaggttgttatattttagaatataggggttatcaaacttgatgtcgacacaaagatattgctgatccgcatgcatcgagctctgtggcagcaccttggaagcaggaagcatgggatgataaggagtggacgacgggagatcggttcactgtgttgtccctgccgggcgacgtacgtcggccacagctacaccgacccacacctgatatgatcagacagacgaagctcgaaggagcgccgccatcatttctcttgtggacagccctgatcacccccttgtttcatccgcaagaccgcaacactggattctctaaccgcgtggacgtggatgtagtatggtcgattattgctactggtacatgtgaaatttatcgctggtgcgcgtcatccctgtccacacacccatccctgcagcaagaattttttggtggtacatgtgaaaattattgctggtccgcgtcatgacgccttctaagagcaagtataatagtaggctataagccggctaaatgctgaggtggaggagagaagatagaagagaaaggagaagcggactgtaacttacaaccggcttggacacaataaccaagaaactctgtgagaaagacaagtggaccctatattaattgtaaagaactaactattatatgagtaaactgagagaaggctaaaaaaaccttatagccaacagatcggttgtaatattagccttgctctaatgtttgagctcgtcgggcggcatttactgcctcgagctccactctgctttgctctcctccctgtcgcacctgtcttaccttgccaacatcgcgacttccgatgactggtgatgcacaaaggaggaggcgtatgtggtgcaccgaagtcacattggctcaaggcggcagctcctcggtggccatggcatgcgaaaaggcagagggagaatgtaccagcaggagagagagaaggggaagaagatgatgacatgtgggatttggccatttttgagattgagaaatggacacgttagaggttatgtacacatgatgctacgtgtcagatgagcatcatataggatgaaaccaccgtttaaaccgttgggatgaaaaataaacccaggtttgattcttaaatgagtttatgtatctagctttacagttgagagagtttaatcagacatcaggcttcggctatagatgagggagggaggcaaaatggtcgttttccttggtatgatatccatggccgagctatctccagtagacctcaagatccaatataacaaagcattttgcatgaatatcatacaaacttcattttgaaccgtggagtgcacatggatttcgtgctgtgtgagtgagtaaaacaatgagcctcggctcaatttttcttttccgaatgtcttataaacaccacctatgcaagcaaacactagtgtttgtacacattaaattaaaccactgagatatattcgaaggaattcctaaccttctgccacaaataatagaggtttttcttttcttttgcatatattacctaccagtaacaatagattggcacctggttgctgatgcatcataaccaggagacactaaattctgttaccatcagcaagctaatactgaccttgcaaaaaaagaagcaagctaatactgaattgtttgctagctgaaacaatgtgatcacaggtatctgacgagagagaagatgcctgaataagacgcacacggtatattcaacaactaggcctcctctttttcatgtgaaaagatgagcggattgtcctgcaactaacacaacatatagtcttgatgatagtaacacgcttgactgaactgggtcactttttactgcaatgtcctcaatgtgcttaccagcaaagcctccacaaaaatagaaacataaaacagttccagtttgtccgaaaaataagactgtacggtaaactgcgagggccaaaacactcaacttctccaagttttccaaaacgagaagcctcctattcattagaacgcatgccagttggtttctatgaaacctgaatcagacagaagattaggattcatctcaataattatacgaagagaacgacaactggtatataaaggaacaattacggtgttcaacataaatgcaagtatataggaaactatgacagtccatatgtagtccttttttactcatgaaaattgaaaaggtagtgttgtactatgttttgttcttgtcctcattcagcagaatatgacgcaacaaattattttttttaatattcatgtcttgattcggcagaagattacacccatgatcccttctctaaaatactcaagcttcatttcaggcttgacaagtgataatactttaggactaaagaatgatagtggttcatcatgatgacaatgctaggcatcctttaagctcttagtacttgtgtttgtgtgcacctaataatgtctgcttgttcacacacacaagccaacagaaataccatactcccctataaccgctttgtattttcattaaagcaatgaacatgatattattattactatctatcaattattggtcccaggaaaaatatcagaacaggatcactcatgaaaaaacagaaagctcttataattagtcgcccataatattatacgagacaaagacaataaattgtgatgatttgtttgatgaaactaaatcaagattacttcgttggtgttttattggcctgatttggagtatgttagtaagtcatgcaatgctgttcaagaaaaaaaagctataatttgcacactgatgcaaggtcaagatcaagagtagaacatgatcatgataatttttagtgtagtagtataccactaccctaaagacagcagaagacacaacagttgctcatctattattctcatattcgttctctcgaaagcacaggactgcgtttcatttcattaaggagaacggaagttaaaatattgacaagaacaggggagcaaaagaaaactccaaagaacccccctccccctcccccgacacacacacacacatcatcatcatccaaaggcataattgcccaggttaaggggtgcgttcagatgtcaaggtttggaacacactcccttcacacggaaaacgagatagttcattaggacatgattaattaagtattagctaaaaaaacttgaaagtggattattatgattttttaaaacaactttcctatagaaaactttaaaaaaaacacaccgtttagcagtttgggttgtgcgcgtggaaaacaaggaaggagaagttaggaaggtggacaatcgaacacagcctaagtcacctaaacaggaactcatggagcgcagatgttccagctaaacaccacaagccacattcattatctaccatattataaactggcctctcatgattcagagtaaacacttcaaaaaatgaggacacttcgtccatgttcttgagtcttgacaatggttatgtgccatcagaactgaattatcctactaaaaatgagtgtactagaagcaattaagtgaagtctaaagaagaagtgaattttcttggttaattaaaacaaggaaacagaaatgatggtattgtactatgtgcatgttccctttttttcttaaagcgcactgcattattgattttctgtatactgtttcgttagttcgacagaaattagcgacatgatcacttttcaagaaacactaagcaatatgttatatagacaataacaagactataggctttatttaggttttactacagaataagtgttactggaccaatgcaaactctgtatctactattgagtaataactaccatctggcaactatagtctatagatcttttgaaccatattcctgtttccatttctttaagtggactgtgtttattttctgtataccattcctctattgcagcaaaaccttgttaaggaatacaaaaccatagacaataacttcaggtgtaacatgacgacagactttatttcgatatactactaaataatttttactgggccagcgcaaactttatatagatatcagcatctggcaaatacaaatatgttcagatgatggaaagtcaactcattaaaatttggtaatacatactcctacgacatggcagaatagcatcattggttggcataaaacagacatagcaatttaataaacaggctttcattgtcagcaacaaattaacgcctgataattaattgttaacatggtttccttaacacagtatatgagggaatagacgatgaattaaacaacagtagcaaaggaaagcatacagtaacagaatcttcttcacctcaattcttcttgtccctgtctacacgaaccaatatgtctgataaggtcttgcttttggcatcacccttgttgctcgcagatgttccttcaattgaaggacatgaacaattatacagcaagaacaaaagtagaagctcacattttcatacattgcatgaaatagctgaactgccaaaggcaaactgaggcatcgagagtatggcattcgcatgtcaaatatacttgaaagagaccacgacaccacacttctattctgaattttagtttttcaggaaatattctgaaatttgttcatgtttacactgctaatatatattcacgtgctatgggtaagcgccttggtgtcttaggacaatcattcaccaaggcctaaccatgtacctgaattacaaacagctactccctccgtttcacaatgtaagactttctagcattgtccatatacatatagatgttaatgaatctaaacacatacatatgtctagattcattaacatctaaatgaatgtgagcaatactagaaagtcttacattgtgaaacagaggaagtagcaaattatcccaccactaagagtttgaggtttgtattttgtaaacgctaatcataagaagtggtccatctgctattcacaagctgcctataaccatgcaattattttagagaacatggaaaaatataaaagttgctatggatctaacaattctagcatccttacccacacatatcacaaaagcatcatcttaaacaaaacatgaacgcgtgaaagatgattaccagcagcggggattttgcttgatgcaagccacggtgggagcacacatgatttaaggatagaggtgataaaccagggtgagccttcaccttcttctatcggcgaagacccaagcaccttccccatctccatgtctacagaaagaacatgtttgccaacgatgacacaaatgacgctcgagtttagtgggtcaatgacggcaattcgcggggtgtcctctggtcctcctcccttcacctcgcagattcgaccaagcgccacacggtgctccagcgtccagctgccgccatcgtcgtcaagcgcgaaggagctgagcacgaaaggatccttgtcggacacctcgacatagcgcagcctcccctcactgacccccacgcgccgatgaatactctgcacttctactagtagatcttcgctgggcattggccacacactgcccctcgggagctcgacgaagtggagctccggccggtcgctgaacgggtcggcggagatgacgccccatgtcagatcgacccaccacagccgtccggcgaacgccaccgcctcggtgtcgatgtccagccgccgcacaagcgggagcggggacggcaagccgtcaatcttgtcccacttcccggttcgcgagaggaaccgccacatgtggaaggtcccgctgttgctgtgctcccggagcatggcgacggcgtagctgtcgggcggcccatggccggcggcggagcgggtgaggaggccggtgtggcgccagaagaaggtcttcttggtgccgtcgatgtccgggaggcggaacagctcgccggtgatggggttgcagacgaagcgcgtgaggtcctgatcctgcgggttgaggccgtcgaggtcgagctcgccttcccgagtaggggtagcgccggcggcgaaggccttggagacgacggagagcggggcgtgggagtccacgtaggcgaagaggaggaggccgtcgccgctcgtggcgtagatcacggcgctcagcaaccccacgacgtcgatgccggtgccgggtttggggccgggccgccggtcgacgaggtggtcaggcaggaggaggtaggaggaacacggtggctcggcgagaagaagggacgcgcgcggcgacggagttctggcctccgtcgcgtggtggatgctgtggatcatcacccacccaggatggcgcgaggcgtcggcgtcggccgcggcggcggaaagggcgcgccgaacgggcgcggcggcggcggccgcggcagagagggcgcgccggacaggcgcggacgcggaagcagcggcggagagcgcgcggcggagcgggagttgcatcctgcgccggtggagccgtggaggaggccggcgaactgcgaaagcgagagagaaagggacccgcgtggcgtcgaggagaagccgaggaggaggtgctggttcacggtggaccaggttcacggaggtgagctcagactctgacagcggcagaggggagccgcgcgagcgtggacctgttccaccgagcgcccggtgttctgcagcagggggtcgtgacactgacacccggtgtacgtggactaggtgcacctattcagttttgtacttgctttgccgtgttgttgtagcttctcttcttttgggtccacatgtcaggcgaaaggccgtattgagagtttgaaactcggaggggaaaagtgctcttactggttttcccgccaaaattctacgctatgtgggccgacagatgggcccaagctatgggctatcgatcaactaaacctcaaggcccagttatgaccatccttttgcacccccagcacgtaagaccgaattattaaccaaaatttctccttcaatttgaaccgtgacattgagtttgtgctgtgtgcagggtttacgattccgacatgcccttccgtttcgggcactggcggaattcgaaatttcgcgaaatctggtggaaaaccggtaaatttcaaacaaatttcataaaccaaaatttgaatacaaattctctgagtttgctgacaagttctcgaaaaccggtcggttttagcgaaattccgatcaaaatcatcgaaatgaccagtaatatgtaatttggaccaactactagctgggcctagtacatacaatttggcccatataagtgttttcctttttttttaattctttattcttttctttcctgatgtaagtttcagtaaataaaacacaatacatcattttttttgaatatttatatcccaataggttctatgaatatcatagtatttataagattttatttgttttttctttttttatcaattcaaatttgaatttggatgaaactcctcgaaatctcagacggtttctactttcgagcctcgtcagaatatcgaaatttcacgaaattcgatcggatttcgtcggaatcgtaaaccctggctgtgtgagtgaaaaataacaggccggctcaatttctcttccaaaccagacaaaatatacaccacctatgcaagcaaaacaattgtgtttgcacacagagacatgttcaaatgaatttcgaattcctaaccatccgcctcaaataatagagactttttcatactatcttcctacaagagcaccagtaacactagattggcacacaatggcacctagtagtacctgatgcttcctaaccaagcatagagatactttttaagttcttttaccatcagcaagctaacactgaccttgcaggaaaaaaatatcaagctaatagtgaattgtttgctagctgaaacaatgtgatcacaggtatgaagagaatgaataagcagagaactgagatatcatgatttacagaattatgcatcatctttttcaatgacaaaaaatgagctcattgtctttcaattaacacaccatgtatagtcttatgtgatggcagtgacatgctgactgaactgggtcacttttactgcaatgctctcaatgtgctcgtaagcaaagcctctaccaaagaaaacataaaatagttccagtttctcccaaaatacgacagctaactgcgaggatcaaaacactcaactttccaggtttctcaaaaagtcaaaacgagagttctccatgctaccattcatcagcttcctaattcattaaaactcatgtcagtaggtttttatgaaacctgaatcgaatagaaaacattagaatgtatatagaaaataatttagtgatcgacataaaagcaagtaaacagaaaactgacagtggctcatcatgatgacaatgctgggcaagattttgtacagtcctagtgtgcacctagtaatgtctgcttgttcagtataccacacaagccaaaagaaataccaccgtagccccctataactgctttttattgtctttaaaccaatgaacatgatattcttattactttctagattattggtcccagcctcccaggacaaaatagtagaacaggatcacttgtgacaaacagaaagctcttaattagttgcccataattttatatgggacaataaatcatattgatttgtttactgaaaacaaatcatgatgttgactatcatttttatacttggtattttattggcctaatttggtatatgtttataggccgtgcaatgcttgttcagagaaaagctataatctgcacactgatccaaggctcaagagtagaacatgattgtgataattttgaatgtagtctactactacactaaagactgcagaagaagcgaaagttgctgaagtattattctcatctgaaatatcgatcttataaactggactctcatgattcagagtaaacacttgaaaacatgaggacactgcatctatattcttgagtcttgacaatggttacatgccaacagatctgaactatcctattaaaaaatattgtattagagcaattaagtgaagcacaactctttgtgataccatgtgaagatcataactgtgtcagtcttctgttaacatttcccccaaaatgagttcattgttgcagaatcattgacatcctaatacgtaatatccaaaaagaaagagcttcctactccaccaagaacatctttcacctgttaaatttcagacattagggacatctaattgatcatatgcagagaatgagctgaggaagaagcgaacaaaaatgatggtattgtactatatgcctgtccttttttttttaataaaagcacactgcatattgattttcgttgattttctgatcaaaatcaatatgctacaaaaattagagacatgatcacttgttaactaacactaagcaatataaacaataataagactatagtctttatttacgtttgactactaaataagttttactggaccaatgcgaacattgtattaactagtgactaccatcaggcaactacagatcttacagctgatgcaaggtcaagacattaatgtttggcatactctttttttttaaaaaaaaaaggtagaaatgaattccggcctatacatcaacaaaggatgcaaacaaccatttttaattcagaagtgatattacaatttacaagatggtagatagcatcgttgattttcttaaagcagaagtaccaattttgtaagctacgctatcatgatcagcagcaaattaacactaattaataagttgttaacacagtttctttaacaggggagataaggaaatggatggtaaatattaaacaagagtatcaaatgagagaacacaaggacagaattttttttcacctcaattattcttgtcgctgtgtacacgaaccaacatgtctgataaagtcttgcctttggcatcacctttgttgcacgaaaaagttccttcaatcgcaggacatgaacaattataccacaaaacgaaaagtagaagctcacatttttgtacattgcatataatagatgaacatccaaataggtaaactgaggcaacaagagcatagcattctcatatcaaatgaactattaagacaaaggggagttactaataccaactttctattctgaaatttcagtttttcaggatatattcagaaatgttattcaaaattactctgctaatatccataagtatcttatcttaaacaaaacatgaaggtgtgaaatttggttacctacctgcattagggatttggcttgatccaagccatggtgggagcacgcacggcttaaggcaagtggtgatagcccatggcgagccttcactttcatcagtgagcgaacaccctagcaccttgcccatatccatgtcgaccgcaagaacatgtttgccaattaggacacaaatgcagcttgagtttagtgggtcaataacgccaatccgcggggtggaagtgtaatcctttgaggggaggcctcctccattaacatggtccctgcagagtggagcaagctccacctggtgctccatcgtccagctgccgccgtggtcgtcgagggcaaatgagctgagcacgaaaggatcctggttggacaactcgacgtagcgcagcctcccctcgctgactcctaggcgccggaacatacccaacgcttgtactggatgggtgctgggcattggccacacactgcccctcgggagctcgacgaagcggagctccggccggtggctgaacgggtcggcggagatggcgccccaagtcggatcgacccacaacaactgtccggcgaacgccaccgcctcgaggtatagctccatccgccgcgggagcgggagcggggacggcaacggcaagcccaccagcttctcccacttcccggtttgcgagaggaaacgccgcatgacgaaggctcgttcatccccgttgcggctgcggtcctcgttgagcagagcgacggcgtacctgtcaggcgggccgtgcccggcggcggaggcggaccgggtgaggaggccggcgttggggccgtaggacaaggtcttcttggtgccgtcgatgtccgggaggcggaacagctcgccggtgatggggttgcagacgaagcgcgtgatgtccgggtccatgtcgacgccgatcagcttaggctcccgagtgccgctgtgcgtggagacgacgggggcgtgggcatccgagtagcagaggaggaggaggccgtcgccgctggtggtgcacaccatgccgccgaggagggccatgacgtcgccgttgtcggggccggggccgggccggcggtcgaagaggtggtcgggcacgtagaggttggaggcgcccggggggtcggcgaggatgaagaaggcgcgcggcgcggtggatctgaccgccgggatgtggtagatcatcgcccacggcggcgtgcgcgagggcgaggcggccgcggtggagagggcgcgccggccggccacggacgcggcggcggagagggcgcgccggagcgggagccgctgcattttgggagtagtcggcttgccagcgaaggagaagccgaagaggcgtggtgggtggagctctgacaagccgcggcaggttggattttgcagttgtgtgagctggtgcactagacctggcgcacgcagtgggcacctgctgtgggtccttctacccgttgccgtggggttcgcatcctctgccattagggggtaaatggcagaggggaacagtaaaatgtgagtagcgctacagtgttttgccattgctacagttgcggtgggggttctcttctataggcccacatgtccagatgagcgaccggacgagacacggagggggaaagtgcgtagccctttgacgttgggtgtgtttagtttctgcgtgtaaattttttttaaagtatgcggacaaatatttggtattaaataaagattaataataaaataaattataaattttatcaaatttattaagtctaattgatccgtagcatcacattgttaaatcatggcgtaattagactcaaaagattcgtctcgcgatttacatgcaaactgtgcaattgatttttttttcatttatatttaatactccacgcatgtatttaaatatttgatgtgacgcttttggtcaaattgttttggaatatgaacaaggctgttttcgatattgcatttttggcctcccctgatttctcgaactattagatgatgatgcagttttataaaaataaattaatagaaaaataattttgaaattatattaatgcacttttaaaagtttttttaagctgtcggtgatatgggaccgggagtatcatgaccagaggcttgaggcagacgcaatcgcccacgtggcctggcaccttcggggacgtcgggcccgagggtgaggtgtccgccctcctcctgatttcccccgagggggggtcgggttgcgcttgccccggccccgagggccgaggcaccccgaccccttaaggaagtctgcgccacatatatgggataagtgagcacagctgtgctcacctaacagcatttattgcagtctggtcaagcgtgtcacgctgcatgcaacgcagtacagcgcgttcctttatccggtctgtgaccagtcacagaccggtcagatcacgggttaggtggcggctggcggtctgacgcacgccttgccccatcccgtcaagacgaaagcctctaggcactcgtctcaagccggagctagggtgttatctcttagagatggcacgttagccctggtcagatttacaccaggcttcatcctaaccattacaggcaaggtgttacacgaaaaagggcaaacatgcacgttgttaagctgacgcgtggtgaacaagaatgaccggtctggcactggtcgcgtcatcgacagacagccacggtcccgcgtcatctctgtcttcgggggaggtgggggtaggtgtgggctgtcccatcagaagggctcccggatggaaaccgtaccgatctccgcccattaaagagaaaaagaacagtccagtttggaaagagaaaggtgcatgtggtatccccttgagatataaaaggaggaccttgcccatttagagggggacgggacttttttcccttttggaaggctgaggggaaagggagttaatcctttgtgactcgtccatacacaaatccacaaaaacacaggagtagggtattacgcttcgcagcggcccgaacctgtatacatcactgtgtctcgtgtgtcttgcgggcgggtgatctttccagatacagagagagagagcttgagatctcaccctaagcccccggccgaaccggcaaaggggggcctgcgcggtctcccggtgaggagccacgagctccgtcatctggcgcgccaggtagggggctcagtgtgtgttttctgagctctcatactcttccgtgtgcgccaagtttttcttgttctgcctaatggccgagcaagcgaaggcgcacgacctctcaccgagtgtgagcggcgacgacggggagccgaatccacgccgtcgagctcgtactcccccacctcctccgcgccaaagccctaagcagggggaggcgcttgagagggtcgacaaatccgtggcatcaccagtcgcaggtgatgcaggagaacggcgagatggggagcgtcgcctcctcgtctgcggcgacggcagcacgcctcagggtgcgcttcaggctgctggcgcgctcctacgacacccgcctgtcgtccatgacccggagtctccagcccaacgatggctggaagacgtggccaacttggtcatgacggcacagcagcgcctgggtgctggtggacggtccgccaccaccaagacctccggcgccgctaccaccggctccgtgtcgtcaaggcggagggcgcggcgagcggcggctgctgcgcgccattcggccgccactccctcgtcgacacctccaactcgggaggatcagcatggagagccggatgcccgcatcgacatcgagcgccggcgtaataaccggcgtactccccgcgcaacggagggcgcctcttcgtccagagtgtcacctcgacatggacgagaggatcagccctccgtgcccccggccggtggtgttggctgtagagcctttgtggcgagtcttcggaatgtccgttggcccccaaggttccggcccaccatcaccgagaagtacgatgggagcgtcaaccccaccgagtttctccaggtctatacgaccgggatcgaggccgctgggggtgacgacagggtcatggcgaacttctttcccatggccctaaaaggacaggcgcggggttggctaatgaacctgccacccgcgtcggtccactcctgggaagatttgtgccaacagttcaccatgaacttccaaggcacatatccgcgcccaggcgaagaagcggacttgcatgcagtacagcgaggcgatgatgagtcgcttcgctcgtacattcagcggttttgccaagtccgcaatactataccatgcatccctgcacacgcggtgatctacgcgttcagggggggcgtacggcacaaccgcatgctcgaaaagatcgcttccaaagagccccagactaccgcggagctttttcagctcgcggaccgagtggctcgtaaggaggaagcgtggacatggaactcctccggttccggagtggcagcttcggccgcccccggatccgccgctcagacagggcggcgtgacaggaggaggaagaagaggtcggaccgttccggcgacgagggtcatgtcctcgccgtcgagggcgctccgcgggccactcgaaaggggaggcctgcgagcgacaaaaagaaagaggctggtactcccagcagggagcgccccgccggcaggtggtgctccgtccacaacacctccctccacgatctcgcggactgtcgtgcagtcaaaaacctggctgagcgaacgaggaagtgggaggaggacaggaggcaggaacgccgtgagggcaagtccccggcggttccttccggcaaacggcgaagtgaggccaagcagaaggcccccgctgttgacatcgatgatggtgatgatgacctaggtttccaagaacctggggccaccattgccaccgtcgatggaggagcgtgtgctcacgtctctcgccggagcttcaaggctatgaagcgagagcttctggccatggcccctactcatgaggcgatgcgtcgggcgcggtggtcggaggttgctctcaccttcgaccagaccgaccacccaccgtgcattgcccggggagggcaggttgcgatggtagtttcccccaccatctgcaatgtgaagttggggcgtgtcctcatagatggaggagcggctctcaacatcctttcccccgcggcctttgatgctatcaaggccccggggatggtgctccagccgtctcaaccgatcatcggtgtgacgccggggcacacatggccattaggtcacatcgacctaccggtcacctttggtggatcagccaacttccgcacggagcgggtgaacttcgatgtggcggacctcagtctgccctacaacgcggtcctggggaggcccgcgttggtgaagtttatggcggcggtccactacgcctacctccagatgaagatgccgggccccggtggccccatctctgtccgtggcgaccttaaagtcgcgctcgcttgcatggagcagcgcgcggaccacctcgctgctgcgaccaagcccgagggtggtgacgagaggcttggcacctccgcccccaccgccccgaggcagcggattgccacatgtgacgaggtcccggtcaaggaggttgccttgggcgacggcccatccaagaccacacggatcggtggtcttctggatggcaaataggaagacgcgctcgtctccttcctgcgggcaaacgctgacgtcttcgcatggagaccagcggacatgcccggggtccccagggaggtgattgagcaccgtctcgccgtgcggccgggcgcaaggccggtccggcagaaagtgcggcggcaggccccggaacgtcaagccttcatccgcgaggaggtggcgaggcttctcgaggccggattcatccgtgaagtcatccatccggagtggctggcgaacccggtggtcgttcccaaggcgaacggcaagcttcggatgtgcatcgactacaccgaccttaacaaggcatgtcctaaagatccttaccccctgcctcgcatagatcagatcgtcgactccactgcggggtgcgaccttttgcgttttctagatgcatactctggttaccatcagattcgcatggctagggaggatgaggaaaaaactgcgttcattacccccgtaggaacctattgttatacatcaatgcccttcgggttaaagaatgcaggtcctacttttcaacgtactactcgaatttctttgggtagccaaataggacgtaatgttgaggcttatgtcgatgacttggttgtaaaaacgcgcaaccaagaaactttacttttagatctagcggaaacttttgagaacctccgctccgcccgcataaagctgaaccccgataagtgtgtgtttggtgtacctgcgggcaagcttctcgggttcttggtctctgcccgaggcattgaggctaaccccgagaagattcgagctatcgagcggatgcgcccccccagcaaacttagggatgtgcaatgcgtcaccggttgcatggccgccctaagtcgtttcatatcaaggctgggagagaaggcgctacccttgtttaagctcctcaagcgctcggggccgtttacttggacggaggaagctgaacatgccctcactcagttaaaggcatatctcagctctcccccggttctagtcgccccggagccaaatgagcccctgctactttacttagcggcgacccctcaagtagttagtgcagcgttggttgtggagcgcgatgaaaataatcctcatttcgtgcacccccattctgtgctaacttggcccgggagcgagcggggaggagaggcccccgagtcggacggtggcctacggcccctgacgaccggagtcggccctctgcccgcttgtcagacggtgctaagtgcccccgaccctcaggagggccccaaggccactgcgggaaggccgcacttaacgccctttgaccccgaggctaaccctgtgctgactcgacccgggaaagagcagggagaagaggcccccgagccgaacggaggcctgaggcccctgacgaccggagtaggacctttgcccgcttgtccgacgatgccaggagcccccgacccccaggacggccccgaggccactgagggaaggccgcccctttcatcctccgaccccgaggtcatcggcacagaagacaagtgcgccccgaaaggccacttgaatgaagaacgccccggggatacggcccccagcaaagaggatcggccccaccgaagggtgcagcggcctgtctactttgttagtgaggccctccgggatgccaagacccgataccctcaggcccagaaaatgctttacgctattctgatggcctcgaggaaactgcgccattatttccaggcgcatcgggtcactgtggttacgtcttaccccctcgggcaaatcttgcataatcgagagggtacaggacgagtggtaaaatgggcaatcgagctttctgagttcgatctgcactttgaaccacgccacgctatcaagagccaggccctcgccgattttgtggcagagtggaccccggctccagagaccgtctcaatacccgaggccagcacggacccctctcagctgcctcgcaccacccactgggtgatgcagttcgacggttctctgtctctccagggcgctggtgcgggggtcacgttgacctctccaaacggagacgtcctcagatacctggtccgcctcgactttcgagcgaccaataatatggcagagtacgagggactccttgccggactcagagtggcggccgggctggggctccgccgcctcctggtgttaggcgactctcagttggttgttaaccaagtctgtaaggagtaccggtgctctgacccacagatggacgcctacgtacgccaagtacggcgtatggagcgccattttgacgggatagagcttcggcatgtgcccagacgggataacatgatagccgacgaactctcacggctcgcgtcctcgcgagcccagaccccaccgggcgcctttgaagaaaggcttacccagccgtcggcgcgacccgaccccttaggggagacggatgcgcctgaccggcccccgaggcccgtcggagtccaggcctcgggacccgaagggagcgctccaagctcccttagattgattgcttggatctctgagatccaaacatacctcacagataagactctacctgaggaccgcgaagggagtgaacgcgtacaacgcatttccaaacgctacgtgctggtagaagggaccctctatcggcgcgcggctaacggaatcctcctgaagtgcattcctcaggaacaaggcgttgagcttcttgctgacatccatgagggcgagtgcggagcccattccgcctcgcgcaccctggttggcaaggcctttcgtcaaggattttattggccgacagccctcaatgatgcagtcgatctggtccggcgatgcagagcgtgtcagttccacgccaagcaaatccatcagccggcccaggccctgcagatcataccactgtcatggccatttgctgtctgggggtttgatatcctgggaccgttcaaacgggccccgggcgggtttgagtatctgtatgttgcgatcgacaagttcactaagtggcccgaggcttatccggttgtcaagatcgataagcactctgctcttaaattcattaagggcatcacggcccgttttggagtgcctaaccgtattattacggataatggcacccaattcactagtgaactcttcggcgactactgcgaagacatgggcatcaagctctgcttcgcctcacctgcccaccccagaagcaatggccaagtggagcgcgccaatgcagaaatcctcaaatgccttaaaaccaagaccttcaatattctcaagaagcacggcgattcatggatcgaggagttaccagcggtgctctgggcaaaccgaaccacaccaagccgagcgaccggggaaacgcctttcttcctcgtctacggcgcagaagcggttctcccatccgagctcaccctgaggtctcctcgggccaccatgtactgcgaggctgatcaagatcagcttcgtagagatgacctcgactacttggaagagcgaaggcggcgcgcggccctccgagccacgcgctaccagcagagcctgcggcgctaccatcagcgccacgtccgggcccgatcactctgcgtcgacgacctcgtcctacgccgcgtccaaacgcgtgctggactgagcaagctctcaccaatgtgggagggtccgtatcgagtgatcggtgtcccccgggcgggctccgtacggctggccacgggcgacggcactgagctgccaaacccgtggaacatcgaacaccttcgtcgcttctacccctgaggaggggggtcgggtgtcaggttttgggctcgggctaaccccgcacccccctcgggtgtgcagggttagccgggggctaccacacatgcacagccttacttttcttatttcagcatttcaataaaagcagtttcaatttcctaaaggttgtgtctgtgccgtttttccttctgaagaatcttaacttgaaataaggtcactcgtgctcaaccttaccctcgggggctcggttcggtcagctaaaatcgccaagcggggcccagaaccgagccgtgccccggggcgtggtgaactccgggggggaatcggcaaaaacccacaatcgggtcacccataaccctcggtcaccatgttcccggcctggccagtctcgacatgtggatctccccaggcactagccccgacccgagccatttgaggatcgggacttgagcacgagcccttaaatcaagctaaaatgcaaaaggaccacggcacaaatcatcctcaactcatatgcatagcaaaataaagttaacataagaaatttttcatcatttttgattgcagattaagttgatctatacaaaaagaagaaagaaaaagaaaaaattggagattggcgggggcctgggggctcattccaatgtgcccgggtcgccggcctcgtcgccaccgtcgtcctcaccgctggcgtcgccctcctcgtcggagctgggggcgaacgcgagccgaggggccgacccctcgaagctttggacgatgtggttggcggcatcccggacccgcgcgcgcgcatcgtcctcggtcccgggggggaactcctccagcgccatccatggagagaagttggggtcccgggcctggtaactcgccagcacgagttcgaccgctccccgcgcgaggtccctcgaggatgacttgatggtcttctcaagctcctcggggagttgttcgagaacccaggccatcctgttgaggtgcggagcgaggccttccagattggtggggggcaccgtcgtctggcctttccagaggcccgcttgccgaccggcgcgcttcaggcgggagaccgcatcccaaagcatgtcgggcccaatctcgcccgccaagcgaagggcctcggcctccccggtggagaagtccagcgctcgctgcatatcggcgacggtgtgttcggcagctgcgaggcgggcggctaagtcgctttcgcccgcggccgccccaccgatatgcgccctcgcgtccagctccttttcccgcgcctcgaggtcagcagcccgctgctccagtgcggctctctcggcgcggacgcattcaagattgcggcgcgcctgctcctcctgcgccgcctcgcgaagggacaggctgtccgccagccgtttggtcgtggcctcagcctcctcgagagctcgctcccgctcagcgagtgcgtcctcgcggaggcggagcgcgcactcctcctcggcgcaggcggcctcgtgcgccgccagcgtcgcctcccggagagcagcggcggcctcgcggtccgtcaagcctttctccacggcgccggcgtgttcttccagcgccatagcacgggcctcaagggactcctcgcgccgccgggacgccgcctcagcctctgttacccgccgctctcgggcagcggcggagtcaaggactccctgggcggcgtcgagcttttctttcagctccgcctcccggctggcgttttgaaggcggagggcgtcttgcgcctcaatcatcgtggtggtagcgatgagggcggccgctcgctcctcctccacctcacgagcgatctccgtcagcgccgccttccgggcttcaagctccgagacgtgacggcggtgagctttacggcccacctccaccatggcgtccaccgagcgccgcccctcctcaacgcgtgcccatgcggcctcgagctccgctcgttccgcgcgcagggcctccacttgggcgctgaacccatctagcaccgcggtgtttgcggcggccaaggcctgcagaatgggctcggcgctcagcggggcgacggaagataaggagaagagccgccttggagagaaggcgatgcggctcggccccccggaggacgtgctgggctcggggatgtcccccggacccgtttgatcctgggcgtcgcccggggaggtgggcccaggcgatgtgcccgcggcctcgtcgcgagcctccccggaggctgtcgcctgagggttgcccgaaggagtgggcccagttgacgcgccagcagcagctgttgcctcagcctggcgagcccgggcggcctcctccttagcggcttcctcagcccgggcggcctcctcccgagcggcttcctccgcttggcgaatccgggcggcctcccgggcggcctcttcagcttcccgaaggcggtctgcggcttcacgccggtcagattctcgcctccgctcctctgcggccgctggatcttcggcctcggactggccggacttggggtggcgggaggaatgcgacgggacatcgctgaagcagaagaaaaaaccagaagacgaacaaaatgagtaagaaaaaacttccttttgggagaaagatggttgcaatgagagtgagacgaacctgcgagggggtcggttgaatgaccaccttggaggggaaatcaggtttccccggcatggttccgtctcccccgtcttgcggagccgtttcttcttgcgctccccctcgggctgcgacgtcggcgcggccccctccgggcgccgactgctggcacgcgccgccccgccccctcggggaggagatgggggaggtgttcctcccagcttcctcttcccctgggcgtcggcagggcggctgctccccgagcccccgacgcggggcccagaagcacgaccccctcctggggcagattgttccccccggcggcgctcgcccgcgctgtcgtggcccttaggggctctctcctctgaggccccgacccccatcataatggttagaatggaggcgcggtcgggatcgctgcagagggggaggatctcctgaggaatgcgagacgcctccacggagctaagattcagcaccctttggaccacgatcttgaagtcctcgggagcccaatcccatctggctccctggtgggtccgcatgtagtcttcaggcccagtgtactcccaggcgctccgggcgcgccgttggagcggcgcaatccggcgacggaggtaatcgccgtacaccatggccccggtgagcccctgggatcgcaggcccgccaggcggtcgaggacggcgtcgtagtcctcccccagatctaccggcgcccgccagctggagacctgcgccgggggctggcttggaagtcggaggcgcgcttcgttggcgaggggggtgtagaaccagtcgctcttccagtcgtcccacttcttgcggaggacgcaggggatgtagcggttcaacaccggcccccgcggctggaagtagcagccgccaaccaccgacggcggtgacaccgactgcacggtgaagaaccaccggaacagctgaagagaggggcgcaccccaatgaacatctcgcacaggtgcgcgaagatggccaatgtcatcaccgcattgggggtgaggtgcgccatctggagatcgtagaactccaggacatccatgaagaaagaagaaaatggcgggaccagcccagccattgcgaaggggaggaagaagatggaccgccccgggtagtctggtgccgggcgcccctcgcccagcatcactatctcccgaccggtggcggactccggcatgaagcggcgcggcagtccggcgtgcctctcgctcacgatgcgggaaggcggtagtacactgccgtcgagcagagcagagccccgtgccatggcggtggaggaagagatgattgagaacgagcgcgtgtggcgaaagtagggcgtagcagagaaagagttagagctcaggcggcgaaggcaagaggaacaatggcgaaaggaaggaagcaaatccttttctcgatgcttttatacccttgccatcgctgggcctggctcctcgtttctcgcgcccactacctcgctccctcgtatctcgctatctcgctccctcgtttcccgtgcccacgcttccactaatcccattcgcccgcttacggcgcatgaagtggatatgcggttgtggcaatcgaaatggattgtatcgtgcgcgcgttaattacgctcgccgaccgaagcggcgttaccgtatctccgggcgagaccaatctgctcacccagattcgcgcgctgctcaagtggtgtggcagtcttgaatagaccgcccattatggacaaccaaagttaccaataccaatgtgcatggattgagaccgttgggtattttgcccaactacggagaccggtcccacctgtcaccaggctttaggggtggcgtcacacctgaccgcttcccttgggaagggaaatttgctctggcataacgccgggggctactgtcggtgatatgggaccgggagtatcatgaccagaggcttgaggcagacgcaatcgcccacgtggcctggcaccttcggggacgtcgggcccgagggtgaggtgtccgccctcctcctgatttcccccgagggggggtcgggttgcgcttgccccggccccgagggccgaggcaccccgaccccttaaggaagtctgcaccacatatatgggataagtgagcacagctgtgctcacctaacagcatttattgcagtctggtcaagcgtgtcacgctgcatgcaacgcagtacagcgcgttcctttatccggtctgtgaccagtcacagaccggtcagatcacgggttaggtggcggctggcggtctgacgcacgccttgccccatcccgtcaagacgaaagcctctaggcactcgtctcaagccggaactagggtgttatctcttagagatggcacgttagccctggtcagatttacaccaggcttcatcctaaccattacaggcaaggtgttacacgaaaaagggcaaacatgcacgttgttaagctgacgcgtggtgaacaagaatgaccggtctggcactggtcgcgtcatcgacagacagccacggtcccgcgtcatctctgtcttcgggggaggtgggggtaggtgtgggctgtcccatcagaagggctcccggatggaaaccgtaccgatctccgcccattaaagagaaaaagaacagtccagtttggaaagagaaaggtgcatgtggtatccccttgagatataaaaggaggaccttgcccatttagagggggacgggacttttttcccttttggaaggctgaggggaaagggagttaatcctttgtgactcgtccatacacaaatccacaaaaacacaggagtagggtattacgcttcgcagcggcccgaacctgtatacatcactgtgtctcgtgtgtcttgcgggcgggtgatctttccagatacagagagagagagagcttgagatctcaccctaagcccccggccgaaccggcaaaggggggcctgcgcggtctcccggtgaggagccacgagctccgtcataagcgcactccctccatccaaatatatactcccttcgtactccgacatgattttcgagatgctactttgaccaacaatatctataaaaataaaatgttttaaataaaaagagttgcatattatgatagtttgtttaatgataaatctagtaacatcaattttacgtgattaatcttttttatttttttgctattaatagtcaaagttaaaaatgtttgacttatccctattctaaaaatgtttatattttcggacggagggaataagatattaggactagatgtgatacatcataatactaccaatctattcagattcatagtactatgatttgtctcatccggttctaatatctaatgttttggaagagagagagtaattattcatgtgttaattagcaactccattttatgtgtcgacggggaatggttcctaacccattcaaaaaaacaacctgatgcctagttctaaacttctttaattcacagttttcgtaagcacacttctcgaaccgttaaatgttaaatggtacatggagtgaaaaattctatgtagaagtttttcttaaaatcaaataaatatatttttaaaatttataatagctaatacttaattaattatgtgctaatgagttatcccattatatatgtgccactaatattctccttcattttggagtttcgaacgagcctttagaagccgtatttttacagatagacaaccttgcgttgtgacacctagtttcatatagataagttaaaaaatagagatatattttgtaaaagaatttgtaacatatggtggtgttcgtttctaataaaggtgaaggtgaagctagggcacaaatcaagaaagccattagcacatgattgattaagtattaattattacaaattagaaatttggatttatttaatattttaaagcaacttctatatagtatctaatattttaaagcaacttttatatagaaaatttatcggatgaaacacatcattcactggtttgaaaaacatgctaataaaaatcgaggtagaatttgtatcttagataggaaagaacgggtggtactttggaacaaagttccttaaattcctttaaaattgtttgctctcatgcagtacaagcgtgatcaatcatccttcccatcccacacacaacttctgtccaataataaatggatctaacatgagatttgatattatctatgacaatgaatcgggataggtgactaaacagatgtatattcattatagtaggtagcattacatcttatattagattgatttattttaggacggagtgactaggcaagtattattcatgctcctacattatacatataagtattttgaatgcaccaacaggttattactaaacaatgtctttttttagattggaaatggattacatctccggtctctgctcgtgggcatacagcaaaaaagtctcagaagtaaacataaaagaaattaaaaaaaatacatgataggataaacccccaacttctgccaataagatgatctaataaaataatgtttccaaaatcaaatagattgtatgacaaaattctgtaggtactacaccatctaaactgtaataaaagttccttggctataaattccaaacgtgtagcatcattgtacatagtatcttatcttgttgttcttgtgaaagtatcatacaccaagagtgaagccagttggaacacatgaagataacatgcatgatgctagacatttttttatggttaaaaattacaacattacggcaacgacagattgaccaacatagagcactaactccaaataaaatcattttttagtctaggcactccccttagccagttaccaaaaatatcttttacattttggaaaagggaatattaatgtcaaagaagacatatcatcaagaaaaacgtgcaacatgacagtaagagaaaagatattggatggtcttttgtatatttaaaaaaaaaacagattagattgcttgttttccctccattctctctttgtgaggttatctttcattaagataacccaactatacatctcaaatagtgaatcgcatggatttccattttgtaggttaaacaatggtgtatgtcaaatgggctaggaaatccaaacgtggcttaaccatcaaagtactgtgtccacaatgctagcttgcatgtagcctttttttttttaccatatggtcaaatagattaaggctgtatttagatccgggggtgaaaagttttagcgtgttacatcagatatacggacactaaattgaagtattaaacgtagactaataacaaaacaaattacagattctgcctataaactacgaaatgaatttattaagcttaattaatccatcattagcaaatgtttactgtagcaccatattatcaaatcatggactaattaggcttaaaaaattcgtctcgcaatttacacgcaaactgtgtaattagttttttttttctctacatttaatattctatacatgtgttcaaacgttcgatgtgatagggtgaaaaaatttgccagaggatctaaacaggccctaatccatcataactaatgaggcaaacattatatccctatacgttattgacactgtttaatgctaatgctatacaaatataagtatcatgtacatatatatcgactccatgtaaaatattcgtcctatgtttttttttaagaaatattcgctctatgttattgttgtgtacttgtgttctgtgttctcttttatgtaaaaatgtttatgccttttatcttcatcgtcattttgtccaccgctgaataataagcagcctcctctctttacatccttcttatttatcttagggaggaaaatttattataagaacagtgagaaacttttttatatatgcactgaaatatgctgaatacataaatcattaggtcccttcaccaaagcttgataaaaccacgcggcgtaacgtacaagtgaaaatgtgaaaccaaggtggtttttgtcttaaagcggggtgaagcaaatggcattgaaagttcagagattgaccatcatgtttgccatgctagctgctactccctccgtcctataaagcaacctagtaccagataaaacacttcataaccatgtctggattcgttgtacttcatagtagtgcaatggttctatcaaatgaaagcaaaacactgttttctgcgtataaatcatgaaatcactgcgatatattcgaatgattccctgctcttctgcctcaaataagtaacagagagatattttacatatcttgcctaccagtaacaatagattggcacttaggtgctgatgcacacgtataaccaagcatgaagatacaacccgagatttagtattgaattttttaccagctgaaacaatgtgatgacaggtatccgatatgaataagcaagcacagaagatgcctaaacaagaatcctggaaagttacattaacatccatcgatctatttttcaagtgcaaagatgaccatattgtccagcaacaaacacagcatgtatattcttatgtgatggtcatgacatgctggctgaattgagtcactctactgcaatgttctcaatatgctcacaagcaaagcctccacccaaaaaaaggaaaaaaaaaagggttcctgtttctccaaaaatatgtagataaactgtgaggtcaaaacacttggaacttccattgggtttccgaaacgggacttctacaactaccatccatcagcttcctcattcgttaaaacacctcttcagttggtttttaagaaatctgaatcaaacaggaaacattaggatatgtttgaatagaatgagcggtataaaaaaaatgaaaacataaacaagtaaatggaaaactatgatagtccatctagccatttctacttaagaaattgaaaagagagcatgttatcttttattcaagtcctgattcagtactatattacacaacaattttattttatattcatgtctttattcagcagaatacctaattatgatttttactatcaaatcgtagtagcaagcttcatcatcttagactcttaggcttgataagagataatattttaggaccaaagaatgacagtgactcagcatgattacaatgcagggaatcctttcagctcttacacaatactattatgttttataggcaaaagtttctagtttgcacttaatcacatctactgcttaccttccatcaattttttttatcccagcaaaaatattacatgaagcttttaagtggttgctcataatattatacacaatgcaacaaactataattaactcttatgaaaatagatacttataatgatgacaagaccaaacacctttaaggcttttatacttagtgacttggttacctacttcatattttattggccaaatttggagtttgctttatgcaatgctgtttaaacaacagctataatctgcttttttatgcaaagtcaatactgaagagtaaaacatgactgataatttttagtgtactttaccctaggatgcaccttgtattagggatggatccaggagaaaatatcatctaggtcactaatcaaatttctttaaaaaataatcgtgccattgcagattataagagaaatttcttaatctaaagaggacttatacagtgattggcaaagagtaaccggtgtcaaatgacagtgatgaatgtgtgctggatctgccccttcgtctaaagtgctaccacaagacggaagaaaaagcaatatttgctcaaatgttatgctaattcaactaaaatatccatcttatcttataaaatggcctttcatgattcggagcacacacttcaagaaaataaggaatacaagcagtgaaaagtggtaatcgaacggcatccatgtatggtgaaaagaattaacaagacgactgattgaataatagttagcttaatgaagtacctgctgacccatttgctgtttggtctcaagtcatcttcttcctatctacacgaaccaacatgtctgataaactcttgcttttcgcatccgccttgttccttgaaagagtttcttcaatcacaaacagaaggattttcaaaattttacaagagaaaacaataatgtaagtagatacacgtttccaacattgcatattgaagtgacaaaacaaatgatactaccagtaccactatgcacaagctaagcctcccactaacattataccgtttcaagtttcaacagagatgtaaaacgaacaaagtcctggatctatctaattaacacttaataagcaaatctggtgtgtcaagcatgcatgtacacgggagaaatcacatgaaagatgatcacctgcacgggggatccggcacgatgcaagccacggagggagcaaacatggtgtaagtgtatccacggatggatcacttccacctcccagcgtgcacccaagcaaatccccattgtccatgtctatggagacaacctgcctgccaactacgaggtgcatgcagccagcgttcagtgggtcaatggctgcgatctgcggcgtgttcttgcagaggttttggtcatgcggccagagccggctaagagccacgcggtgctccagcgtccacccgccgccgtcgtcgtcgagggcgaacgaactgagcacgtatggctcctcctgggacacctcggcgtagcgcagcctcccctcgctgacgccgacgcggcggaacctgcgcagctcccggcgctccttctccatgggctgtgtcacgctgcctctcggcagctcgacgaagcggagctccgggcgatcgctgaaagggtcggcggagagggcgccccagctcaggtcgacccaccacagccggccggcgaaggccaccacctcctgcgtggatgtgttcatgcgacgccggtggagcgggagcgaggacggcaagcccaccagcttgtcccacttgcccgtttgtgagagaaaccggcgcatggcgaaccgttcgtccccgccgcggtagcccaccgagtcctccctgaacaaagcgacggcatacctgtccggcggcccgtgcgggcgttcggattgggtgaggatgccgatgtcggagaaccacgcggtcttcttggtgccgtcgatgtccgggaggccgaacagctcgccggagatggggttgcacacgaaccgcgtcatgtcggggtcgatgctgatgccagtcagcgcgcgccacccaccgccgccggggacgaggggggccgtgccggtgacttccatgaaggtgaggaggaggaggccgtcgccgctcgcggccttgacgaagccggcgaagaaggcgttcagctcgtccgtgtcggggtcgggcacgcgcggcgcgtagccgacgaggtgggcgggggcgatgagcctggagccgcacgggggctccgcgagccggagggatacgcgccgctcgggagatccgaccgccacgtacttctccaccatcgcccacggagggcgccgcgacgccgtggagagggcgcggcgtacgggcgcggacgcggcggcggacagggcgcgccggagcgggaggcgctgcatctttgggcggaggcggcgcgcgtatcgtggcgagcgtagcctagcctagcctaccctaccctaccggagaaggcgaggcggcggggtcggttgttcacggtgggtgaggtccatggaaagaagtggagctctgacacgagcagcagaggggcagggagccgtgacgtccggccgtgggctcggtccaccgtgagccagggcatttggagccgagagggtttcgcaacggtgtggcccggtgcgcatagactcggtgcagcattttgcgttgttctacttggtgacgttacctgtctctatccatctgctcctgcctctgtacttgttcatcctttttgaacgatccgttgacagctggcctacaaaaagcatggcaacggtttcccgccaaaatgctcaggttgtgtcggcctgggagccacagacggtgttggcccaatgggctgtgatcctcaaggtccaacgtaacaatatgaagataattcttcagttagaattagccttttgatttgtgtactactctctccgtctaacgaagactttttttttgtctgcgtccaacgccaacatttggttgtttatcttatttaaaaattttataaaaaaattagtcacgcataaaagtactattcttgttttatcatgtaataacaacaaaaatattaatcatagaaaaattttaaataagacgaagagtatattcaaaaactggaaaatgaaatcttcgtgggatgaagcctgaagggagtacaacgtatctcgtttttcataaccacgatgtattttttataaaaagctttttatatctttttataaaaaatcaaattatagttaacaattaattaatcatgtgctaataattttgcattccaaaaaatcccacccgttcagccagatcgaacaaagccccccccccctccccacgtcggtgtgttttgctcaaaagagagttcagagcaacttttgcattcgtctcatgaaaacactactacattaaggattttcccgtatggatgaattcaattttcgcgtgtagagaatttgaccgtctggaaggaagtatctgcgaaaatcgcgactttttcgtgcaggcgacgcacccgcgcgtgcaggcgcttaagccacccgcacgggaaaatgaaaaatcgaaaaaaaaaccaaagcctaaccctaatccagccgccgccaccgccaccctagctgaggtccgccgctgtcgccgctgcaagcgctggcgacggatccgccgcccgctcccatcgccgccggggaagggaggggaggagccgcgggctgccgtcgttgtcgtcgccgccaccccctcccccatgcctcccctccgccggatctgcaaggggaggggccacgcgccaccgtccgccgccaccgctgtcgccaccgcctacgcccgtcgccaggaggagatcgaggagagaggagtgagagagagagagggaggatagagagagtcagatcggccggataaataaaagagagagagagggggggacttaggcgcgcacggataggggaaaggagagaaaaagggaattttttgaagtgggtaggagggaaactattttcccctgcggttctcttaatatattgcacgggaaatttggctcattttcacgtgcagcctatttaagaggaccgcacggaaaaatcgattttcccatgcagtcctcttaaatggatcacatgcgaaaatgagctgatttttccgtggggtgtgagttaccgcccgcacgcaatgatcatttcaatagtagtgaaaaatcaacgtttgagaatatattcgtctcataaaaaatcaacttatgaaaatgaacgggtcaaatgcttccaacttatgaaaatgaacgggtcaaatgcttccagattccttcattgaagtttctttttatatactcctgtcaaaaaaaaaaagccaacctaggattagggtagccaacctcctaatcctaggttgacttttttttggacagagccaacctaggacccctaggtttagctcctaggtttagcttttttttttggacggaggaaatatgtagagagtaatatcttagtatacgcaggtactaccaaccttggttacagacttacagtaaaagcagactgtttacttaccatcagcagattggcagttaagttcagcatgcatcaatagattggcagtgcatccaacattgatgcatttccaacttaaaccaaattatactaagcacgatctcgcgttgtaaaaagcagactgtttatttttctggcaagcagggttaacgatgactaatattttgggggctacagaagtctaatggtagaaacaaaataaataaacaatgcgatattcgcttcaattgagcatgccgaaggacaaagaatgcaataaaaatggcaaaaaaaatttccaaacatcacattcgaattgcatgaatcagacaaccaaatgtctcaaaaacttcagcaagttaccaatttactaccatcagtaatcagactgccagtcatcgattgtgttaacacacaaagctgccaatcttccaacagattaacatcaaatagttgctcatcttccagcagatcaacatcaaatcaaagagttgctagaaaacgagtatctaagatgacatacacaatgttttccctacgtccaaaaacgaagactcgtaatctgctgccaacatgaacctacagttcaaagcaaactcacttagggaacctttgctcagctaattttaagttcgcatgcataagtgaaactcgaaattcagctgtcagccaacatttccaaaaaaaaaaaaggaagtttatgtagcactaattgcatcgtagtgcatcacttcgtaagaaagaaaagcttcctaatctatcagaagttcagaacaacttcaacaaaagacttcctaatctatcataatggctttcactttcacctgttaaatttcagaaatctggagataacaagttaaacgttagatacatcttattgatcataacaagggagtgacatgagaaattaaccatttcttcttgctactataaaaacacgtattaacagaaataatagtgtactcccatatacctctttgcagtttcatatagagaaaagtataattgcatgtttattttccatgtgcatttttttgttgcatcaaaaccttaaggcaggatagcttgataaagaaacattaatcattgtagacagtaactcaagatgccaacaaaactaaaggtttcatttaggtttacaggacgaatttgaagcttgtgtacctccctatcatgagaaaaaaaatacgaaggttgagatgtatacgaagaaattatagtcatctatcacaagaaggatgattttatgatgtatataggggtatttatatctctcgttgcaacaaaaaataactacttattacacaaagataaaatacgtccttatgtctcacaaggatgggaaatactcccatcaagtcatacgaggtagtttaaatcatactgtaacaagtatgtacagctaatagaaggtcttgagtaaaatgcaatatcaatattttttagcatactcctgcatagtgaatctaaactgcaactacaagagcactgtagataggaatattttactgtttgaaacctactccctccgtcccataaaaaacgaatctaggaccgcacatccggtattaggttggttttttatgggatggagtgagtaagtagtagtcattttgtaaacaagcctgtctcaaatgacaacagggacatataggcagagaaagtagccagccataaatgcaatttccttaacacaataaagaatgaaatagttggtggttcaaaaaaggataactagagaaagtaccagatatatattccacaaaccatttccacagggtagaaaaacttacaatatgatcacttgacaagaaacaggaagcaatttacttagtagctcataatgacaacaagactaccgactttatttaggcttgcatcctagattcctagactaccgactcataatttactgtttgaagtttgtattcagtgataactggcagataaaaccacagctacaacctgtacagctccaaggtctatagtatgacatagtagccatagttatttgtgtactgttttatggtgaggtgaatttaatttaaagtgcaccacagtaatggtcagcaaaagtaactagtcaggactcatgtttccttaacataggaaaggatcaaatatatcatctatactttgttaaaagggaatagtggtggtggttctgccaccacccccatcaaactcccaaccttttttgagaggaaaaagaacaggtgaggctagagggctcacatgtcaaccacccccaccaactctctacattttggaaagaaaaatgacaatgtagggtcaaagggtccatatatcagtaacaaaatatatgtggcaactaagagatgatatgtgcaaagaatgttagtaataacgggttgtctatactcctttaaaagagtgtagtactcctttaaaagagagttgtcatggtggtgattctgccaccacccccaccaccaactcctaccttttctggagaagaaaaaggagaggtggggctagagggtccacatgtcaaccacccccaccaactctctactttttggaaagaaaaaggataatgtggggccaaagggtccacatatccgtagcaaatatatgcagcaattaaaagattatatatgtagaaaatgatggtaataacgggttaatgataattttctttaattaaaattttgttgcaatgcacgggccatatgctagttagacaagaatagcagaataaagtatcaagcgaacttggttctttacctcaattcttcgtgtccttatctgcacgaaccaatatgtctgacaaggttttgcttttgatgttgctcttggtatttggagttcctacagtgagggagttaaacaatacaacataagaaatggaactgtacttttgtgtacattcgtatacagtatgcaagagcatagcatcttgtctctgacacattcaacagataaaccatgtttatacactgaaacatgttcagctcagttggctgtaaatgcataattttccatcaccatttagctccacattgggctagtgcagatcaataacgtactcatcaacaaacagaataaaatggctatgcatgttgacagaaatttaggtaagtttcaagcaatttgcaatgggtatttctgtttttttttggatgtttcaacatgcctacctaaattcccagattacagcaactaattccaccattcaatgaacaactgaaattggaaatgacttatgacacaatactaatatcaaaaaacatccaactatatggtttattttcgaatgacatgtaagacagccttttcccagattgctcccaaaaggagtctaacaatctgatgccaacttatgggttcatgtttggaatctctactcggctaattttaagttcaatatgcatcagtaaacccaaagttgaggactcggccattgttttccataatgagaaattggaatcacagctccaattgcataataatacatcacctcaccgaaaagagaaaaatcctaatccatcagaacagcttacacttgttaaattttagaaacctagaaagcgaaagttaagcagtgggaacgtgcgaggggagtaagtgatatgaaatgaaccaatatttatttattcatcaggaacacaagcaaacaaaaacaatattatagtcccatatacatgtttgttttttactcttctaatagaaaaaataatgtgattatatttttcttctacatgccacttacatcattacatcaaaaccgtatgacaggatcattgtcaagaagcaggaagcaacatagacaatgtctcaagataataacaaggcaatttattttggttccagtctagataagttttcctggaccaatgtgaaattttgcattaagccactcctggcagttcgtaccgtccgtacaataattctaaagtaaatgcatgtaagttctagagtaaaatgtgaaagtgataacttatagagttttagtatagtctattagtcttgcatagtgaattctaaactgcaacaaaaaagactgcgaaatataattgcattaagatatctctcctgacctacaataaatcttcacaaatgatgatacagaatttatgcatgaatcattaacataggaaaaaaaaaacagattcaaaagagcataggttagttgactggacatacataatttttttcatctatcaccccattgaattaccaatccgcacaacacactcatctagaaacagaatcagatagctagcaggcacatcgattgaaatttaagtggctttcagacgcttgacaattagcatttgcaaaaatcccatagattattcatgaaacaaatcatcctactataaacaggcctccaaccacacggttaaatttcaaggacaaatcagaacatatgagcgtaacaataaaaatctgcatattcacatcgtatggaaaacatgcatctcaaagaaagcatgagaaagaacctgcagaaggtatccggtatgatggaagccacggtgggagaacacacggagttaggagagcggtgagacatgagcgagtataactctcatcacctaacagagaacgcccaagcaccttacccctctccatgtcaacggagatacattgcacgccgattttgaggtacattatgctagcattcagtgggtcaatgacaccaatctgtggcgtgtcctcctgctgcaatgggagtcccccatccacccggagccggctgagcgccacccggtgctccagcgtccagctgctgccattgtcgtcaagggcaaaggagctgagcacgaatggctccttctgggacgcctcagcgtagcgcagcctcccctcgctgacgcccaagcggcggtacctgactaggcccctccgcttctcatccttcacgggctccatcacactgccccctggcagctcgacaaagcgcagctccggttggtcgctgagcggatcgacggaaatggcgccccagctcacgtcgacccaccaaatacggccggcgaaggtcaccggatcgtgatccacgaacaatggccgctcgagcgggagcggggacgggaaaaccaccggctcgtcccattcccccttttgcgagagaaaccgccgaacggcgaaggaccactcatcgttgtcggcggcggcggcgtttgagctgaacgaagcgagagcgtacctatccggcggcccgttggggcggtcagattgggtgaggatgccgacgagttgccacttcaaggtcttcttcgtcccgtcgatgtccgggacgcggaacagctcgccgctgagagggttgcagacgaagcgcgtgacgtcgggcttcagttgcttgccgtcgagcggtatcgggccgcgcgcaccggcggcgggggccgcggtgaggccgtccgtgaagtcgaggacgaggaggccgtcgccgctggaggcgcgggcgtgggaactgcaggcgcgcatcatgccgggggggcagggctgcggttcgacgaggtgctcggggacgaggatgtgggaggcgcacggtggctcggcgagctggaacgcggcgcgcggcgacgacgggggcatgagcaggcccgtgtggtggatcatcccccaccgagggcgcgaggccgaggcgccggcgccggcggccgtggagagggcgcgcgccacgggcgccgcggcggagcgggtgctgcatttcggagtcggaggcggcggagcgaagcagaggggggaatcgaggagagggttttgctgcctttgcgttgcggcgtggagggagagtcttttaaccccctgtaccattaagtaagttgaagcttacgcgtgtgccgtaaaaaaattgagagttacctgtccatgacacaaactttcgtttacccgtgtaccattccatccatgttagagaatgagctctgacatgtgggactcacgtatgaaaatgactaaattgcccctgaagcattttcatctctactcctcctctcccgtgcgcctcactcgaaccctagcctagccgccgcctctatagccgccgccgccgccgccgccggtcgtcgccgtcgccggcacgccgccgcctttgcctcgcctcgccggcatgccgccgccgccgccgccgcctcgcctcgtctcgcgtcgcctcgccagatccagcctgctcggcgccggcagcgtggtgacggcggcggcgggcatcggcgccgccatcagggggctcgacgacggcgttctggacggtgccgacgggtggttccagaagatcgtgtcgctgatgccgcaccggccgatgtccatcggcggctcgccgctgtacgccgtgtacgacaccgacttcgggctgggccagccgacgaaggtggagctcctgtccatcgacaagacgcccggcacggtgtccatggcgcggcatcgagatcggcgtggcgctgccggagtccgacatggcgcggttcagctcatgcttcgccgacggactgaagcagctgtgaggacgaacagcttgttgcatttcttgctttcttgctgctacatattgttgcagagttcagagtttgttcagtttgggtgtgattctgtaatgctagcagttggtgatctttttatgtgtggacttagtgtgttgaattactactttaaatgttggtgatatgaacttgttgctatggatgcaagttatgtcatgaatgttgatgctatgaccaagtttagttgcttgaacgttgatcctataaccaagtattattcctgctttttctaattttttttgcattttttcttatttatccacgcatttttttccttatccttttacgaattttccttatgttttcatatgtttgtatttatttatgatttttaaaatttatttacgaattttttttcttatttattccctgttttctatttatttccatcattttaaaatttatttacgaatttttccatatttatttcctgttttaactttattttcattttttaaaaatgttcactttatttcattttcttcaatctacatttcagcctctatgtggtgtgtgagccgatttctcttccaaatgtttcatccaaagtggctgaaatagagcaagggcaaaatagaccttttaaacctccgttagtctccgttagtgctgattccatccaaagtggcgcacaggtaaacgaaaatttgtgtcatggcatataaatgactcaaaacttttttatggcacatgcgtacctccaactttcttaatggcataggggtaaaacactcgaggaaggaagtggagaagccgaggcggtcggtgaggtccacgagagctcggttcacgcggggggagcggtgccgtgttttgaggtaatgaggtagggcccgcatgtcatgtcagggtggtgacggtgtcttgctcctcttccggcttccgcactgcttgggaaaaaaattgaaaaaatatattttttatcgcatttgtaagaaaatactggtttataaactttcatcacacagttcaagacattcgatttaaatttgaaaactttcatcttaaaatttaaaacattttttaaaaattttcaacttaaattggatgtgaaaattttaatttataaaacaaaaaaaaaatcgtgaagaaaatcacgcttgcggcgagaaaaaggtaactaatcacgggagaaaaaaagagcaacagagaaaaaaagataaaaagggaattagtgtttgcgccgccaacgcctacgcgctaattagcgtttcggtaataagcagccttatggcagatgctcattggtctccgtgcctgatgcagcaacgggggttcccgatctttcgatgagaggaggataaacttcgatttggggaaggatacgacgttggctgtccgactacaactaccacaggggtgctgcgccgtagcaactggtacaccgactccacgttgttgctgttcttgtcgtgccaagaacaaccttgaacctgcaagcaatcgaagaacaagcaagaaacaagttgacaaggaaacagctcacggcacttgtcaaatgatgaaacttaaacaaaccaaaatggggttctaaatacaagtatccgggtggtctagccgacacacgcgagtacaaggaagtagctgcagctaaacttacatcaaaacaaaacccaaagtgcaaaatggtggctgctaggagtgtatataggtggaggaatgaccaggagaggaggtgggagcaaaccctaggttttgtggacccctaatgggctgtaatgatacaaggcccaagcccaagtttctgatgtaaagaactattttcgtcattctgagtagcctgggtcaaagttgatggtgaggccacacatagctgacagtagacgacgagatctttccaacaagtactcatttgccccgtttgccctccggagtgaagagcattgacttcatcaaatcagcgctgctagtgctgcttgcgatttggttcctctcccatattcctaacaacaagtagatcacaacaaccatttagtagcacctaattctgagaagaacttgtatgattagctaggaatgactttacctgataattaagttcacgagctcgagctctagtcattggtccttgctgtgcaataggcgtggttgtatcgttggaagggatgtcctcatcagtgcctaatcccatcatatgctcccgccaaaacggtgtttatgtgcttagttattttatgaaaaaaaataaaattatgcgctagagttaggatcgttttttacggatcctttagtcatatgactttgtcattaacatataacctaataaattctgaactaatatggagaaactcaatccgatggttttgtgcattttcagtaatggaatccgaagaaattgagcgagcatagaagattacgatttaatacaatttaccgtcgcatcgacctgtttcatgtgaaaggatgagcgtgttatcttgcaataaacacatcattataaacaaaaaatggcgccgagaactcctgccccgtggttggcacttggcacttggcaagaaagaaaggaacacgaaccaagagagaggccaagaaaggaacacgaacacagtgccggggagctcggttgccgaaggtaatggcgtcggttcgccggagatgaagaggcgatgattcaaggcgattaaaggcatgattgatggggaaaacatgggggaatttatgaggaggtgaagggtaatcgattttcgtaatcaatcggaatggaaaacaagcggggaggcggatcgaatcggtggcagcgctagggttttgtggccggggagaggaacgggcagcgtctggaggtggaagacgacgaccgcttgcggcggggacgggatgggccggctgggctgtaccccgctgcagccaccaccctcctcctctctcccgcctcatctgccggcctctgcacccgcctctcgcctcgcccagaatgatagaagaggagaaagaggaagggtgatgacgtggatcactcttacatatagtgcctacgtgggtcccacgctgactcagtcaccacgtcgaacaaaacctgttgcaatactgatctaggacctattgtgatcggttttaattagttaagggataccagatatctggttttgtggtttgagggcgttttttaagtcgatgacaagtcgagtgacctttggtgtactttttccaactgaaagatacttccagctgacagatgggttcacatcgataaattacagggaaggctcatacatcaatcgattcataggcccaaggcccaagaaggaccaagttgggagtggattctttcctgccaatgggaagagggttgggcgggaacctctcgcaccttttctcttccctcaattccgacgaaacccccccatttccccaaccccaactccatctcccttggagaaggaaccaaccaacgctaactctcgcctactgccgctgatgcctcctaagcgcaagtctccggcggccgggtcaccgaggaagacacggagcatggccgtcgggaagcagtgggccgaggctccggcaaaggcggccaaaaaggaggcggcagcacccgagtagaaggggaggaagagggccaggaaagaagatgcagaggtggcggctgcggattacagcgctgtggccagcaacgggaagcgcatcgtcgtggagtcatggtaagtgcccccacgctcggggtgaggggattacttgttcatccttgggatttaatggcgttctgctggggctaacaggctaatggttggttgataacctaaaaggtgaagcccccttttacatacatactatggatggtcttctgtgcattcttcagattttgatacccgccgaagccataaggaaatcattttctaacgatgtcagttcagaagaaaaagaaaaagaacaatgttctctctgtacctaagttcaaatagttgctaggggattatagtattttggctgtagtaggtttacttacttcttcttgcggcttctagttttggtgtatatatgaagccattttttgtgattatctgtcaagtgctttgctatctataggtttccatttctttttggggggtcatatactctgcttccttccttgataattgagtgttttctgctgttttctgtacgttcaattaatactagttacttaaacttcaataacggactttagtttttgtgaattatcactggaagtgttaacaatggttttgtcaatagataccatcgacatagaacccaaacccagaattccttactgtatctctaatcagtatgtaagaccaccttcttttgtattttacatataagaatgatgattgaccatacgcgcaatagatctgttatcgaacagacttataatttgcttttgcacattggacaaaatgttctccttgcttagctgaataattctagataactcgtacatcattcctttatcttgacatatctaaaaaagtcctattgcattaaatgaattattggtagcaattcttattgaattttcttttatccttgcttctttgtacgattctctagcactcaatgcagacagttcaagatcagagctgtgaaggtaaaggaggatctggaaagttttgttcctggggtatctgtggtaatcaaccctgaaaaagtatctacatggtgttaaaccgaagtaattgtttttttttgcaacaatcaaccctaaaataacttttcggttatctcactggcttccttcgttgtcatcattgttttcctcctaattctcagccacgacgtggttgcctggagattcgtgaggaaggtggtgaagtgttcatatcactgctggtaatcttgtttactacttggtacctgaatcataagggacttttcttagctttctacatctgttgtttgctagctagttattcttttggttttcttttaacttgcattggcagttcttttcagtgatgatatattaactcacctatgtacttaaatcacttgcattccaattagaacatcgaatctaagagaccattctatataatcattactatatttgctaggaattagggtgcatcatgatttgtgtctgattgagcacactccaatttgtgtgcagaacatgccaagacctttcacagcgatgaagaagctcgacatggatgaggtcatcaaggacatagcaaaataaaatctcctgaatcaaatcaacaactcatggggtgaaaatctttaggtggcttataactagtagtaagcctccaatcccacctttctgttggatcttcatcttgaaatgttattggatggcactccgtgttgcatacccatggtgtgttgattcactggcacttcctgtgttaaatgtatctaaagattcctgcatactactcgtaatatctaatattcagttacctagtgatttgatgtcatatgttctgttctagccacaagtttgaatttatgtacagttcccccctcacttaatataaaaccagcaagagctggcttaggtttcaaaaaaaaaagtttgaattgcagctgtttttgataggcaatgaggctaccttcttaggtctttcctaacttttctcaatataatagtcaatattcaggggagaggctaagtacaaaattaacaatgtgttaagtcactgcagtcctcaaatcaaataatgttggctcaaatagtaatatatttgtttctttcagtacattgcaggaagtagtagcatatgtcaacaatacaaatcacaaattcacagtcccatctcatgtacagagctgtagagccttccttatgaatgatagactaggcattatctaaaaaatgaatgttagactagagcaattttacagtctttaagaagataccatgaggtaccactttttctattgtaaattaaatactatgaggcaccaaattttacattaaattttttttacctcatggtatctcttcaaggactgtaaaattgctcgttaggctaggagatttgctgacagttgtggaccgcaacaatttgtagcatgcattgactgttgtctctagcaatgtcttcgacaatggatggctgccagataccacttgggtgccttgagctatcgaagtatttgtttcctactcctcatcctctgaagctgtccattaagtgaaacggagacagtagaaaggctcatcatgcagttgaaagatggaacgaatatgggtaaaaagaaagaaaaaatatggacagaaatcagaagaagaataagcagccgagctaatttactccagtactggaagaagagttgtcaccgatgtttgtctcaaaactgtagggttctcttgtgtacaacatgtgccacttcctttcatcgtctctttgatcagcataggccttgatatgctggacatggctcaatttgccccactcaggaccagattctccaagggctatggatgtgagcagctctaagttgcagtccagcaccaggtgcataggactcacatcctgcaagcctgcaggtatcttgggagttgttccatgtcgtagtcctccagctccagcccccgtagctcaggcaccccctccaatgccctcatcttcgggcagccgacaatgatgagcttctacaatttggggagagatgtgaccctctccaggtcagggttatcttgcagctcaagcttgacaagagaagcaaagctctctatagagctgagttgctggatttatataggtccatgcttgttaaagctatcgcttccgaggaaaggccaggaggaaggcttctcaatttgcagttttcgagcgtaagctcttccaatgcaggcattgtctgcacattatttggttgctgatcccactcccactcccactcctactcctccatgcctattagattcatctccttcaaactagggtatacttgggcaccatggtggtgttggctggatgatggtcgtatagtaatgaatttagggccaacacgcttgattgcaggggcatgcatgacctgaaaaaatttcaggcatgggaggtggcagaggctgttaggcagttgggtgcagcaggctaggtcctgcatcatcacaatcatcagtctctcaaatgcacttgctcctctagacatcatccaccttggtagccgttgtccaaaatagccattgatctcaatactctcaatgcaccatggtggggcaagctcatccaacacctcctcgatttgtcaaggttcttcctcggagacacttttctcatcttttactaacccatcttcaccaagtctactgctacagtctaatctcaagctaagtacataagatgcaacttcaccaagcctagcctctgtagccaaggagggagcaggtacattatctagctttcttagtgaaagtctccgtagctgagcgagaggccccagctcttgtaaactacaccactcaccatctgcttgtgcaggaaacccgcataaatacctcaaatttgtcaatccacagaactgtcggggtatgccatttatgcttacacctaaaaggtcaagatgcctaagccgccctagctttacaaggcttggatgcctaagccgccctagctttacaaggctattaggaagcctgactaagttttcaaactcaatctcaaggtactgcaataatttgagtttgttgatgttccgtagtagtctagctaggtcgctgcattttagaaagatatacctcaaatgtttgagatggtgcaaggattcagccaaggaagcagtacagttggcgtcttctatgtgcataattcttaggcttgaaaaattaatcaacaaatccccatggttaatcttgagctcaccaattactattagtgttctaagtgatccctggccttgtataagtctccagtcaaattcatcatttggttgcaaatcattggtttctatagacagcctaagaaacttttgtgtttgaagtgcacctttgcctctttcatctaaagttgaaactacaaatgcttcatctctagatagatgttgagaaaatgagcgaacaacatcatgcatgctgctaacactgattagcatattcttcatctggctctattaggtttctgtaaattaactcttgatattacccttctcctaatttttctaaatcatcggtgtccccgtgaagaaatcattcgcttatccacatgccaagactgtgacattgtagaatactacattttttgggaggagggagcagtgcagaaagcattgcttcaaacaaggatgcaaatcttgatagttcaggtacaccgcatcgtctaataaagcaggaggtattgaccacataaaatcttgcagaacttgctcccaatcagatctccgtttctccctcctacgcaacagccctcccattacttttacagcaagtggtaatccgccacatttctttattatttccattccgatgtcctttagtgtgtcatcaatttcaacctcctccatatcatcacttgatgctacctgaacatgcatgcatgcatgaattcagattaattttgagcttactagctagcaattagtacaagattacatatatatgctggtaataattaatatgggtagagctatgacctgtttcttgagcagtaaccatgcatattgagggtacagtttgtcgacgtggtggaaaggttgcatggcttccatccgttgggtgacttcgtcatggcgggtggtgatgaggaggtggctgccggcggcgccatggctgaagggtgccttgagtaaattgtcccaagatctttcactccacacgtcatcgagcaccaagaagaacctcttgtccctgatggcgtcgacgagcgctagcacgagcagtgacttgttgctctctcgaccatcgctggcgccgccgacagacttgatggccgtcctcaggaggttcacctcgttcacgtcttgtgtcacgctgagccatatcttcttgtcggacgcttccttgatggcctcgtcgttgaacaccttctttcgccagttttgtcttgctgatcccgccggtgcccaccatggcaaccaccatcaccgcgtcctgcttcttgtgcttgccatcggtgagtctcctcaccagcgccctggtgtcctccttgatcttctctccgaccacggccgactgctccaacaccgggtccgtcctgcggttggcgacgctgaaccgtcgaggcgccaccatgtcttcgtaggactccagcttgaggaagctgaaggtggctgcgctcttgcagatggcgtcgagcctggcattgagcgccttgatgcggctgccaatgtcgtgggcgaagagtggattacggaggcagaagagcagcggtagcccacagggtcggaggaggatgagctaccacccccgcgctgcatggccttgaggtggcagaggtcaaggatgtcggtggcgtcgtacatggtgtgcttgagcttcgtaacccagccctggacactcaggtcggtgatgcgtcggcgatcggcgtcggcgagatagtccttgaggatgcgcagcttgtcgtggagggtggcgatctcgagggagacgccgaagaggaggttgagctcgtccttggccacctgcttgagcaggttgccaacgtaggacgcgaacacatccagaacaatggccatatgtgaatgtgaatgatcgacacaaacacacattgacactaacggagggcagattggttgatgaggcagtcagtacccgcacggacgtgtatatagctaccaacatacattttttcctttttttttttgaaataaagtttatccctgccttgccttgctcttcatcctatgcttagcttgatgcttctgcttcaatctttaatttgttgttagctcttttttcttttatttttttggtgagattgtgatgcaaggaagggcttattacggggtctatctttttccttgtcatcatttccttcatttgcttttttctaccctcttcttgagggtacataaatattggtcgttgggtgtgattgagtacaagataatgaaacctgagtatgccggtattaaaaccttgttagtgggtgcatttttaagtttagaaaaaagagtcacttaggatatttctgcacatcagcttgccaccccagcaaaatgataagtgcgtaaataacctcctaagatcttcctacatgcgtaaaattatgcatatctttgaaccatgcaaatcttcatacacatcaatattgtcgaatcacctatcccgttggattaacaaactactactcatcatgtcagattcaacggcttactgatccacaggctatagtggtgtgtttggcactacttgtttgtaactcattctcaaaacgaggtagtagctcattagcgcataattaattatatatatatgattaattaagtaaatataaaagaattgaaaaatgtagtaatacgatcttttaaaacaactttaatttagaaaaaatttcaagttcaggaagtatgcacatggaaaacaatataacagaggtcagcaaagtgtcctgaacacaccctaaccagaggtttggaaagcactactctttaacatcctccaattctaacaacacatgatttgttgttgaaaaaagtctttctgactctcatggcttaataattgagtttatctgtagctagcacattcgacaatatttaggagaaaaactttttcactttaattacatgtgtaactagggtgtagatttgttttgaacgtaaaacccacacttgcccagtggtggagagggctcgccaaagaggcagagcttgcgcgattgaatcccacgctgtcgattttattcccaatctccacccgcacgaattttatacatagcccaaactttaagtaccttcgcactggtaccttctatcttaatccgttggatttagagcaatcaatggctctaatatatcacatgcactgtagaaagtctttaatttttttaaacaaagtttatccttgccttgctcttcattctgcgcttagcttgatggttttgtttcaatctttaattgttggcttttcttttctttttttttgcgtgattgcgaggcaaggaagggattattgagggatctttatcattattttcttcatttgttttcttcttgcctcttcttttcctactctatgggcattcagctatgcatcctagtttacatcctccctcagttatcaaaacgagatcaattttcatttagtgactaacgtggcatccatgttagtaccaacatgaacataataataataataataataataataataataataataataataataataataataataataataagtggatccacatgtcatcccttctctctctcgtcccctcttctttctatctctttttcctagttggcggaccttcgacaatggctcctagctttggtggagccatgggagccctgagttgttctcctctccacctaccacacgtctgtcaccaatgctgatggccgtcttgcctccattgaaggagatcctcgccatggttgtcctcgcggctggagccacctcctcgctacctcttctctgtgggaagagcaagtgttgtggcattgggggacgtgggctattgtcgggccaccgttggggagtagggagaggggttgaggagctctcctcctcgacctccctcttctccctctatttctttggcaacctcacatgtttctcctcttcttctatctctctttctctcttccctatagctctctctagggcatgtgcctgtgcacaggtcatctgtgcatatgtaccaatgtggtgatgcctccacatgcaaacctaattcgtctctcacgctgctactagtttctcaaccaccttgacggtggggctgtcactatccctaatttcagcagtctgcgttgcttcagtttcacatcaacaagaaagatgtggaggcggcgtcatgctctccttcgctgctcaattcttcggtggcatggtctgctagtgggattggatgctactgggccaccacgtctgatggcaagaaagcaaagacgatgactctgtaggtattgtagatttctggaatctgttgtgtctaggctagtctctaagtgctttcatcatgtagtatatgccaaatcgctgtcttttttgaggaattagtttaggtctgttgtgttcatctccatttatagatactatgtgtctgaaatattttagcatatgctgcatttaaatcaatttgaacaacaatacatatttgcaaccggactaaattgacacttacggcaatagctaaacaacatccaaggcaacaacataatagaaaaccatcactagcacattttggcagaaaaccatcactagcacattttggccctcaataatttaggtaataaaaaagttgtattttcctctaattacaacattcttctaactagacttgtcggaaataaccaatttgccttacaacgaatctagtactccacaataatgtttatttggacaatttctttgagataccattctatgtaatgattacaatacttctaggaattagggcacatcatgattttgtttttgattgaacacactccaatttgtgtgcagaacatgccatgacctttcaaggtgatgaagaagcttgacatggatgaggtcttcaaggagatagcaaaaaaaatctcttgaatccaatcagtgactcatggatgtgtgactccattatgaaaatcttcagttggaagcctgaaaaacccacctttttgttggagcattattatctcgaattattgaatgacactctatgtcacatgcccatggcttgttaatttactaccctttcctatgttcaatgtagttaattaaagacattccaaattgatgacagtataacaatgaaaaagctttggtatctgatgagcccctttgtgttacctgcgtacttctctcaagatttggttgacctctgatcttttgatatagttttgttttgcccacaagtttgaactacaattgttcttgataggtagtgaggctagctccttgtcgttgtgagctctcaaagtatttttgtactattcctcatcatcccctgattctgtgaatgaagcaacccaaatgagaaaatgaaatgaacatgttgaaaggtggacagaacatgggcaaagaaattaatgcaaaagaatatatagatataaattagaaagaagcatatgtgttaaagtgttgatttacctccagaactagaagaagagctgatcccaatatttgtctcgaatctatagggatctctcgtgtacaacacatgccacctccgttcattgtctccttggtcagcataggccttcacatgctggacacggctcaacttgctccactcaggaccggattctcctgttgatatggctgtgagcatctccaagctgcagtctagcaccagatgcctaggactcacactctgcagcaggtatcctggaagctcttccatatctaagtccttgagctctagcctcagcagctcaggaaccccctccaatatcctcatcttcaggcagccgtcaatgacgagcttctgtaacttgttgagggaagtgatactctccaggttggggttatcatacacctcaagcttgacaagagaagcaaagctctccacagaattgagttgttggatgttacgtaggtacaagcttgtcaaggccgttgcttgtgaggaaaggccaggaggaaggcgtctcagcttgcagttttcgatcacaagctcctccaatgcaggcattgcatgcacactatttagttgttgatcccactcccactcctcccactccaccatgcctatcagattcatcctcttcagcctcgggaaggcatgagcttggcggagttggctcgatgatggtagtatagttaggaattcagggccaacacgcttggttgcaggggcatgggtgagctgaaagtaatacagagacggaagtcggcagaggccatctgggagttggttgcagcaagcgaggtcatccatgatcaccatcgacaacctctcatatgcacctgctactcttgacatcatccaccttggtagctgctctccaaaatggccactaatctcaatgctctctatgcacagtggcggggtaagcgcattgaacacctcctcgatttgccgctgctcttccgtggggacaccattctcgtcttgtacaaaaccatcttcaccaagtctactactacattctaacatcaagtagctaaggtgggccttctcaccaagcctagcctttgcagcgaacgagatagcaggtacattctctaggttacttagtccaagaacccagagctgagcaagaggccccagctcttgcaagctacactaatcaccatctacttgggttggaaaaccatataaagtcctcaagcttgttaggccacaaaaccctcgaggtatactagttatacttgtgccactaaggtcaagatacctcaattgtcctagctttacaatgctattaggaagcctgtccaaattctcacatacaaggccaaggtactgcaagaatctcatcttgccaatgttttctggcaatctagttatgtcaccacattttagggagatgtacctcaagtgtttgagttgatgcaatgattcaaccaatgtggaagtacagttggcattttctatgtgtagagtccttaggcttgaaagagtaatcaatgaatcccctgggttaatcttaagctcaccaactagtattagtgttctaagtgatttttgcccttgtataattttccacccaaattcatcattcggttgcaaatcatctgtttctatagacaacctgagaaatttatgtgatttaagtgcacccctgcctatttcatctctagatgaaattacaagtgcttcatctctagccagatgttgagcaaatgagcgaacaacatcatgcatggtgctaacccattctccagcgtactccgcatttggctctattaagtttctgtaaattaactctttatagcactcttctcctaattgttctaaatcatcagtttccccatgaagaaatccttcacttatccacatgctagtaactgtgtcaatgaagaaatccacatttttggggaggagggagtagtgcagaaagcactgcttcagacaagggtgcaaatcttgatagctcaagtatatagtatagtttagctcatcaggcatttgaggtactgaccatatagaatcatgcaaaattttctcccaatctgctcgccgtctctccttttggcacaagagtccccccattactttgacagcaagaggcaatccaccacatttgtctattatctccattccgatgtccttgagcgtctcatcaatctcaacgtcctccatctcacttgaaactacctgaaaattatttcatatacatgcatgcatttagaacaattagtttagcaaatggtactctattctagtctatatacatacaagttaatatgttggcaatgtctttttgttgttagattattttttttcggggatttttgttgttagaattaattattatggccaagaagataggtgtcacagtgtttcttatggcagagatagatgagggagggatgtaaaacatttagtatattgtgtaaatctgacctgtttcttgagcagtgaccatgcatctggagggcacagtttgtcgacgtggtggaaggggtgcatggcttgcataccccgggcgacggcgtcatggcgggtggtgacgaggacacgactgccggcggcgccatggctgaagggcaccttgagcaggccgctccatgctctgtcgctccacacgtcgtcgagcaccaggaagaacctcttgtccctgatggcgtccacgagtgtgggcaccagcagtgacttgttgctctctcgaccatcgctggcaccgccgacagagacggacctaatggccatcctaaggagctccacctcgttcacgtcttgtgtcacgctcaaccatatctttttgtcgaacgcttccttgatggcctcgtcattgaacacctttttcgccagcgtcgtcttgccgatcccgccggtgcccaccacggcgaccaccaccactgcattctgcttcttgttcttgccgttggtgagcatcttcaccagtgtcctggtatcctcctcgatcttctctccgaccacagccgaccgctccagcaccgggtccgtcttgcggtcggcggcactaggtcggcgaggcgccgccatgtcctcgtaggcctccagcttgaggaagctgaaggcggcggcgctcttgcagatggcgtcgagcctggcgttgagcgccttgatgcggctaccaatgtcgtgggcgaagagcggattgcggagacagaagagcagcgagtccaggcagctgatgttgacgggaggtgcggatgagccgacgccgccacgctgcatggccttgaggtggcaaaggtcgaggatgtcggtgacgtcgtacatgacgtccttgagcttcctgacccagccctggacgctctggtcggtgatgcggcggcgctcggcgtcggcgaggtagtccttgaggctgttgagcctttcgtggaggctggcgatctcgctggagacgccgagcaggagggtgagctcgtcctgggccacctgcttgagcaggtcgccgacgtaggacgcgaaggcatccaggacgatggccatagctagctagttgatgaactgggaggcctgatcgatcagcacggcagtgtgggtgtagatagctagcctcacgcgcgtacgtgtatttatcttctaacggccatttagtttttagttttttttttaagaaagatttatcccttccttaccttgctgtgagtgctatgcctagcttgatgcttctgcttcaatagcttttcctttattttcttttcacttttttatgtgggattgcgtgggaaggaaaggattactgagggatctttttccttgtcatcattttcatcatttgctttcttttccccttttattttcctagcatctgtgggctcccggtttacaattctgtcctccctcaattattaaaacaagatcaatttatctccctcaattcgatgatttgccggtcggtagctgaacgggtcgacagagaccacgccccagcttgtattgacccaccatagccggccggcgaaggccagcaccgcgttatgcggcttattcccagccgaatcagcagcggatctatcataggggctagaggatctcgagccttcactaccagcaatataaccataagaaccctggtaaaaccatcactaaaattttacgtcatatatatttattcgattttgctatatatttgtcgataaattttctcctaaaaatttgacagatgtaattacagtacaatcgtagtgtaattacactgtaactatagtgtaacttgtatgtaactttcaaaaatctctccgtaatatgttatttcgataaaatagaggttgtggaaacaaatccttacatatgtatgtgctgtgattttatttttcttcctcaccaaaacaaatcttgtaatagatctaaagattcaaaattacatgaaacttatatacaagttacattgtagttacatgcaagttatagtgtaattacatataagttacagtgtaattacactacgattgtactataattacatctgtcaaatttttagtagaaaatttgttgacaaatgtataggtggtcccaatgaatatagagagaggcttgggcctacatgtcactgggatagaggaaaagaagggaggtgggcagcatggatatgtgcgagtcatgtggatcgatccatatcttgcgccctggttgttaatttctgatcaaaggagcagcacatcttcttatagtatttccttggtgtgacagcggagagcctattctctctaacctaatctcctccataattttgagtgattagcagcagcagcagctggtgatctgcgatcttctcgtccttcgtcatccccgtgctgatctttctaggtctcaacttcgttgtctcggctcgccacgaacagcggacttcgtcgtgcttcactatacgtctctcaacggttttgagtaccgttgatttgtgagaaaatcggtccatctttctacgtgatattattgtttgagacttactaattgctagtagtaaattaattcttgctagttgttagcctgcatatgtggagtaaattgagagccatagctaatagcttgacgtgtttgacgttgccatgtcaaattacgttgcatcttttgtgatcatgctactagcatatatttccatgtgggagttcttaattcttgtttctacctttccatttagtttaggaattaatctcatggttaaaatatgtctcctagcactatgctttcaacattgggcgagctcgattgacgcgcgctgtgccgaagaaagcgaagattcgcctatcttggtgtattgtatcatcgcccacggaggctgcgatgcggccgtacagaggccgcggcggaggcggccagagatgcgacactgaagcacaatcttggtgagggtggggttctcactctctttcctcggtccttccaacagagaggtgcacctagcgtcgtggcatgctctattgggattggttcacgcagtgaagtatgtacggtgtcacacagttaataataactactaatactttcaccttttatttaacttttccttaaaaacctactagtactactggtttaactaccggaagttttctttgaaaatcttacttactactttcctataaattattttaccaaggcacttcctccgaaaattctttgcctcaggcgaccgtccgagggatcaaaatcgggcgctccccccgacgccccacatgtccccctaggccccatcatgtgtcttgctcacacctgccacgtttctcaaaaaaatatttcacctaatatactcacaatgtttcactatgtatagatctaatgttgcagtgaattaaaatattcttttgcaacaaatcacccacatattttggaaaccctctattaagctaattcgttccattttttgttccaccaaaaatattttacctagtgcacttataatgtttcactatgtatggatcaaatgttgcagtgaactgaaatattctttcgttatttgctgaaacattgtttttatataaggtgaaacaacgtccgatttaaatgattgaaacattttcgatctacttagtgaaacaattccgatatacctggtggaacatcgtgcaacatttaaaaataattcaataataagctaaaaaaattttatcgaaatatatccatatgtggtcttgttttgaagatttaattgcaacaaatttaatggtgcaatcatatcatgatttggataaataatttaagagaaaaaatagtttaaagtgtttttgcacgcatgcgtggcactgacgtcagcgcccgattttaccccctccgcatcgggcgcccgaccgggagtcgcctcccacttcctccatctcaaaataaacaaatctaaagtagaattagacgttatcaagaatgaatctggataggggttgtctaaatttgttgtttaaggcaaagtcacatcatgtcccagattggtttattttgggatggaggaagcagcaattaaacttccatgaatatttttttcggaaaaagtacgaattacccccccccccccgaactatcgcggtcagccgaattcccccctgaacccgaaaaccagacatgactcaccatgaactttcaataccggatgaattaccctccttatccaatccaaagcggttttatcctacttggcgtacgcgtggcaacccagtcaacattttctttttctaaaacatagtggggcccacctgtcatatacacacagtctcttccctcttccctctcactctctctctctctccctctctcggcgagaacggcagcccgcggtgactccagcgtcgtcgtcgtcgtggtcctacgcggtggagccatccaaggtcacatcacctccccttctccaccaccatcccgggcctcaggtgcagcgatggcggtctcgggagccacggcgtccgccatcggcaactcctcgttggcaggccagagacgacgatggtgagctcccggaggccgggcgcatccacctccgttgctgtcatgtcgtaggaatgatgaagccagagctcctcaagcgtagtggcggcggcgtcgagccacaggttggtgaggccggtgatgtggcagcctccacagctgcgggcagtaggcggaggtcatcaccatcgttgacgctggtatagctgagcaggacatcggtgagagcgcggaaggcgctgccggtggcattcaggattccgaggaccgcgctgccaagccagaggcgcatcgtgtgaaaccccccaagcaagggaggacggcggggcacgccggcaagcccctcagactcctcatctccatgggaagttcgagcgtgaacgtccccgtgacgcagccaccgccgcctctgcatccagcgccgctgcggcctccgcatccagcaccgccgcatcccactccaccggctctctatcccacgacaacgacgacgacgctggagccgccgcgggctgccgtgctcgctgggagagggagagagagagagtgagagaggggaagaggagagagatagagtatgtgacaggtgggccccaccatgttttaaaaaaagaaaatgctgactgggttgccacgcgtatgccacgtaggataaaaccactccggattggatcgaggtgggtaattcgtcccgtattgaaagttcagggtgagtcatgtctcttttcgggtttaggggggaattcagccgaccgcgatagttcgggggggggggagggtgggtaattcgtgcctttttctcttttttttctctcattatcggtgctggagtttgttccaagatgtcatctaaactccgtaaacttgcaaaactcacacccatctaaatctaaaatcttgatttaatataccaaggttcaaagtgtaattggcaagcaatagtgcataggaatcttttccttcactggtccattctagagatttattagtcaatgttgttcttttcccctctttccctactcagttcactcgtttttcgcgtgcacgcttttcaaactgctaaaggtgtatttttgtataagttttcgatatgaaagttgcttaataatgatacttaataatataaacaccacgcttacattactaaataccactctacatccatgcatccgacatagagcaaccgaatactaggacattaaacccacactaatgcacctctctggtaaactagctacacaactatatcgatgcaaatataaaataatctcggtactcagatgatataaagggaataaaataacgaagatgtataaataagaatattctattaattcagtaagtcttacaaaagaagagagaaaaactgctagagctatacccgaaatctcatgaagacttgaggactaagaaaactattctaattcctactccactagcactagaacactactaaacttaagagagctctttgatcttcttcttgagtgtgtgttggagtggagaataagctcctcattaaataagctgctaatgatagttgtgatagatggaaatgtcctaactgctcagcaaccatcattgaggagtgatctggagcgtccactccaaacccagcctgaacggctgggatgggggttcgaccgaaccatgggctggcccaatcggcccaaaatttggcaggtcgtctccctgtagactcctcactttagtgacgtggtgtcttgggctttttgaggttgtttcactggaattgtaagcccatttacccgcaagtatatttctcgacggcgttcgattgattgttcagttattttccgtcgattctcctccattttatgtagcaatctctgcaagcaaataatatccaagtacaagtggaaatagattattctaaaacaaatatgcattgcaagcatagctaggtctataacgaccgtcaataataatatgcattgcaagcatagccattgacggtcgaaattggtatataacgaccgtcaataatactctaatgattactaaattttacaaccttgtaacttaagggagtttgtatttatctacttattacaacaactaatgtttggcatacaatagaatatcaatatattgtcttacacacgctaagattaaagtagcagtttcatgtccaagtgggacgcactgagattacagtaaatctatgtttcaaaaaaaaagattacagtaaatctcctagtggatccgttgagcaatatacgatgagcatgtcgtccatcgcagaaagtgaagcaatatcctctgagagaagatcgagattgttctcaggttaaataggagcatgctgagaacttccaactttaggtcttgcctcatttgtaagattgaaatgagcttcatatcttggttagaagactttttctccttgaaatatttctgatataggagaacaaggtgttttggtatacggcaatcttaagcaacatgataattagatccacaaatgttggaatgcttgttgctgttgtcacgaggttgtggtgccttaccctttccttttcatttctttcgactattggatttacgcctgttgttgtgtttgctttttccaataagattatgttgattcagtatcatgtcctccagaaggatagtatatagagttatttctatcttctctgcccatgttgactctttttttacaaaacttcaacttagagcgaatgttatgtattttgccacaattttgaaatcttgtaggcttaagtgcttccactcataactagcattaggccagatgagttccttttgatgatcataatgttctttgagagctttccataagttgagtgggctcatctccaacatatactcatgtttgagatctttatggatatagagcctaagaaggaaaaggacagtgtttttcttccggccctcaattggatggatccccactgttgggtttctcaattgcattagaaatcccgcaagaagcaaaatttattttgatatccgaaacccaaattgggtacttactccaatcaagggcaagttcatcgaactcgttagttgccatgtccctacaatcatgactaacattactaatttacatagataaattaataaaacattatatcgaagttgtaatctcgatgcgaattgtaagacctcataatttggcatgtttcgaaaattgtaggtaataaaccttacaatctaagttagaattcgaaattaggtggcacaatgtggataatctccaagtaattagacagtggagcacatatcttaatagtgagcaagatgaacttgctgcctaaaatatggtctctaggcaaatatattttgataaacaaccgcagccaatataggactccactaccttgtgcgcatctagatttcaaataatctcatattttcaaaacatattatcagaataacacatgtggttaattattgtaagatgtagatctctttatgatgggtgagatactcgttgcctagattttgaccattgtagccaatgtgtaggactccatctgggtaatcatcttcagatgtaaaacacttaatgatgggcgagatactcgatgcctaggttatggtcgttataaccaaactagggctccatcaacatgtggtttaacgttatgaccaaactagggctccatcaacatgtggtttaattacaagtcaaaatatgtagttgaacatgcattaaattctccattaatcatgttatacataattaagagaatttgctaaattaaaataaaaaattaaaagaattttgcaaattaacagagcgagtaagtagagtgtgtctttaaataatatgcaaaaggcattttattaaaacaacaagtaaaggagggaattaataaacacatatgtcaaataacatataacattaggggtctgaacgaccattagataattgttttacaactgatgatctgcttacctaaattaactaaaatgatagggactaaaagttaaatttgctaatttaattaaaactaacattaaaagaaaagaaaagaaaacaattataggggtggtgggtcaaaatcaataggattcagcccaccatcgcagcggcgctagcccgacccaccaggctgaacaaaagaagcatggggcatgggggttgccccgcggtttatctgccaccgccgagtccaccgtcgccaccgcccgtatccatcatcgctaccccttcgagtctgggcaccccttctcccgaagttatggggctagtttaatagaagcccaaagaggtgcatatggtacccaaataaggataggatagatatgtcaaaagcaggtctgatgcccctgaccctatcttgattaaaaccgaaaaccctctctaaggtggagccaagttgaaggtgtcattcaaagaaaaaatgggaataaaaatccagaacccctttttgactctgtacccttgattccaccgccgctgtccgcacccaccatcactccagtgttcgccgctgccacgtccctcctatgtccatcggcggcttgccagccggagtttggccaacggcccccactcctcatcggagtcggagtctggtcgaacccgtatgtcattccccactctgttcgggagtgtgaggctcgaagaaccgtgaggaacgacggggaaggtgctgtggaggccgagggcaacgtgctgcaaaggctctggtgtgacagcgagacgatgacggagtgaagagtggtggctcccccgtgtgtgtggctagggttctgatccgaccgaaacattgtggcgtgggagttggggagcggcgtcggattggtggctgcatggtcggtcgaggtgatggaggtgcgatcaatggtggtagggcgatgaagagcagagccgacggcgattccatgtacagcgggagggagcactgctcaccggcgaccgtcaccactgcagtccatccatggtgagtacaaaactatacccctggacatggatgcggtgggcgccccgacgatcggcgaggtaggggctagcggaggaggaggaggaggaggaggagcgactggagttgcggcgacaacaatgcagcgccgagggtggtggcggcggccaccaaccctagtccggcgcccatcatggtgatggtggcgactcctcatcgagcgacagatgagatggcaaagacggtgagcacgatcgtggcgaggaaggccgagaacggcatcgatcattgaattgaaggtaggcataccttctttccttgttcttctcgtcaagagcaaagtgctaataaccttctgattcggcaaggataatcttagtcagacccgtaccctttttcaacatgttatcaacactttgctcttcacgagaagaggaggaaagaaagtatcccaactttcaattcgatgatcgacgccattctcagcctttctcgccactatcgcacttgctgccttcaccatctcatctgtcaatcgacgaggaggccatcaccatgacgggcgccgaactagggttggtggccgccgccaccactctcagcgtcgcattgttttcgccgcaactctggtcgctcctcctcttccactaccagcccctgccttgccggccgtcagggcaccctgccgcgtccaagtccaaggggtacagttttgtacccaccatggatggatcgcagagatgatgcccaccagtgagcaatgctccctccttctagagatggaatcgctgctggctccgctcgtctccctaccaccaccgattgcacctgcaacacctccaccaaccacgcagccgccaatttgacaccgctccccaactcccacaccaccgggtttcggtaaaccggaaccctagccgcacgcacgggggagccgccactcttcacttcatcatcatctcaccatcatgccagagccgctgcagcgcgccaccccggccttcgcgccaccattcgcgccgttcctcatggttctccgagccacacactcccgaacggagtggggaacatcgtacgggtccaaccagactccgactccgatgaggagtgggggccgtcggcctaactctggtcggcaagccgccggtgaacaagggggggacccggcggacagtggagcaacggtggatgcggacggcggcggcggtggacacgaaggggaagcagcgatgggtgcaggtggtggcggcagaggactttgccacgcctcttttgttcagcctggtgggccgggccgacgccgatgcggtggtgggccttgttgatttcggcccaacacccctttacatgtttttttttcttttctattattttcttttagtgttagttttaattaaattatcaaatttaaattttagtccctatcattttagttaattagttaagcagatcatcacttgtaaaaacaattatgcaatggtcctttagacccctgatgttatatgttatttgacatgtgtttattaataccctactttactaaatttacttgttgtcttaataaaatgccttttgtatattatttaaagacacactatacttactcgctctgttaattggcaaaattcttttaattttgtatttttaatttagcaaattctcttaattatgtataacatgattaatggagaatttaatgcattttgactacatattttgacttggaattaaaccacatgttgacattggtcacaacaatcatagcctaagcagcgagtatctcgcccatcattaattagtctacatcttaagatgattacccagatggagtcctacacattggccacaatggtcataatctaggtagcgagtatctcgcccatcacgaagtggtctacatcttacgatgattacccacatgtgccattcagtgaatatatgttttgaaaatataagattatttgaaatatggctgtgcacaaggaagttgggtcctaaacaatggttgtggtatatttatcagtatatatttgcctggagatcatgttttaggcggcaagtatatcttgcccactattaagcgatctactccacagtctaattactttgagattatccacattgtgccacctagtttcaaattctaacttagattgtaaggtctattacctacagttttcgaaacatgaaaaattatgaggtcttacattttgcattgagattacaacatcaatatcatgttttattaattaatctctataaattaataatattaatcatgattgtatggacataacaactaaagagttcgatgaactggccattgatgggagtaactggcttcggatatcaaaataaactttgcttcgcgtgggatttctaattcaattgaggaacccaacaatggggatccaccaatcgaggataccaagaaaaatactgcccttttccttcttaggctctatatccataaagatctcaaatatgagtatatgttggagacgagcccactcaacttatggaaagctctcaaagggtaaggcaccacaacctcgtggcaacagcaacaagcattccaataggtctggatctaactataatgttgcttaagattgtcgtatcccaaaacaccttgttctcctgtatcagaaatctttcaaggagaaaaagtcttctgaggaaccaagatatgaagcacatttcaatcttacaaatgaagcaagacctgaggttggaagttctcagtaggctcctattaaaccagagaacaatctcgatcttctcctagaggatattgctccactttctgcgatggacggcatgctcatcgaatattactcaatgtacccacttgcagatttactgtaatctcagtgtgtcccacttggagatgaaactactttagtctaagtgtgtgtgagacaatatattgatatcctatagtttgtcaaatattagttgaaataataagtagataaatacaaactcccttaagttgcaagtttgtaagatttactagtcattagagtttgtactattaaatctatgtaaacgtcatactatgtatttgatgttttaaattattgtacgtatgtatatatattaaataaagaattcttcactaagcaagtattctttcactatagatgtctaaggatattgctccgattggagatgaattatgtcttgtggacagtggtaccacaaattctatatacttagggagatcaaatactttcaaactcttaaaaagagagaaggcaaagttttgaccatcgctgaacgcgatactgtgatagttggctctggacgagcaactattacactcctaatgggtacaccaattacaatcgaggatgccttactgtatcctgattcaacccgtaccctactaaattatagagatatccatcaaaatgggttccacattgaaacccatatgtataaccgagaagaatttcttctcttaactaaacaaaatggatatggcaaacgcatttgcgagaaaattccatcttgcacatcgggattgtactatacgtacattaagcccgttgccatgttgcgtataaagtaatttttacaaaaatgttgatgcattccacacttggaatgatcgacttgggcaccccgatatcgggatgatgagaaaaattattggcaactctattagtcatcatttgatcactggaaaatttcccaatcctccataggattttgcattatctagatatatgccgttgatcttacatcattggtaatacacaagatattaatgaagcacgtcatcatttaaagacagaatttgagatgaagtattgggtcaaaccaaattttgcttagatctacaacttgagaatttacctactggaatccttagcaccaaggtgcatatacccataaaatattggagaaattcaatatggataagtcatatccttccaaaactgctatggtggttcaatctctagacatagagaaagatccatttagaccaaaagaacatggagagaatgttgtaggacctgattatccttatctcgctgctatcagtgcacttatgtatcctgcaaatagtacgagactggatttctattagcaagatacagcgctgctcctaccaaccgccattggacttgagttaagaatatctttcgatatcttaacggcgcaagagatctaggacttttctttaaaagaactaggattcgactttaggattcatatttttacaaggtggaactactatttcatggaagtgttctaaacagacctggtagccacatccacaaatcattctgaaataattgcattatatatgagacattacgtgaatgtgtatggcttcgcagagtgattaacaacatattaacatcttgtggtattggttcattagaatcacctacaattatccatgaagataatgccgcttgtgttgttaaaatggaaactgattatattaagagcaacatcactaagcatattgctcctaattatttttttctcatgagcttaagcaacatggagagataaacatcttgcaaactaagtcatgtgataatcttgctgatttattcacaaaatcacaaccatactccacattctttaaatgtgttgaaggaattggtatgacatgacttaaaattttgcaggattcagggggagtacctctctctgggaaataacttattttcgttatattacactctttttcctttgtatgagttttaccctttaggttttctcattcaaagtttttaacaaggtaatatcaaaataagttatatgtcttatcatttcgctttccaccacttgggtttttactaaatgataaatgtagacattatactattttggacaatattacgagttttactcataaaagtctaaaaatagataataatatatcatggtttttctccttatttttcccactaggtttttgaggagtttacatgatgtatctaatatactaattataattatttctaagattgtctttacagatatctggaacaatgaaagagcaatgatcaaaggctggattcgatcaagggggagtattatgaaataaatagatgatctcatccatataaatgatgggatcggcaaccgaaggtttggcacggcggttgtgccaagccacgtgccttctcgccctctcggcgctcctcagcaacgggcttgatggttcccaaccatcgcgcctacggttgctgccccttcctcatctatatattgtaatcgcattgatcaataaaggtacaacgattgtctcgctctcacaatctcaattgccttttcaatggattcgagtaatttttgtctctcactctatatatcatattaatatccccaaggagcagccgtcactcatcgaagctggcttttaatcttatgtgttgcgtagtaaaacctctttgtctataagcctggtttgtccgtagactccttaataggatgaactccgtttggcagtgtaggagcgtcatctttgcagtgctagacaagcaaaggaaaagatccctatgggcaggaaccggagatctcacaagtggaaaatgcaaagttaattgggtgaggacatgttcacagaccacaaatatgggccttgcccctacacctcgagaaattcgtaagagcgttacgaatgagatggctatggcattagttgaaatagctgggaaaagcttcgttaggaatggagactccatgtgacgacactaacaaaatcctctttgcggtggcaacacaaatcaaggtgggagacagaaccaccgtgcgattctgggactcagcttggttcaatggcttgcggcctaaggatgtggcaccaaaagtgtatgcaatctcaaaaaagaaaataaaacactaaagcaggccataaccaacaatcagtgggtgtaggatcttgacttgccgattgtacaaggtatgacaacagacctcctggactagttggtcaacctttggaatgggtccagctggtcgagctgtcccctagtgaagcggatgacatcatttggaagatcacaaataatgagacatactcagcagcctcaacatacgaagcacaattcttcggctcgaccaaaacaaacttcgacatgctgatctggaagccttgggccctagttggtcatgtagaacagagtcctgacgtccaacagactgtattgatctactgtaatagttttcttttcttttcaggctcttgccaagttttgtacatactctttgttctttaatgtatactgtgggggcctccctcactgtgctttgataaaaaaacagactatatgtgagaggttgacgaaacaacacatactgcccactttgcaaacataccttggagacagctttatacctcctggcagaaagcagatacactagaagaatatggaacatgattgcaacgtagacagcgcaagaacaattcaaattggcatcatgagaggcgatgaccacagtacatgattggtgggaagcattggctacatgtaaaggactgcccaagaaaaggatgagaaccctcctgctgctgacaacttgggaaatttggaagaagcgggctacagatctgtagccagctgcagcacggactttaagacgtaatatgtgtatgataggtaggaccatgtattaatagtatagtaagtaactattgtataaactaggaaggtagcccgcgcagatgcgcgggcaccttatttagtgatgtttgaaattttgtaacgaatgtttatgtataggattttttaaaaaatatttttttactcttctaaatctatgtttatcaatatttttttggattgttttgaaagttggtttcgatcactggatgcacggacacgcgttaagaaggtacatgctcctggacatttgtctgcttatgtgactatgcaagtaaggtggaccaacagggacgtcgggtcctttgagggggtttctgtgacatcctagtgcaattaggatgtggtctatgttttttttttatttaaaggatatgatatgtgatgtccataagcattgtgtgcacttgtccataagaatgaaagtgtaagtgatgtgatagcgtaagtgagcgtgccagttggagttggatgcatgctgagctaccttgttctgaaggacgggttgttataaattgtaaacaaaattacttagatttataagaaaaatatgtctcaacaatagagttggttcatatgaaactatcattttatactacatgcgtttttttaatttaaacttttaagtaatattttttccttgtatactaaacatgtccttgtagattttaagatataataatttaagaaattttctattaaaaatatgataatatgacttctttatctaattaaagacatactcacgtacttctatttacttctactacctccatccataaatcaaaggattcaaattttatcctaaaatatatgagatttttaatactactcatttcatccaaccattcttcatttaatttttatccaacattactctaaccatcttctaactctttacataccccttatttaatgatggatatcttagtatttttttcattcctccttaattcctataaaattttaggatccattatagaatggagatatatagtaataaaaaagagcttcattcatagacatatttatcgggaatgctaggggacgggataccattgccccaacgggatagcttcccctccacctccatcagctgcaagagcataaggcacgagggccgagccagcagtggggggagagcggcggcagtggccggagctagagagccggggggagggggcggcagtgatggccggagccgagggagagagcgacggcggtggccagagtcggggagccggcggttggagccagagagcggagggatggggtggcggcggtggccggagccagagagccgagggagggggcggcggcggtggccggagccggcgggggacggggcggggacggtggccggagccgggggagggagcggcggcggtggtcggagccgatgggggagggagcggcgacgggggccggagccggatccaggggatgggagggggtggcggtggtgcgtcgctggagccggaggagggagcggcggcggtggccggagctagggaggaaggggcgctggggcggcagtggttggcggcgtcaatgtcgggtgtgtatcgcgtgatacctggtaggtatcgcgtgatacctggctggtatcgcatgattcctgataggtatcacccgatacctcgcaagtatcaccttatatgtggcaagaatcgcatgatacctgataggtatcacctgatacgtcgcgagtattacctgaaaacgtggtagaatcgcctgatacctgatatgtatcaaccgataccggacctgatacctaaccagtatcatcccgttcaaaaatgggattccgttatatagcagccccccatatttatttgtacctttgagattgatttagctttacatatttgtataggtaaatagacctcgtatacaagttgagaaatataattaagttggtagaaagtcgttagatatctaatggtataaagtaagtaaaaattaaggtggatttttttggggggtaatttttaggatcttttggttaacttaattgttgtaaggaaaacaaagagatgagagctagtggattcgtctcgtccatgaggagggaaccggatacatgtgttgtacatacgcactctgacgacctgatcatttggtagggtttttttaagatatagatctaatagtttataacggtttaaaataagatccatcggtttgggtaaaatgatttttttccttagaatttcttacactttaatttattagagcgtcgtgtggtagcatagaaatgtttataggaatgtatagcagcttaagaacatttgtaagatatctaatggacttttagtatataataatagataattcatgtcatattaattaatatatcacttaataattaaatattttttataattttttatgggttcgccactgaaaggaaatggtatatatcaaagtgatatccggataattttttctaacttcgtcactgaagggtatattcatccaagtgacatataataatttctatatagaaacatatgtacctagagattatttttatatttggttgctagcttaagaaataggaaagaactcggagagacacagaaggggagagtcagagggggtgggacggagtacctatatacatgtgaacgcattatgttttcttttccgaacatataatacgtattgaaaggggaacgtgcagatttttttcttgaagataagatttaatggtaaaataaattaattgtttaaaatattgggtccaccggtttgaatgaaagtggcacgaagcgatgtaggagcttttaccggagtgccaccggacataaattatacaatgagatagataatcatacatatgatgcttataatgtctatccacttaccataattatcaccgttttcactctatattagttagaaactatagttaataaatagctaatttttatcggtttaagtcattggattatttatagtttatagttaaagaaatatgttattttgaattttattgtgactttttagtatcatttaaaaaaaattaaaaaatatgaaacaaatgatatatattttaccggctgaaaaactacatatcaaatattatggaggagtccggtacctgtgtacggacgtgtgaggttcacgtacacgcgagagagagaggagagggtgggattaaattctctttttaatctaattaaatctaatggtctaatagacccaccaatttaaatgaaaatcgggctagatattcctaatatattagaacgccacatggcgatttaggagcgtttataggaatgccacatgacggtatgagagcgtttgtagtatgtttaatggatttttagtatataataatagataatagataaatggcaaattttgctacatgacacttgttatgtgtggttttagctctaggacactgcccaaactcacttttaggggaaaacactccataaacgtggtaatttgctagtggacaccgcgccgattaaaataatattttccggttggggaggagagagaaatcgcgtggaatgtcaaaaatgcccttgggcccacatgtcagctctatctcctatctctctcctcatctctcttttctctctcggagcgcctccacgccgccttcaaggagcacagcggccacccacgatgccgccctcccctccctcctccccgtcgtcgtcggagttcgactctcagtcggagtcccagtcggagtcggagtcgtcgccctcacccttccacgccgtccgcagccaccatctgccgtcctaccggaagacaaagcagagcagcgaggcgcgcgcgcgggcgggtcccctctcctcctcatctggaacggcgagcgcggcggcggttgtcagatccgcgtccgacgcgtcggcgttggcgtccgccaccggcttgggcggaagaagcggctccgcggcggcctcgcggtagtcaacgggctcgggcagcagcagcaccgcctgcggcgggaggtcggcggggcggcgcgccgaggccggggccacgaggaggaagcagacggcggcggcgagggcgagggcgaccccagcgggggccatgctttgctcttgtgattagtagtaatactagtatttgtggatttgctcttgtgattagtactctcaggccggcgctgccgctccgccggccgccgtcctcgccaccccgtgcgagcgcgctctgagagataaaagagagagatgaggagagagataggagatagagctaacatgtgggcccaagggcttttttgacatttcacgcgatttctctctcctccccaaccggaaagtattattttaatcggcgcggtgtccactggcaaattaccacgtttatggagtgttttcccccaaaagtgagtttgggcagtgtcctagggctaaaaccacacataacaagtatcatgtagcaaaatttgcctagatagattggctattacattggctctagatgacttggggctggtatttggctatactattgaacttgtgctaaagaactcccgacaatagctcttctcaccaagattaaagaggagggggaggacttgggtgcgtgctagagcaaagcatccagcagagattgtttcttaagcttgtatagccctttttaggttttaccctctaaagacttttactcattctctattcaaggaaattggcaccgtcttgtgtctgttcattaagaaaaagcagtaacagtcatgctctcatgctctgaagaaaagcagaaaccaacatcagcaaggctcttcgtgggtgcggcgtttcggttcggctgggctagagcaagaggctcatgtcatcatgtggatgcgcacccaaccatgggtagctaccagggctttggcccatttagagcgagtacaatagcaggctgagtgctgtaaactcatgtagaggagagaagagaaaaagagaaggaaagcagaccggctgccgcacggactccaatacattgtgtgtatatgagaggtgggatcatatattaatggtgtagtatatagttataggtaactattacatgaataagctattagattgtagtatattattatatgaataaactattagattgtagtatatgtttataggtaactattacatgaataagttattaaattgactattgatgtattgaagccttaaacttgctcttaaagatgaagtagagagagataaatgaagatagagaaagaaagagagagatcgtgagataccatgagttgggtgcgcatcgtctgctcaccgtgccgggtgccaatgagaagagaggaaggggagtatctaaaaaactgtcacaagtttgttgggtcaaaaacaaactgtcacaagtttgttgggtcaaaaacttatcattcagcagttcagcttgtgggtttgcaaatcctgatcgtccatgcaaagtaatggttgggattggccaatggcacggtgctgttgaaacagagaacggccgatgatgcgcaccgccgcacccccagtagccaacgggaggaagcaaaaaaaacaaaggaattaggaaggaaaaaagaaaaagaacaattgaagagaggaaaaaggaaaagagataggaagaaaaagaaaaggatatggatttttcttttcggaaaaattccaaatttggaggattttggaaaaaaaaaattagaaaattttatggattgggaatatttaggatttgagagaattcacggaattgagctccacttccaaaagccaaataaaaatcaaataacaaacaatagaaaaaaaaagagtggcataattaatttatttagtaaatttaacccttttttatttatgaaatttctattaagctattttaggcgaataaatattaatgtgaattttcgaaattaggcaaattcaaaaacgtgaaaagcgagacgtggcattagtcctccaccatccgatctctctttacgaactcttcttgattggttctttccttccccgtcacttatttgtcaaaatcgtaatagcttcctttggtttctacaccatcaccaccacctccatccctgctgccactattcctacaccgttgtcaccactatcacttcttccctactacaagcaaagccggcctccaaccaaaagaaaagaagaaaaaaggttccagtttctcccaaaagaagtactcccaaaaataggtaaactacgagaccaaagcattagaacttctctcgtgttccccaaaatgagacttctgcaagagctaccatccatcagcttcctaattcctgtcagttgtttttcatgaaacctgaatgaaatagagaacggttttgctagctagctgtcgacagttttggaggccaaaaactttcgattttctggccgtgcgatccgcgcgagatgattttccgccgtgcgatccgcgcgagatttggaaaaaaaaaatgtacgcgtgttgtgcttgcaggggctcgaacccagggtctccatcctggaagccgtgcgtgctagccacttgatctgctacatgtttttgtaaagtttaatgagttacattttagttatactccagttataccctagttacactatagttacatttgtaactacattgtaactacattgtaattactatgtaactgcactgtaactacattatcatctctatataatttagatataatgttacatatattattttaatacttatatacgagttacattatagttatagtgaaattatattgcaattatattatagttagatttgaaagttttctccttaaaaaactttcgacagttctctagatagtcccaatagagaaagcatttgaatgatcatatgaagagaacgagcagcatataagcataaacacaagtaaacaagaagctaagttagttcatctagtcctttttacttttacttatgaaaatcgagagatagcaatatgtgttttgttctatcctgattcagcagattacagaacacagatatattttatattcatgtcttgattcggcagatgattacaccatgatcttgttatgaaatggcaagcttcatttcaggcttgatacgttggtactccaatatttttaggactaaagaatgacaatggttcatcataatgacaaagctgggcatcctttaagatcttacaagacaccatgttttgtacgtagaacttctagtttgcacttaattatgtctgctagttcattatagacgcaagccaacagaaataccggcatactcccatataacctatctgtattttgtttaaagcaatgtacatggtatggttactttctatcaatttatttcatcccaacaaaaatataaaagcagggtcacttgtcataaacaggaaagcttcatctcagacttgatcgccagatgatataatgttttttttttcaacagttaacatgatgacaagactgggtgtcattcagtttcttaaatattatgtttactgacaaattgtagtttgcactcagtgatgattgctggctcggagaataataatacggaacagaagtaagaattttcattggcatcaacctaatacttggtaggacacgacagcgaagggtgacaaagcaggtcgaagaagatgaggataactaggaagaaaacatatcttctttttcagaggaagaaaggtaccctacataaaaaagctgtgtttaggcttccactattgagttaacctcggttcttttgaagttggaactataaacagaatgcttcaacagaagtgatcagccacaatttgggtaccagcctaaccagtgacaacgtctggcacatatagtacaaacagacttactagttttagctaaacacatgaaaggttctattagaaacaaaatggcacacacgaggtgggtatttactgcataaaatgtctaagaggtgagtgcacgattatttctgtaggatggacaccttcagactagaagggatgacaaactggatatacgactaatagtggatgaaacaagaagcagtagtggagagagtacccaaagattgtttagatgagaacctggtacatcatctgttctaatcactgctcgaacgaaccaggacgtctgccaaagtcttgttttcagcaccttcctccttgcctgaagcggtacatttaatcatttgtacaagtaaaacatcacaatagtaacacagaacatactaaaacaatatggaattctctgtatttaaatataaggtttgagctagcaataaaactcttcttgtagggtaggtaatggaaaattcagcacagcgaatctataattggcttaattacatgaataaagttgttatgaataactttcaaatggacagtcttatgtgtgatacaaacaatagacatacctgatatatgcaaataagttagcttgctaatttttggtccagggttacactctttaactaatatagttcttgacaagttggagaagtaaagaagtaagagaaatacttgaaagaatgagttcatttgctaattttaggtccagagttacaccctatctgataaaatacttgactagttagacaaatgaagaaatccttaaatggacatatcatctgtattaaactattaattgtactctatgaacacaaaattatagaaagatggaaatagaatgtggatcatgtggtataaattcacaattcacaaacattagattattatgagttccaacaaatatatcctcaaacatacatggaagggtttgaacgattatacaacagaacagcaacagaaatatatgtatataagttgatagttgaactactaaattccacagcatgtgaggtcattgtcctattccataaccaagataacgagattaacagactataagatgtcagtttgacgaagaatactgaaaatgcatgtaaagcaatgctataatgtaaaaactagcaaatgaccagcacagagaacaaattgtaactagcaaataaagaggacaagttgaacatcacctgcagaagggatccgacttgacccaagccaaggtgggagcacacacggtaagaaggtgccaatgagaaatgttcgctcatggaactcacattcccccaaatcagaacaccccaccacctccctcctgtccatgtcgacggcgaggacatgatctccgacgacgacgcacacgacgctggcattcaccgggtcaattgcacagatccaagggattctatcctgccatggccgtccagctgccgcgttctacagtggccggccaagcgccacctgatgctcaagcgtccagcagccgtagtcgtcgtcgagggcgaaggagctgagcacgaatggcttcttctgggacacctcgacgtagcgcagcctcccctcgctgaccccaatgcggcggtacatcccctgagccagcactgacgccatgaactcctcccccgtggttggctctggcagcacgctgctccgcggcagctcgatgaagcggagctctggccggtcgctgaacgggtcggcggagaccacgccccagcccagatcgacccaccatattcgtccggcgaaggctaccacctcgtggtgcgagtgtacgttcagctgccgcgcgagcgggagcggcgacggcaagctctccagcttgtcccactcgcctgtttgcgacaggaaccgccacatcgcgaagccccgatccttcccgtcgcggccgttcccctcgctgagagatgcgacggcgtactcgtcgggcggcccgtgaccgtgcccctgcgcggaccgggtgaggaggcccgggaggtggcagaacatggtcttcttggtgccgttgatgtccgggaggcggaacagctcgccgctgatggggttgcagacgaggcgcgtgatgtcagggttcgtgttgacgccggcgagctcgcgttcctgggtgtcgccgcgtgagttgtggaggttaaagctgaggccggtcaacttcttgccttgctgctgagcctgagcctgcgcgccggcgcggcggttggcgacgacgcgggccgtggcgcggatatcggtgaagtcgaggaggaggaggccgtcgctggtggctccggcgtccccgacgacggtgcggaggatgtcgctgttgggatcgaccgggggctcggggtcgaggccgacgaggtgctcggggacgacgaggtgggagacggccgggggctgggcgagctcgatcgacgcgcgctccgccgtggacgcgcgtatcctggtgtactgtatcatcgcccacggaggctgcgatgcggccgaggagaggccgcggcggagacggccggaggcggcggcggcggcggcggagaggtggcggggcagcagcatctcggtgaaaaagtgggggttaatttgataatttctctcgtctccttcgaacagagagaaggtgaaaggaattttcgcgtgaggaattacggagttgatgagtagtactagtagttgggtgcagctggcctggtctactgggctcggtccagggatttgaacgacattttacggcaagggctgtgtttatttccacgcaaagtttagattttggttaaaattgaagatgatgtgactgaaaagttacgtatatgacaggttgatatgatggaaaagaactgaagtttggatctaaattttagatctaaacacagctaaggtttgctgcacccctccctgttggtgcggcaaaataaattttcggaaaagtaaaacaatatgtaccacaaaattttaaaaaagggcaaatgcacaaaaaattttaagctacgcatcagagcatcgttttgtcatttttgaactttgcaggtcgagctttttctttctttggcaaagcgtctgtacaaaccgaaaacattatctgctattttcagggattagcaatgactaacattctcagggctactgaaattccgcaagaccctaaaatcttaacacatttgcacatactttctcagtcccaaagtaacgtaatcattttatttttctatgtttctatgtttcataatacaaggcacctctttcttaccacacctctttcttcccaaaatttgtttttctttaaatcatctaggttcaacatctctaatcctacccatgtattgtatttattgagatgattcaaacaagagtggtaataattcttttaagtctttgactatactaatggtggttatgtcgagaaaataattggaatggcacctctattgtactgccacgtactccctctgttccaaaatgaatcaaactcaagagatgaatctagacacacatcctagagtttgagattttttgggacggagggaacaaacaccaatttacgtacagtattcagacagtcacactcacacatgctgaattttgcattaacagacaagttgtgaatcaacatctaagacgtgctcaaacacatggcatttttgcccggattccaccttcaaaacggactcaaaatcttctgccaacgtcattagccgcagctcaaagccacaaactcattagtgtctagggaacgtctgcctagctgcttttaagtacaatattaatcagtgaaacccaaaattcagcgttcagccaacgtttagcaaacaaagaaaaagagggggggggggtggagtttgtgattgcagcacccaatgccattgtagcgttgcttcataagaaagaaagacttccaagttcatcataaattcagaacagctttcacaaaacaacttcagaaaccaacagaacagatatcgcctgttaaattccatagacctggagagaatgaattaagcattagcccatctcattaatgatgccaagagagcgagtgctatgagaaagaacctatttttctttgttacaatatggatgcatgcaaacagaaataatactataatcccacacacctttttctcaattttatataaaaataggcgtaatgtttattttctatataccatttctttgttccataacagcaaatatgtacatctgattggcagatctaaaataaaacacgatagccctaatttttaatatgctcaacatttaaatccgaagtgctactaaaagaccacagtataggaatcatggactatttgaaattgaagtagccatctggtaaattaggctgtcttgatctgaggtaacacttaacaaataatgatgggtagcaaaaagtaactaatcaggaatgcagtttccttaacacaggaaagaatgaaatagatgatggtttaaacaatgatagctaagtaccaaatatacattatatataccatttctatggtgcaacaaaaactaatgatttcagtcacttgtgaagaaacaggaagctatgaagttaataactcatgataacaaaaacagttatttagttttttaatacgcaagctttatttaggtttccatctagataagttttactggtacaacgcgaagttgattctcggttataatgggcagatcgaaccagacaaatctgtacagttgatgacaagagtagggcacggtaaccataattatttgtacactatttcacattgaaatttaaagtaccaatagcttaaaactgaagtagtatatcatatcatgttctacagtacacactacagaaggactcaattgacgctacaaacatatatggtcagcaaaagtaactagtcataattcttgtttcattaacaaaggaaaggatgaaatagattatggattaaacaagaatagcagaagaaagaaccatatgtatttgcttcttcacctcaactcttcatatccctgtctacacgaaccaatgtgtctgccatggttttgcttctgatgctggccttggtgcttgaaagtgttcctacagtgagggagttgaaccattataacacaagaaatggaaataaacacttccctacatttgtttacaatatgaaagagcataacatctctacactgaaagacatgcgctgtaaatgagtttgtcccatcataatttagctacattaggttggcacagaccacacaacatatgcatcaagaaacaaaatggaattgctaacttgctatacatgttgactgcaatttaagcaaatctcagcatttaacattgcacgtttccttttaatgacttcgtaaccaatttaacagcagaggtggctcatgaaacaataacattctcacaagcctccaaccacatcgtttagttttgacgggcgcatgcaagacagggcttttcccccgattcctcccaaatagaggagattccaacaatctgattccaatgaaaaccagcaacccaaactcgtctagggatctctgctcagccaattttaagttcggtatgcatcagcaaaacccaaatataaatgcacatccaatgtttccccaaaatgacagttcggagttgcagcaccaattggcaattgcatcataatacatcacctcatagaaaagggtaaaaaagtcctaatccatcagaacagttctcactgttaaatttcagaaaactggaaagcaaaagttatgatttgggaacatctcattgatcaggcaagggaagcgagtgacaagagaaagaatcaatatttattggttcatcatgaacacaagcaaacagagatgatattatagtcccatatagctggtcttgtggtgaatatgagacatccatgtggtagataaaatggatcaaaatcacccacggtagtatgaataggagtgagaagatagtattggaaaaagttgattggccatacaaatcaatagtttcttaatatactaccgatattgcaaaacatagtataaggcaccaaaccactcgccattgcattgccacagatcacacgcgatgcaatcatctagaaacataataagatggctaagcacattaactattgaaattcaagaggaattcaggcagttgacaattatcacttctgttttctgaaaaatcaacatgcctacctaaattcccagagattattcatgaaaacaaaccaaccgaccataacatatgcatactcatgtcgcaggtaaaacatgcatatcaaaataaagcatgagaaagaagagaacctgcagaagggatctggaattcctcaagccacggtgggagaatacatggtgtgaggaaaccggtgaaaggcgaaaatgggccagtgctgcaacctatctgcgaacgtccgagcacctcaccccgctccatgtccacggcaacacaagagtcaccaattgtgaggtacattgtgctcgcattgagtgggtcaatgacaccaatccgtggcgtgtcatcctcctccgggtctgggtggcatccatccaccccgagccggctgagcgctacccggtgttccagcgtccagctgctgccattgtcatcaagggcaaaggagctgagcacgaatggctccttctgggacacctcggcgtagcgcagcctcccctcgctgacgccgacgaggcggaacctgcctagcttccgtatcccctccacgggctccgtcacactgcccctcggcagctggacgaattgcagctccggtcggtcgctgaacgggtcgacggagacgacgccccagctcacgtcgacccaccacagccggccggcgaaggccaccacctcgtgggagacgtccatctgcctggcgagtgggagcggggacggcaaacccaccagcttgtcccattcccctttctgcgagagaaaccggcgcatggcgatgcgccggttgtcttccccgtccacgctgagccacgcgacggcgtacctgtccggcggcccgtcggggcggtcagattgggtgaggattccggtgaactggcaccacgaggtgtccttggtgccgtcgatgtccggcatgcggaacagctggccggtgacagggttgcagacgaagcgcgtgacgtcgaaccgcctgtcgaagccggtcatctggcgcgccaggccgttggggtggacgccgacgacggggcccgtggagaggccgtcggtgaagtcgaggaggaggaggccgtcgccgctcgcgccgcgcacgcagcccccgaggaggcgcatctggctcctggggtcggtgaggggccggaggtcgaggaggtgcgcggggacgtggacgtgcgaggcgcgcgggggctcggcgagctggaacgacgcgcgcagcgccgccagggagctcctggccgcttccacgtggaagatcatcgcccaccgcgggcgcgagggcggcgcggccgtggagagggtgcggccggcggcggcggcggcggataggatcgagcggcggaggcggagcaggtggtgcattttggcggtggccggcgacgaggtggaaggggggagaagagggagggggggttttgctgcttttgtttgcggcgagcggagaaggcgagaggggggcggtcggtgcacgagggcttggttcatggacgggggcggtgcctagatgtggacccaggtgggttcacatgttagtgaaaggacgtggcttacgactgcgggaggcggagaccggaggggaaaaggctcgccactttttgaacgcattaactgccagatggcagatccccactggttgctgtgtgtgcttaatcccgtcagtcactaatctcccgccaaaacgctctggtccttttgggcccatacggcccgtatggttgggggaagttggattgagagtttagagcgacgaggctattaactattttgtttggttggaagatatgtaaattttggtgggatggagataagttttgcctaaacaaatctcacccatccgttttcattagaaattgggaaaggattcttcttagttaggagcagctgactttagatgataactgttcggacaaactgtggtggactctgtccaaaaatgggaaattcactgtgaaatctttctatagagctctcaaaatgcaacaggtcaattgtccacataaaaagttttggaaattcaaaattcctctgaaaattaaaattttcatttggctttttaccagaaacaagattcttaccaaagacaatctttttaaaagaggttggagaaaaggtgataacaaatgtgcttttttgataaggaggagacaatccagcacctgttttttttttttgagtgtcctttggccagaatgttatggaatgtcattgctgtagctttgaatctcaaaccttgtctaaacagaataaatctttttggttcttggctcaataatatagagaaattcacaaaaaaaccttgttgttactgggatagctgctgttatctggactatttggaagtccaaaaacaaagtttgttttgagaataaatttcctcaagatcctactgatttagtgtatatggcttgtaatttggtggattcctagacttgtctacagaaacaagaagcaagtcgaagaagtttgcagctgggaaccatggtactaaggccctgtttagatgggactaaaacttttaagtccctatcacatcggatgtttgaaaattaattataaatattaaacgtagactattaataaaacccatccataatcttggactaatttgcgagacgaatctaatgagcctaattaatccatgattagcctatgtgatgctacagtaaacattctctaattatagattaattaggcttaaaaaatttgtctcgtgaattagctttcatttatgtaattagttttgtaagtagtctatatttaatactctaaattagtgtctaaagacagggactaaagttaaaacaccacctaagacaggtggcaagtgaagtattcaattcaagtcatggctggcgaggaggcatcagaagaattggaccagcttagtctctccctggcagtttgatcttgtttgatactccttggaatgtctgtttaatccctagtactctgtatctaggatcgtcatcttggttaggcctgtaatggttaggctgatggtcttctgttcctgtcccactcagtggtcaggtttgtcgttagttatctgttttttactacttctcaagacttgttgtaatgactatcatttctacaaagagaaatgggggcgccatcgccctagttctaaaaaaaaaatctaatattaaactaaactccatatcaatttccaccacctctaccaaacaatatattgggactaaaaatcaaattcccattttaatctcactatccattctctcgtctaaactcccagtccccttccctccagttgccagagtatgagagaggaaatgggagtttagaatattgagcattttaatctctgctccctcagtttcacaatgtaagtcattctagcatttcccacattcatattgatgctaatgaagtcttcattagcatcaatatgaatgtgggaaatgctagaatgacttacactgtgaaacagaggaagtagtttggttggagggcttgggaatttcgaagggattgggattgggaattaatccgtccaactccccaccatcctaccttgttaattcacgagacttggtgagaattaaacacgagaagtctaaaacacccctcaacaatacccctgcaacctccaccgtccgctggtgcgagaaggcacaagatgcgcaaaacattcccattcaccgggtcgagaaggactgaaatgtgcgaaaaatcccctgccactagcacgaggagtaaaacgtgcacaaaatcccttgccactcgcacgagaagaagtaaacgcgcgcaaaatccccatctcaatagcacttctctcgccctctccgtcgggtggccatcatgagagggaataaatcctgcgaaatatcaccatcttagcagcacttctcccattcacccgagaaaactacaacctttctcacacaagtttgttgtgttctcgaaaactccccctctctctcctatacagatccagaccgtgctgctaggtccaccgctgtcatgccttgtcttcgagtcggtccaggggatggaacataggcaacgggatgtgggggcggcgatggagtagagaccggatgaagcctagcccccctcccctcgaaggaaggagagagaggggtgacccactgacatgtgtgtcccactttttaaaatcttttttcctgattgacatgtaggccccacatattttgtttgaacttttatttttcttttaaatcttgcttctatgccatgtcaacgtcatgtgggacgaaaccaaaacaaccgtccaaaccaaattgggaccttgtatgcactggtgatacgttaaagaatgttattcaaactcgatgttaagacgagagatctaaagtaaacttattacctttaacgtttctagtggaccagcccatcttcctacgtaaacccaacagccggcccactcagattcccatcggcacggcacgtctccccctcctccgcacaagtctcggattcctccgcacgcagcttcccctcccgaagctccccaagtttgaaatttcgaacggtcggcggcggaaggatggagagggctaccacctccggaggcggcggcggcggcagccagccgccgcggggggtagggctgccgttggtggaggtgcaggcggcggcggcgtcgctgcggcggtcggaggtgttctacgtcgtgaaggagctcctcggcttcgtcctctacatgcaccaccagatccccgcgtaatcccccctcgatccgctcccatcctatccccccgcccttctctctttcaatctctctccctctcccaaatgctggggaagtggtcggtatagggatggatttggtgggtctctatgtgagtttttagcatctaggttacagtctaaacaatttgttcgagttcgaatctaattttctagagcaattgaggtggtactgaacttcggatttggtcaccagattttgatgggttttgttctagcaaccttagtgcttgtggatctaattgggatacaagttgcattgcatcaatccatcaaataggcaatggcctgactgaatggctgttctgctgtagcagagttgagaattccattaattcaaaatggctctagaaatatgcgtggcgttctggaccatactgttggcaatgaattgggcaacttcatcgatgatgatttgaaggttcacttttgtaacaaattgcttgcatttcctttgcttcctgggagatgtttggtattgatatgtggccttaggttgtgcattctctgttagatgaatatgactgttgattgttatgttattataaactgttaatttgacgagatactttaatttaccttattgtagcgtgttatctactcctggtcctgattacatgtgttggtgcaggtgtggtgttcttgtgctttcgttcttatgttttatgcacataataaaatagacaaaaaaaaattctggaagaaatcaaagtgtgtgtatccgttcttgtagaaatttctgctgtacgacttttttcccccgcaaatatgccaaaaaacttgcatatatttgtattaagaagaataaatagtaagagaacaaagtagcaacaaatatacatacacacacagagcttcaaaagaacaaatggtcagagactttatgtatgactgtttagtttctgtgtatgttctgggctctggttcttcatttgcaatacctgagcacatactcatgaccaacctagtttgtccagtacaacagaataatgttgatgcattggtgtgacgctgttattctatgatgtagggctaattttctggggcttaagttaggcacacagcattgttgtgcattggtgcttgacttctaggatgcgtacatcactgaagatgaaacctttgaagatgaaatctcctgctattgtgttgtttaaatttgttatagcacacctgcactgcaatcaaagaaaaagaatataagtgaacagcatttagcttggattatgtaattatccattttgcagatggccagattatatactaagttagggcagttatacactgctgtatgtaaaattatcacatgaatttgaagtctaatttgtttttctacattttcagggtattgcagaatcttgaaaatgaatttgcaagtttaaaggaggaaatggtaagttttgttctcagaaagaatgtcaccattagcatctacgcagtatttctttatcgagcctattaataatttgtggctatttatagacagagatggcattgccaccaggagaaatgaaaccatctgatcagagaaagtacaatacacggaaaagggaagtaagacggaggatcaagaagcaggagaagttaatgaatggcctctccagcgtattttctgctcttcagaaagcactcgatgaagttcctagcattgaaggagttctcctgatcctcggtggtagccttgtcaggcctctgtttgtctatgacattacaatttctcatggtagatttgatgctggaagtgccaatgagcgtggtgcaagcaaattagcgcagtccgtttctcgaaaggtgagctactttctggcttaatgctccatgaataactatcacccattagatcctagggtgactacatttctttagaatttggtagtttttctgaagtaccatagagttgagatctgaacgttgatggaattcacaatgctgtaacttttagtacctactttggacaacaatatggcaatagcatatctgaaatgttctagtgttgtagttttgctctactgtttggcattttggcatatgaccaaacagtgtaaggagaatcttgctatgtttttgccccattgctaggcttaattctatttttttttacttatcattgtgcatgtttcatcttcatatggtggtcctctttaaataataacatgcatatgtatatgtataggccattcgtgctcttatatcaagtggtgcagggagtttatcttatacaggtactggttcttctgttttactatatactagctctgttccaaaatataagaatttttagtggtggacatgggtattaaggaagtaggtggaattaaatgggagaaggttgtgattgtttgagaagtgaaaatatgtgaagaaattaaatgtggggagattgtgattagttgataagagaatgtaagtagagaagttgtattttgggacaaaatttgaatgctgaaattgttatattttgggacagtgggggtatttgattgggaatgccatcatccttttaccttaacgttttccctccaattgttttgaaggccctaccaagctgtttgttctagtcagatgtccctgtacattgaacttaccactggacttcctgccgaaacgtgattttcgttacagcaaaaaggttttttttttttctgaagttagtttatgttttttgtcagcttccttttgcaaaaagatctaatgtctccctgattaatacatgagccttaatcttttcaacacaggttgtacccctccagatgtgtataaaatgcaatatagcaggcatccaaatagataatcaacaaataacatcaattgttgatgcttcaagatgcacttcagaatctactatttctgaggttatctgtaaataattctggtcatctgttcccagttacccatttatcactatttgctttctgctgctatttcccctcctgtgtaatggtaaccaatagttcagtattgtcttaagtacggcaaaccttccctagtactatgcaagatagagtgctcttcctgagtccatgccactttattttcttaaaatcaaggcaggagcactgctgaattctactagaagaggtgaaattatgattacaagaagcccattagtgtaatcttattaaactgcatatgaatcttttgtgttttgaaggataaaagaaatttaatttaccaacatttgaattatgtgcttttgtgttttgttggcatcaagtattgcaaagaattattttaaggttgatacggttaggattttttctcagaaatcttacccattttagtttgttatgtgtacactggtttccttctattttttcccctgaaaaacatgtatgtgttttgatgacccctgttctgtttttagacctttgaacttccccctttttcagtctattaggcagagctcctgccattttcgttaaaaaaagaaaagagtgatctccagcggatcttttcttttgaacttaagtaaattcagttaacgaatattcattaattttccaggttccagtgtaagcatacgataagaggcctaccttgcaaggcgtcattagaagagtgatatggcccaagcatgttgaagacgcccagaaaacagtggatgatgtagcgatataactcctgttctgactttgtaaatgcatacggcattccgcgaaggatcatcattctgtatgttcgttccatttgtacagtgctatgaagttcagttcgctccattgcctaacaaagaagaatgaaaaacaagagcacaattaaagtttagtgaacctgaagtattgaattgaatctccacaccattttacttatgctcagttttattgcgagtttgcaacactacatatttacttttgaaactatgattgtgtttagaaccaggggtgtaaagttttggcatgtcacatcggatatacggacatgcatttgaagtattaaacgtagactaataacaaaacaaattacagaatccacctgtgaactgctagatgaatttattaagactaattaatatgtcattagcaaatgtttactgtagcatcacattgtcagatcatggagcaattaggcttacaagatttgtctcgcaatttacacgcaatctgtgtaattagttatttttttcgtttatatttaatacttcatgtatatgttcaaatattcgatgtgacagagtgaaaatttttaccaggggtctaaatagggcctatatgtttataagtagcagcatcctataactacataattgccacggactatatcagaaaatattgattttaaaagtccttatagccaagaaaaatcattcatcacaagtgattaaaaagtttgaaaaatccatatagggatctagactctagagcactatgctaagatttggtagtaatataagatgttctatagttagacacggttattaagaaagtgggtagaataaaatagggagaggtatttaaaaaactagagttgattttgtactcaattcatttttgcacgtcttctccaaaaaaaaaaacacgatgtacttcatccaggcttcgtccaagtctgatccggtgcagttggttggctccgaagcgtgcacgtccgtgcgagagtagagtaagagagtaaacacgatcatttcgttcttgcaaaactcacctaaaggaaaattaatctctttttttagaacttttttatctcttcgctttcctactggagcttgagggatcaaaaaggagaacgactcaagaagcgggtgtgctctagtctctagacaagtcgcctatgctcgctaattctcacggtttcgtttgatctggttgtagattattattggcttcttgctgcgtatcgacgcatcagggtttcgtcgatcttgtcggcgcatcagggtttctttgctctgcttcggccatgtctttgtggatgcgggcagcctccatcggaggatatggccatgggattggtggatggtttggatgtttactcaattaaatgagtaaattttacaatgggccacatattttgaccaaggtttcatcatcggctagggttaaatcaatgttttcacttaacaccatacatctttacataagtcttcagtttggactagggtgagcaaaacaagggaatatgtgagacagcttcatatgatttacacagggataattataaaatgcaaaacatttcatgttttcttccttcttttcttttcagtgtgtggtagttaactagttctattttctattttatttttattcattgtgccccaatgtatatatcattttgtgccacttttgaacatgttcacgtcattattttagtgtgatctgctgaataaaaagttgttttccgatttgctaatttctttctaaagatatttgtcttaatactgtggcactaaaattgatgattttaactatcttttctctgacaactacctttgatgtgttcaaccctactccaaagtgccaactaatgcaaacatatatggtgttaaggcctggtttagttcccaactttttcttctaacttccaacttttccatcacatcaaaactttcctacacatacaaactttcaacttttccatcacattgttcaaatttcaatcaaacttctaattttggcgtgaactaaacataccctaagtgaaaaggttggtgtggaccttgcccattgtgaaactttggtcaaaatacatggtgcaatgtgaaatttactccaattaaattgatgtgcgtcaatttcaattttagatttgctcctcctttgatcatgtatgtttgttacttccctgcagcattgcttgattgggaagctgaatcacctacaagtcttccctggtctatagtatacaattttggataaccgactgccaacttttagttcatctaattttagtttccaagatttatcttgtcaaaaaaatgaatctcagtcatgtaatatttatcataattttagtttttcccgtgacaatgcacaagcattttgagttaattctaatgtctaaaattggatttcataaataaaggttgtttacttcttacatgaaactttttatttaacaattgagatataaaattatgtttcatgtatgtgggaatgtattctgcgtttgtattgattttgaacttcaactctatcttttacattatggcaatattaattaactggacaatcaacttaaaattcttaggcttctcatccattatcgaatcttgagaaatcatatccctcatccaaaattgagagttgtcaacatgtttatgcacaaagttgagcgagtttgttattttgagttaggatatatcatttgaacatttaactcttttggattttatttaaacggtgcccctcttttcaaccgaacccaaatttcccttttttttataaaaaaaaatactcagcacgtgataggagggttgtgtttttacccttttttttttcccctatacgcgtctcacccagtcgcccgaccggcctcctctcctggccacggcgacgcctcctcccccggccacgccgcgaataccttgggtctctgcaatagtccaataccgatctgcggcagctactctgctcgtggaggagagccgccgccggaagccggaaggccgggtagcgccatggtgagatcccgagaaccctaatcctctccgatgattggattcgatggatctggcgatctaattcgtgtttctttttcctttttttttggtggggggcggtggtttagtcggcgctattcaacttcaattcgttcctgaccgtggtgctgctggtgatctgcacctgtacctacatcaagatccagttccccgccatcctcaacgaccgcaccgggtatttttttcttcgtttcactgtgaacttcctgatctgcgcgatttgttcttctttttagtcgtggaggcaaataatctaacccggaaaactaaaacagcgagatgtatgagaaaaatctatgtctttacagtggaaattgtgtctttcaggcgctgtattaacatgagacggctgtgtgcgctgacaaaaataaagcttattatcgtggatgaattgcatatagtttgtttgtggaccggattctctactaatgtggtttatagtaccctgcacgcaattgaattattgttcttagatgttgttcagaatatatacagatgtgtttgttagtgctagttatgcagaaactgaaagtttgcctgtgcatgaatggttgtggacaataaagtaacttagctttggtgactccaacttgatttgggcatgattgatctgtgcaagaaaccagtcaaatcaatcaccaacttatatgccatgaatcatgataataccatgtgctaactgttgtttgaaacagttagtgacaactgtacttgtcactgtgtttacaatttgttcttaacccttatttgaaatgccaaatggccaatggatcttgttgctttaataaagcagaactgtggaaggatatctgttaccatgtaatgtaataagctgatatattcctttttgtacttgaatttctccacagattccgtggtttcttttggaaagcagccagaataggtacgagtccttttcttcttccagctcgaatagcaccacctatcttgtttccattttgctaatatctcctgcatgttgaacggtcatttcatttttcactctgcaccattgggcactagattttttgttggtatatatattatcgaacatagtttcgtctatcaacctcaactgtaaatgttcactcattcaaattgtcagcacctaagttcattatttggtgtttagctgagctcttaatttcagcataggcttattatattatctatagaataatggtatataatacttttctatttagataattttaaaacaaaacaagtaaacgaaaataaatctgaatcatctcaaatttctgtagaagaatgttcataaatacattgttttcttttattttgtcagatagctattatttaactatcatgaaagtcagtagtcttaatttctcaaagaaaagcagccctcctgtgattatgtttgagatcttcaattgccattttttttcagctgtggagttctcgtgaaaatttgctatcatggtatgcttaaactatttagcaaaaagatcctggttagatatgcgttgctttattgtcatggtcctcatggtcaattcaataatatctctgttaggcacataatggccactttaatcttaaaaaacatggtgtccttagagatctatatggaatgaaggatagtgaaagtttacaaaacatttagtgatgataattggaatttgaagtctgacggtgcagcatttctttcttcgttcaaagtctaatggacctgctcatggatgatatcacattaatactaaagatatgctgactatcagccttgatgatcagtagttattcaaccaatgtttttatcacctgctccttttggaactttacttgaaagcaaatagttcctatcagatttcttaccacttcctggttatttatcttgaatggttcttttcctatttgtattgaacttgattaacttggacaaatgaatttttataattctattaaggccaaagttactcagtgagaatcaactataacttattaactgcagctaaatatatattggtggaaacatttctgttttgtaactataattccattgtcactaagaaattcaggaactgctgctagttcatattgtgaatgtttttccacatctggatctcatttattgggttttcaactgtttatatgtaaaattgtaaacatggttgtccaaactgatagttatgtgctgtgggctgtggcgcaaggcccggtaaagctttgtgacagacatggctctgaagaccatgtggttattgtagacctcaagttaattaattgaaaagccagttctttagatatttcataatttggtacacaatcatgtcaattacattatttttgtacagtgataaagtttcttcatcagttcattgttaaaaatccacccatctttctatcatcccactatctactaagaaagaattctggccaaagagttctatttaatctatctctcgatcaacttgtcagccttgaagccttgtcattgccacagttgggcaagatctctactagcatcatgaccatagtgtgtgcataaaccctttgtctttgcctgcttgcccaactacacagcattttaccagagccacgttcatgagggattatttcatttgattgtctggttattaacatatatgttgtatgtgcaagtttttcaattactcaacagtgagataatgttgccaaataacatggtattatatatttatttaatgcatcatttgtttcctaggcatttggaattcatcttttgttggtttttctttatcaggtgaacgcttaagcccgtgggtagctcttgggtgctttgccatggggatatccactattttcttctgaggccttcatgattttaatccaggctgcagaagatttgtaggaagaacagtgtgattattattgcattgttttttgtgtttttggaggagcttttgtttcaattttagctgggatgtggagatacgactatggcaagtgccagttgttactctcagggtggtgcccttgtcaggaaagaagtgatactatggttgcaccatttaatggttatgttgtgtattgaactgtttatgtgcacatggcatgttcagaaaatgcttaaatgctcctaacaggatattgctatttctcagattctgcttaatgctatatggatgcgcaggtttgctgcactgtcagcataattgagcagttaaatgtactagataagatgtacttcaagctgatcgtttgtctatataccctaggcacaaccaatgtgcatgtgtgattttgtcaaggatgcaccattgagcatgtgtggttttttgtcaatgcgcacagccccgaccttggttatagggcaaggtcagagaagatatggtcatccatgtttcttagtgacaggctgggtggatggaatgagctgctccaatttttctttagggtggatggatgagaatggatagaataagaataatatactagtattaattaataataacacaatttattaattacttcctcgtttcataatgtaagttattctagcatttcctatattcatattggtgttaatgaatctatacctagattcattaaca

SEQ ID NO: 6087 - DNA, 12941 bp, Oryza sativa
  unsure (1)..(12941): unsure at all n locations
cacatacagatcgctgtatatgccgccaggtatctgtcgccacggcatggacctctcccccctcgccgttgccatcgccgccgccaggtcatcgccgccgccaggtcgtccccgccgtcgctcggtaacatttacttttaaaaaaagaaatgtgaaatgtgcaattgtggattgtggattgtttaattgtgcatcgtggattgtgatatgtgcaattgtggattgtttaattttgagaatgtttaattgtggattgttaaatggagatttatgtttaaattgggacttatgtttaaattgggacttatgttaaattgggatttatgtataattgggactttgttaaattgagatttatgtataattgggacttttgttaaattggcagctatgttaaaatgtgacttatgtttaagttgagacttatgttatattgggatttatgtataattgtgatttttgttaaactgagatttatgtataattgtgacttatgttaaattggcacctatgtcaaatggagatttctgtttaattgtgacttatgctaaattgggacctatgttaatttgagatttatgtataattgggacttatgttaaattgagatttatgtataattcggacttatgttaaattgggacttatgtcaaattgagacttatgtgaaattgcgttaaattgggacttacgtaaaattgggacttatgtcaaatttttttacgtcaagttggaagatgtcgaacgaaaaggttccatcgaacgcaccaatagcgcctcaagaaggtaacgctcctcaaaattccggtagcaataagcatccaggcgcttctagtgaagaaacgtggcgcacaccaagtgacccgtttccaatggaaataacacaagtcgccccccgcgatgatgatccggactacatacctatcgaacaggccgtaagtgatgaaaatcgttagccatgtattattccctaactatgatgtgacatgaacctaatggtgtatagagttacctattctgtgcagatggtagtccgacgccgctcgaaacgtaaagccgggaggaacaggacagagcaagaagttgagatggacaccgctacgtctgcacctgaacgtacggagacatctacaagtgcaggcgggagtgggaaaaaaagacgtggtgagagaagcaagaataaattacccaaggaaacttacaacgtgattgctctcgatcaggatgggaagcccatcgagccaccgatagtgcggtccaagttcagcaacgcctgtggcactctagtcaggacgcgttgtcccattaatgtcaagttgtgggaaacagtggacgacaacatcaagacacttctctggaatgagttgcagaagtattttgtgttccctcctggatcagaggtcagggggagagattacgcacttaaaaagatgggagatcgatggcgacagtggaagtccgatctaaatcgggattatgttcagaagaatctcccaccgtttacggattatggacatatatcgcaggctgactgggacacgtttgttgcggatcgtacaacagctgaagcattggctttgaggaaaaaaatgtccgagctcgcgaagaagaacaaatatccccatagattggggtcgagcggatacgctggtcacgtcgatcaatggcgggagatcgagcaaagatttgccgcggccggtaagcccctgctggtagaccccatggttgaacgtagcaagaactgggtttgggcgcgcagcacaggtcaagtctcggatgagggagacatactattcgagactccagacatagaagaagtgactactaatttgcagcagatagtcgagaaagaaagatcaggacagttcgtcccacggagggagagagatcagcttactgcggcgttggggacggctgaacactctggacgtgtaaggggtttgtcctcaaagacaagttggaaggtcgggtttccacaagacgcaccaagttataagaagagagacaaatacaaagaacaactatcggacaagatctatgcgcaagtgaaggaacacttctactcgttggcagctgaaaacccgacagcatttccaaggttattccctgatagccagcaacccacacaatccgcacagcaaacaactaatgtacccagcagtgtaggctcagtgcagacaagtaccttccctgtggatagtataactggaccaactccgtgcagtctcgtcgtaccaatcggccgcgctggaaagactaaggaggttgcaacgggtttagcgatacccggacgtcaattccacaacacggcaatccctgaggattacgcaagggtacaggtcgccaaggtccatagcgaccacgtttccttggaactagacatacctgcacctgaggggattgaacttctcggtgatgcagtgaatcagtttatcttgtggcaccgcagagacataatcctgagcgcggccgttcttgcagcaggatcttcaaccccatcctcatcgcaggcaatgactgctgccgctcctgcaccaccgtcgcctcctgaaccaccgtcacctcgacatccgccgtcaccaccaccgcttaggtcaccgccttgccaacctacaccaccacccttcccttctcaacaaccgcctctcccgaccccgcaaccagttcaagcctctcccacctccccaactaaacagcatgctcccccggctccgccctcagttcaaacctctccacctacaccccaatcttctctggtagaagaagtgcacataccagatggtactacatccgaaccaaagtctaatactttggaacctcgtcgtataattccaaagttgatatcgacatacgacccaaaggagattgacaaggacaaggagaagttcatgttttcagctttcaggaattctgagaagagaaaagaacttgctcacgtcttgtcagactcccagaagtcagtactagcggcccaagatgaagtgcaatcctggttatctgccgatgtgcctgaaacttatgagtatggcaagccattcttgccaacttatcttatgaacaagctaccatgggaaatgagggtaatgcacgaatggtatatgaaggcatctaggaaaggtctcggtttcataagcgtcgccgtcccggaaggcgctttcatgagtggtcctaatgggatattttttatctctttccaagacctttacgccctctacaagctagataaaatggacgttaatctcgttgcggctttctgtctgtaagtctaaactctttattacatgttgcacgtttcattcgaaacaaataaaccaaatctcatttcttctttattcattgtacagtatgcaattccacgaagctgatagaactggagcaaaggttggatacgtcgatccaacaagaatatgcaaaacacaacacaccgtagagctgagacaggactgcgagcaattggttggcaagaccccggaagaaaaggaagaatatgtgaagacattgcacaagaggaagaagctagaagtagcaacatacttggcaatagcaatgttggcgcacgccgacaaagatgtcttaatggtcccctaccagttcacgtaagctctctcttctttttgtttaattaatttatcttcttcggaattttctgtctccaataagcctatcttatatgtagagaccactacatattattccttgtatatccgaaagaccaattgatcatatcattggaccccgcacactatgacaaggagacatttatggaattcctcactattttgaatttgtaagtgataaacatttcattactataaattgtttaggtcgatcaccagtcttctaactactaataaaacaattgtttccttcaaacagagcacacaagtactaccgcaaaagaggtggaccagtacatattccatcccagaagaagttatccgtcaggactggctggccggtactatcaaatttataccaatacaactaattatcgaatagtacatatatactaaatatatctactgagatcggtccccataattatatcgcagtgctacaaacaaccaccaggaaccaacttgtgtggttattacgtgtgcgagatgctcagagtaaatgggaggtacaaaacaaccagtaaccgagtaggtcatcgaactcttctctacaaagaaacccatctcgcacacacttctcactgagtaccgttttattttcctttctgtgtgcagatccccgaaatcccatatattgcacaacgattcaaccacactactatcttgaacgtggccgctgacctctgccgattcatccgtcgcgatgtctgcaacgcaagaggtctcttctacgacaaccagagtgaactcgcaatggacgacaaatttaaacctctcagagagtgggagaaagaacatatgcaataacatgtacactacttatacatatgatgaaaaaactgtgccacttgtattatatatttgtatgtaaattacgattgaattaatggttatgtattacatgtttgttactgcggcacttgtcgtatcttatatgcttactactccgaaatacgataataaatctctcaataatttcatattaattacgaatcaccaaaatgcttgaataaagccgtcttaagtgaccgcatgcgaagatcaatcttcgcatgcggctgcgacggccgcatgcgcaaatggtgatctttgcagaccatttcgcgcatgcgggccggccaaccgcatgtgaagatcgattccgcccgtatgcaaaaacgctttctgtagtagtgcgagatgcactatgcactatgttatataccacagagatttctgaccaaatttgttccggcgtacaactatgttgtcttcctaacacgtcgacaccatcattgaaatgctggatgggattagcttcggctgagcggcgttggcgtggtcggggcgcaagacgtggccgctagcgctgcgtgcgtggcgcattgcaacgactgcgaacatagaaaaaataattaatagggacccaatacttaactcaccacccgtgcatgtaaaacggaccgatgtattttcttataactaattaagtatttattttttaaaaaaaatagattaacatgatttttaaaattaagcaactttcatatagaaaatttttaaaaaaaacgcatcgtttaatagtttgaaaaacgtgctcttatataagaagagaatgagttggaaaatgttgaggaaagaacgccaagccctattcgatctctcaggtgagagtattttttcagcatacgcaaaacgtgaaaactcattcgtatataatttattattaataaagtattaattatttaaaatttaatttttaaacaactcccatatagaaacactttaggtaaaaacaaattatttaacaatttgaaaagtgtgcttgaaattgagagtacgaggaaaagaactgaacctaatatgtatacgagatagttagctaggatttaatagtttcccaggaatcgtgggatccgatcgaggaaacatagggtgtgtttggatcctcgcatccctttatcctggctcatctctttcatctaggctgagtttagtctggctgagaggatacatatataggtgtttgtttatttgtattgatttaaccagggtagcatgagatattggtttggtttactgtaccggacggttcaaaagagatcttgtttgattgattgtatgaatgatgaattgatttttttttctttcagggtgagattcctacctagaactcactatttccaccgctaaattcatatgataatttttagagaaatttatgacggagcaaaagtacaataaaaatatcacagtgcttattactgtgtaaccaatggacgaaggaataaacataattcctcaatgcattcgtcggttcctcgtggtgcttattactgtcgatggagaaagaaagaaaaaaaaatcctcgatgcattcagaccctgcttggatacaggcactaatttttacccccgtcggatggaatatttggatactaattaaaagtattaaacataaactaataataaaatatatttcataaccctggactaattcacgagaaaaatgtgttgagcctaattaatccatgattagtccatgtgatgctacagtaaacatatgctaattatagattaattagacttaaaaaatttgtctcacgaataagctctcatttatgtaattattttttattattaatctacatttaatacttctaattaatatccaaacatccgatatgacagggactaaattttagtccggatctaaacaccacctcaatcggctcctcgcggaagaaaactcgccacttaggcggagtaatctcgccggctgttgcgccaggaaactcgacgcccaccacccaacgctccttcaccctcgctgctcaccaaggaatgtcgctcgctgctcgctagtcctcctcccacgtcgctcactgcccaaattgacgccgccgccccaacactctatctgctcctttgtggctggtggagcagagctcggagccactggatctggggccagcgagctcactgccgccggatttggcggtggcgcctcttgcagccgtggaagaaagagaggagcagcggtggccggggaaagtggaggccatcactcatcgcccctcgtcttcctgccgccctattatttgctgcagtcgtcggacctcgtggccaacatatccagttcgttggagttcaagaaggagggcggcagtggcaggcgaggaagatggcggcggcagcgtcagagagtagaggaagacgatggcatggttgagcctcaccaaaccctcgtttttgctctttgagaaagtaatgacgaggggcgaaccgaccccgacgcccgtccgttgcacgtgtgggtgcagcctgttgcacgcgcctggccaggctgagttgtgaagctcgatttgagcgtttccgctcagcctggctgagttgctctttcactagctagtacttaaatgatttttctggacggggacacttataaacgattggaagatctgcatgcgaaaatcgattttgaccgcataagaaaatcgctatttatgcgtgcgggtggtacgcgaaaaatctgattttcacgtgcggggtggttatggccctgtttctttcagcttgggattattataatccagattattggaagtaagttgaaagaaacagacaacttattgaagtagcttattataatctggagcccagcttattataatctgataagctcatttaggtgagctttttccagattattgggtgaaaaattacccaccatgccaccccactctctctttagacttgcaaacccaataatctaggctctaataatctaggaaagaaacaactaactgcttattctactacagattataacaatctagcttatagtaatctaactcaataatctagattataataatcttaagctgaaagaaacaggccaatgtcgccgcatgcaaaaataaaaaaccaaaaaaaatccaaaaaaaccccttactcgcagtcgccgtcgtcgtcgccgtcacggtctctgtcgtcgctgtcgcggtcgtcgtcatcatcgcggtctccatcgtcgtcgccgttgctgtctccgtcgtcatcgccgtcgcggtctccgtcttcgccgtcaccttcgccgtcgtggtctccgccggatccgggcaggctactcgtgtttttgcatgggtggagccaggctgggaaggccgtgggacagctccattgtcgtcgtcgtctttcgtcatcaagcagcagaatagaccaatctcatcgtcggcctcttgcttcagcggcgccacggcctccttcggtgtcacctcgcgctccagccgtccgcgtggagacgagacctgcagcccttgccgctgcctgcgccaccccacacgaccccgtgtgggcgtgtggcatcgcgtcgactctccagacggtaccatcgcgaggcgacctgaccaaggcctacagcctgatcggatgggcaacgaagatgcatggttttgattcgtgtgcctccatggcgtgcatgcatggcttcatccaattagcgcgtcaggagacacgaaggagctgggacagtgctgctgccgttttttcttttttccctcttccgatgagagatcggtttgcgtcgcccacgccgccgttcggtttcaccgagatcaaggatgttgctgttttgctacaacgacattgtccgacatcactgtctaccggcatcaccaacgtcttcgcgccgtgatcaccatagtgtttttatttaagttctttttctttattttttttcttttggtcgtcgtgttttgttggcttttcgcatgcacccgcgcactctcgcacctggcaccacgatccctgccatgaaccgcaaccgcacactattatgtgacttgtgctgcatcgagatctgcaacgagtggctactacaactacgacaacttcatctccactacatcgactatggcacgtagggctatcatcgtgttgagtacccttaccagttttttctccagttcaactgaccgcgttgctcacgcttggactgtgggggatgttagagtatatggtagttagagtcatattaggataggattagtttatgtggactccttccatatctataatcctaccttatctcctcctcatatactcctatatataccagcccctgaggctcaatacaatctatccacgttatgcagtatatctctcctccctgtactatccaacacgactaacctttataaaaagtggtatcagagactagctagtccaacatctctggcctgaggaacatagtgtgtgaaggcttaatggaccgtggctgactgcgggaaacggtgaaggggcggtgagcagctaagggacaccaatgtatgaagggggatatatctcttgttgaatagtcccacattgattgtagaagggtaatggacctaatatataagtggggagcccctcacctcattggctagcttttgggatgggaaaggccctttacgatcctacaaattggtaccagagcctggctagtaccgatggttttggttctactaaggaagtacgtggagtagcacgatgcacagcacgatgcactgccccacgacgttgacgacgacacgcagcatccgaacgtaaaggagggatgagccatgatggacgaacagttagcagtcacacgaagcgcttcccgaaaactttattagcgcgttgttctggtgcggaacatcataagctagcgaaggttccgaagaactactctcccgatcagcggtgtactggatggcacacaaattatgcagcaaaacaaagccgtaaatgtaagccgtgtcatttgcaattttaaactgtttatgattttttttaaaaaaaatagaacttttatattgttatttcttttatgtttcccaattttatattttaaacaacaatataaaattttcagaaaaattaaaataaaatctcacagataggaaggtagtattagaacgatataaaagttctcaaaaacattttaaaaatctcagaaatagatgagataatattaaacaaccatgcaaagttctacgaataaacttaacttccatcactataaaagggtttttgcagacggctagatccagttttcgcatgtggttgacctgcccgtgtacgagaaaaggtctgaaaaaatcactattttcatatacgggtgcttatgtgagccgcatgcaaaaataaaaatccaaaataaaaaaatataatcagaaaaaaaatcacgccgtctacttccaccgccagccccccgtatggggccgggctcctcccgccgctgccgccggatccgtgcggggccgggtgagggagaaccaccgcccgccgtcgtgcccacccctgcggccacccgccggctgaagaggagaatatagtagaggaggtgcagagtataagaggtgagagagagacagaggggggtagaaggtaaggttcagtttgaaaatttttgaagtgttgagagggaaataggacacaagttagtcttctagcggctccttaagaggtccgtttgcgaaattgatttctgcatgcggatctcttaacgagctgcatgtccgcgtgcaaaaatcgatttttgcaagcgggcctcttaagaagtcgtatgtgaaaatggaagtcaatttttgcagacgcggtcagttatgatttatctacaatctaacaaggggctcgtctggaaaaatcattttttatagtgttcatttgtgagacataaaattgagaaacattaaaaaaataaaaataggagtattgttatttgttaattctatatcttattaacaaagttgattttgtttatacaattttatggggttatttatttacatattaccaacaagtgtgagttttttcagattttttgctaacttctgtacaaaaaaagttctcatgttttcacctaaggtatcatttacatcgtatatatacattcccagtatatagttacactcaagttacaatatcaaaagttatacatctcccatctatccccgccattaaccccacctatcagcacatcaggataacagcacaataatcaataatgcaaggtcacaacagtcaagactttaggaaggagacgagaatgacagttgtccaatctgtcacatgttcatttggtggatgcggtcgcgcatagtgcttcaatgtagatgctatcaagaatagcatccacaactcttcaatgtagatgctatcaactggatgctaagtacaacgacatccaccttattttcacaccttacaaatcactatatatcttaaaactcaacatgtaaacatacaacatcatctttcatcttaaaactcaacatgtaaactcaattactcttttcgtaaaaataacattttttacatgttttccaaaatatctacatggaaatctatgtatgttttgaaaagctggtagaaagcattaaattttggaactgaaggagtattatattttaaatataatacaatcatatcatatcatcttaaatttattatattatagagcttaaaagtgacggggctagacttttgactatggggtttagaggctttcaacttaagtagaacagttggtaaacattgacaatcattgatcaactaacaaactatggtaagtatttattgaagttcaaatataataaaactagaaaataccatgcgcgttgcggcaggatatttgggaaacaatcgtagctagtttgttgaatgacactttggggaaagaaaaataaaaaagcaaaggcaacctagaaggattaatatttttttacacatcagcacctctatatactaattaaggatgaacttctgcaaaatgattaactcacatgtgaaactactacccaagccaaagtttgtactactgtacatattgagttttctgcgattttctcaataggaacaaagaaatatgaaattaatatggaattgagccttaaaaaatagcaaaacttcatgggaatttcgagaaatttagaaggtctcactcaaatatttattggcaacagacccatgtaaattacaattagcacgttcattgcatactataaaattacagaggaggatcgtcttttttttttaaggatctgatgactgcaaagcctcggtacctcgcggtaccgcgtctccggagaggaggtaccgagagattttcgatggtgggagggtataactgtactttcgcatatcaaattggaggggaaacgccacctccatccaccgtgctaggcgctgtccccgctgcaaatcaagcaagaaactgatgcggtagatgcggcggcctcccaggcggttcgtggtccaatccctatcgctggctcgagtactacccgatctcctccctcctcctcgatgctagtacagtggaggcggcagccgtggtggcaggcgtcggctgcggagacctcttggatggcgggggcggtggtcaggtgacggcgtctacttcagggcaacctcagggaattgttgtggttatgcaaggaagagaggaggcggtcactgccctgccctgcatcatggtacgaagttgaggccaacagaagacaatagctccacgtctaggatgaggcgatggagagatgaatgttctgaatgattgaaaattcttgttgagactggagaggtgacactggtggagaaaccatctttcgtcggtcggccgatttccacaatagtcccggatgcaataaaaaccggggctaaagatgatctttagtcccggttcaaaagggtaacgggcgtatttgatctttagtcccggtttgtgttaccaaccgggactaaagatcatctttagtcccggttcgaatgctgtcagggcctgtcaggcccccccgggatctttagtcccgggttgtaacaccaaccgggactaaagatcgtaactttagtcccggttggnnnnnnncnnncgggncnnnngnnncnggnggggnnngncnggcncnggnggcnnnnngncccgggccnnnggnnnnncccccnccccgggncgcgccgcccccccgggggcgcngggcccggcccgcccgcgccccngnggggccgggcgccgggcccccccccggccccgggncgncnggcccccggccccccgcggcgcnccgccggccggcgncgggggcgccccnccccgggcccccccggcgggccngccggggggggcgcgcccccggccggccgcgggccggcccgcgcgccgcggccgcggcggcgggcgcgcgcgccccggcgcggcccccgggcgccgccccgcggcgcgcccnncgcggccggcccgcccgccgggcgccgcgcgccgggcgngccccccgggcccgccgcccgggcgcgccccggcccgccgcccgcggcgcgcccc

SEQ ID NO: 6088 - DNA, 63629 bp, Oryza sativa
  unsure (1)..(63629): unsure at all n locations
cgtagcgttgtcctctccggccatattcccactacagttctcctacccgtctgctatggtccacgcctgttctcatatcatacctccgtacgcaacggctgtgtgccactcctccttcaccctgcacgtccgctggggccacctgccgcgcggaagttcaccccatccccgtttaacgtaccagaaccattaacgttcgaccgaacgaaagctaagacgcgccgtcaccgtacgttccccccataccgtgatcgagctcgagaccgatcgatcgaccgagaccgacaacgacccctccaatgtacgttgccgcgagaacgtgatcgagatcgatacccgttcgaccgtccgtaagcgaagaccgaactcggtcacctgtactgttgccgcgaaaaccgtgaacgaggatcgataaccgatctaaccgaactagaggcgataacgagaacgatcgacccaagacaagtgagaacgagggaacgaacgtgtatgagaacaagcgaccgagaacgagcgaccgagaacgaggacgaacgttaacgtgaaatgcaatatatatatatatatatatatatatatatatatatatatatatatatgtatatgtatatgtatatgttacttcgcatttatcctaatacatctttttgtatcttgcagaaaagacgtgttgtcggagtcgtccgtcaagcctgagtggaagagctagccctagaaggaattggcgcaggcaagtgacgtaataatataaatgattgttatatttgtaatgcaattaattaagattattagacctgtaattagacttatcatataagattgtgtagtgttctaatattatttgagttttaatataagattactttatttgtaattagacttagtatgtaattattgactacggaagtggtgcgacaagtagcaattgactattgtagtcttaattagacttagcatatacgcacgaaacacttagcagacatgactattttagtcttagcatgtaatattatttgagttttaatataagattactttatttgtaattagacttagtatgtataattattgacaacggaattagtgcgacaagtagcaattgactattgtagtattaattagacttagcatatacgcacgaaacacttagcatagatgactattttagtcttagcatgtaatattatttgagttttaatataagattactttatttgtaattagacttagtatgtataattattgacaacggaattagtgcgacaagtagcaattgactattgtagtattaattagacttagcatatacgcatgaaacacttagcatagatgactattttagtcttagcatgtaatattatttgagttttaatataagattactttatttgtaattagacttagtatgtaattatttactagctagggttgtgtaatatacgtcacctagacttagcttatatcacgatttgtaattagacttagcacgtaaggttgtgtatggttgtaatgtacgacatttacacttagcatacatgacttagattgttaaaacataaatgtctcgtgacttagcagatgtttcttgtatgaacagatggctgaccgcgatgaggaacagatattgtacgatgcaatcgcggagggaagcagccagtactggaatgaagaagtgtcgcgacccaaatcgactctaaaattcatcctcgaaattgtgcaaagaataattaaaattaatgtgaaagcctccaacaattaaaatgtgcaaagataaaagtcaaatggggcttggaggatttttgtatatttcctaaaagcctaaaatgcttaaataaattttagtggaattttcagagcacaaataataattgaaaagaaataaacaaagttaaaaaggttttataaaaagaaaaccctaaaagaagtctgtttccccccccctttccctcttgggccggctcggcccattccctccctccctctctctcctctcccgcggcccatcggctccccgcgcgcgcgcgccgctgacaggcgggcccgcccgccactctcgctgacgggtgggacccacctgtcatccccctcctctcgccgcgcccgccgccagcgcccgtgccctagcgccgccgccgccgcgaatcccgccgctcccggccgctccgcgtgcaatcaagaggggggatttactccccgtaatcccctcccccgtttccccctcttttccctctctctctccctcggattcgctcggaatcaagcccgaaatcctcgccggcgtattcaatggcggccgaatcttccgcgcgcgattcctccctccccggccgctctttccttcccccggcgctatttaaaccctccccgagctccgcccttccgtttccgccgctcaccgctcgctctcgccgtcggaatcgtgctcgcaccgtgctcctctctctccgccgtcgccgccgagctccgttccgtcgccgccgtgcttcggttagccgccgccgccgctccgctcttcctcccgactcggcgacacctccctcggcatcgccgcatcgccgtcgaccccgtccgcgcctccacttcgcccgccgaccgccggagcaccgtcgtcatcgtcttcccgaaccgcgccgccgccttcttccgcttcggccgccattctcgtcgtcgtcgttgtcccggcgtgagccgaagaccgccgttcgccttccccctttcctcctctctctcgggtgccactccgccgcgccgttggtcgccggcggcgaccatcggggcgcgggtgcgcgccactcccgtcggccgcgccggcgaggccgccctcgggcgcgccctcgcggctgccaagtgggcccggccgtcagccgcccgcgcccgcgggtgcggctgacgcgcgggacccacggcgccgaccgccgccagccgcgtgcgcccggtccaccgtggaccgtggggctgacgcgtgggccccacttcccgtggacccggtctgcgcgccctctcgctcggctgacgcaataaatgagtttttaattaaaagttaaatgaagaaattcgcaaatatccatttaaagagcatataaacttcaaatggccatatcttggccatttgaactcggaattggaccgttcaagtctctaatttttccttaagaagtaaagaacccatttttgtgctttgttcctgcttgttgtatggagtttattagagtaaaagccttttcttttccgttggtcgtgtagacgctgcagcttcggaagatccgctcttcgtggaagttgaagccggcgtttgggaaagcgagcaaggcaagacacatcatcttgatcatattgaatcccagtttataaaattatgttgatttaaattattgcattatcgctttatttaaattcccgcgttatcactgttttatttagccatgcctatttacctttgttatgaccatattattattgttattgttattattattaccttgttcaccctagatgaaacaaaacctcaactagtgggtactctattcatgggtccactagtatgaatttaggtagatgcttcgctgattaattagtcaacattaggtggttttataactttagactttgggaattctcatatcatttggacactatggaatggttggcttatgttggaattggacacacacctctcttcctctttcaaaacccctaaaacctgttttcggtggggtttgggtgcatgccagttgtgggaagtagcaccccggccactataaggattaagctcgggcctctgttgcaaagcactaccgtacttccacatgtctaatgggtaaggcttagtttgtggctcagtctagtcataaacaaaagtacacggattggagatggatgaagtcgggcgtcgatggacattctccagggcaaatgaaggctacacgggctgcggcccggtagtcgagatgtcatacggcagagggttggtgcccaatgctaggggctcagttctgcctgcctgtcccgggtatcccggccgtaggtaggattgggtcggtactcttgtctaaggctaggatgggttggaaactatgtcacgtcttccgtccgtataccgtggtggtatgtggcacgtggcaacacgtgaggaagacgtgtcttgtgggtaaagatgtacacctctgatcagagtaaatctattcgaatagccgagccctcggatatgggcaagccgagcaatgtacccaagtcagtgttataattcttaaaattttgctcaacaactaaaatgtggaatggttggcctgggttggcttaggacgagctgggacccagggtcgggttgccagttcggtctgaatcatcataggccttgggttaaggcaggttcgtgtgggttcacggccttgattaataatattgtttagttctaggatcgtgtttacaaaatggccttgagcaactaaatgtctttaaatgctgtttactgcaaccctaacccctctatgttattattcctttgtactcccttgcatttattctgcatttgtgggtgtgtcttgttgagtacggtggttgtactcagtcttgcttaattttcccaagcccagatgaggagctccttgaagatgaaggctttggtgtctagctcgtgcctgccgtcaagcgcctgtggtcgtcgccctagtcttccgctgtttttcgttgtctttgtgtgtgctgggccttcgctgcccatgtaataattttatatacgcttccgcttgttaaactctgatttgtatcaacttttggtgtaccttgcctcctgggacaaggaataatacacgcacgtcaggaacgcctgttgggtgatttccggtcgtgacaagttggtatcagagcctcctttgaccctaggacgagccgtagatcccaagccttagcaatattttcaaaaataaaaatcctttattatttgtgaaaacccgctattctctctttgtcttgctgcttcatttatcgtcaaaatctgatcttttaaatgttgttttcccttttgtttttgtttgtagatggccggcagcgttacccgtcgtggtttgcacatgactggcttcgtcttggagctgcgaggcatgtgcgtggtcttggggtatccacatggagtggattaccaggccaggccgcttccggatcaggagggtgaggatgcagagcctcacgctggttgggaggtcactgcagtgatcctctccggctctcccgagcggacttcactggcagtcaccgcgggtggggattccttccccgccgcttgccagaacgccgctctcctcgccatcggcacccttcaccagcgctacccggacgagttgcagcactcgccctaccgctaccaccctcgtcgcggaggagcccgcgactacgccaccttccgggacgccagctcggaggatgacgctaccgtcgtgcatctggcacgcatggtggaggcgtacgacgcggctcgtatcgacttccatcagatggtgcgtcgtggcatggtggagaacaacatgaagatcctggagctgcgtcaggagaacctgcagctcaagaaggacctcgacgcgttggaggcgcagctgcatcagctcaagatcgcccagggagagatctgccgccccaagcgtcgccgcgtctgccgcagccagaagatcaccgcccgcaagagcacctccaggcctgagcttgtccgtcagtccctggcgtggacttgcttcgtcgagacccctcgtgccgagcctgcgcccgtggttccccaggagggggaagcctccggcgttggtagctcggagggtgcgctgttgctcaccttccgccctggcccgtcgcagcggtagacgagcagttagtaggcttgcgcgtgtgtttttcctcgtttgtcttcttgagtcgtgtggggcatggttacgccggtgtgtggtgtaactatgtcggagcctgtcttattttgtttgcctaagcaacttgaaccttaatgaaccaatttaatatcagtaataaatttaagaataatggtagtcgtgggtggttagttttaatcgtcagctctccttctctgtttgctggttctgtgtggggttttcagatggtgacgaccaggagaaatgttaacaccggtgaaggcaaccaacccgaaggcagcaaccccaacccccaaggcaatccacctccaccaccaccaccagacaccaacgccattctcacccaaatcctcgcccagcaagccaacatgatgaatgctttcctccaccacctccaaaacccgccacaacagaatgctccaccaccacctccccaacactccaaactcgccgaattcctccgcatccgcccacccaccttctctagctccaacaatccagtagatgcgttggattggttgcatgccgtggggaagaagctggacactgtgcagtgcagtgatgaagagaaagtcatcttcgccgcccatcagctgcagggacccgcatctctatggtgggaccatttccaggccacgcagccagagggacagcctattacttgggcccgcttcaccgccgctttccggagaacccatgtgcccgctggagtcgtggctcttaagaaaagggaattccgagagttgaagcaaggcaaccgctccgtgatggagtatttgcatgagttcaacaatctagcccgttatgccccggaggatgtgcgggaagatgaggagaagcaagagaagttcttggcaggaatggaccctgagctgtccgttcgtctagtctctggggactatcctgattttcaacgactggtggacaagagcatccgcttggaagccaagcacaaggagctggaatcgcacaagcgccgcttggcgaatttccgcaatcagcagggtgctaaccagagggtccgctacaccaatccctacccagggggatcctcctcgcagcagcagcaacagcagcagaatcagcaagggactcgtgcgccacgtcctcctacgccaactgtgcagcccgttcaaggccgcagggacgcttcaggtccgcagcggctgtgcttcaactgcttcgagcccgggcactttgcggataaatgcccgaagccaaggcgtcagcaaggccaagcgcctccccgctccaacaacggtggcaaggacgtcattcggggtcgtgtgaatcacgtgacggccgaggacgtgctgacaactccagacgtcatcgttggtacgttccccgttcattccatccccgctacaattttgttcgactctggagcttcccactcgtttatatctgtgccattcgtggaaaaaaatcagttgggggtagaaaggcttagaaaccctctgctcatcaccacccctggcggggttatgacggcaaagtattatagccctgccgttcctatagaaattcaggggattccttttccctcggatctgattctgttagacacaaagaacttggatgtgattcttgggatgaattggttggctcaattccaaggagtagtggattgcgcgaggcgcactgtcactctgtaccgaggaccagaacaaccggttgttttctttgcacctccaacctctgtcagaagttcagaactgcatcagataggtctgtcagaaatccccatagtcagagagttcggagacgtgtttccggaggaactacctggtatgccgcccaagcgagaaattgagttccggatagatcttgctccaggaaccactcctctgtacaagcgaccctaccgtatggcagcaaatgagctggccgaagttaagaaacagttggaagagttgaaagaaaaggggtacatacgtccgagtacttccccttggggtgcccctgtgatttttgtagaaaagaaagacaagacgaagaggatgtgcgttgactacagagctctcaatgaagttaccatcaaaaacaagtaccctcttccccggatagatgatttgttcgatcagcttaaaggtgccactgtattctccaagattgatcttcgttccggatatcatcaattacgtattcgtgaggaagacattccgaagaccgcattcactacgcgatatgggctgtatgaattcacggtgatgtcgttcggcttgaccaatgcacctgccttcttcatgaacttgatgaacaaagtgttcatggaatacttggataagttcgttgtggttttcatcgatgacattctgatatactcacaatcagaggaagaccatcagcaccatctccgtctggtgttgggaaagttacgggaacatcaattgtatgccaagcttagcaagtgtgagttctggttgtccgaagtcaaattcttggggcacgtgatatctgctaaaggagttgctgtggatcccgaaacagtgaccgccgtcaccgattggaagcaacccaagacagtcactcagattcgcagtttcttgggtttggcaggatactaccggagattcatcgagaacttctccaaaatcgctcgacccatgacacagttgttgaagaaagaagagaagtttgtgtggagcccgcaatgcgagaaggcgttccaaactctcaagcaaaagctggtttcctcgccagtgttaatcttgccggatacccgcaaggacttcatggtgtactgtgatgcttcgcgccaaggattggggtgcgtactcatgcaggacggtcatgtggtagcctatgcctcacgccagctacgacctcatgaaggcaactaccctacacatgacttggagctagcagcggtggttcatgctctaaaaatctggcggcactatctcattgggaatcgctgtgaaatatatactgatcacaagagcttgaaatacatcttcactcagtcggacctgaatcttcgacaaaggagatggttagaactcatcaaggattatgatgtgggaattcactatcatcctggcaaggctaacgtggttgccgacgctctaagtcgaaagagccattgcaatactctcaacgttcgtggcattccacccgaacttagtcaacagatggaagccctgaacctaaacatagttggtcgtggatttttggccgcgttggaagccaagcctaccttgctcgatcaaatccgcgaggctcagaagaatgatccggacatgcatggactcctcaagaatatgaaacagggtaaagccgcaggtttcacagagggtgaacacggaaccttatggaacggaaagcgggtatgcgttccagatagcagagaacttaaacagctgatacttcaggaagctcacgaaagtccttattccattcacccgggcagtaccaagatgtacttagatttgaaggagaaatactggtgggtcagcatgaagcgggaaattgcagagtttgtggctctatgtgatgtgtgccagcgtgtcaaggcagaacaccagcgaccggccggacttctccaacctctccaagtgccggaatggaaatgggatgaaattgggatggatttcatcaccggacttccaaaaacccaaggtggatatgattctatatgggtaatagtggatcgattaaccaaggtagctcgatttattcctgtgaagaccacctatggagggaacaaactagcggagctctacttcgctaggatcgtgagtctccatggcgttcccaagaaaatcgtatctgataggggaagccaattcacctctcacttttggaagaagctccaagaagagctgggtactcgattgaatttcagcaccgcgtatcacccgcagacagatggacagaccgagcgtctaaatcagatcttagaagatatgcttcgcgcatgtgtcctggacttcgggaagacttgggataagagtctcccctatgccgagttctcctacaataacagctatcaagccagcatacaaatggcaccctatgaagcgttgtacgggcgcaaatgccggacaccgctattgtgggaccaagttggagaaagccaagtgttcgggactgatatcctgagagaagctgaagctaaagtcagaatcattcgggataatctaaaggtggcacagtctcggcagaaaagttatgcagataaccgacgccgtgatctggaattcgcagtggatgactttgtgtaccttcgagtcacgccattgcgaggtgtgcacaggtttcagacaaaagggaagctcgcacctcggtatgtgggtcccttccgtatcatcgctcgacgcggagaagttgcttaccagctggagttgcccgcctccttgggtaacgtgcatgatgtgttccatgtgtcgcaactcaagaaatgtctccgagtgccatccgagcaggccaactcagagcaaattgaagttcgcgaagatttgacctatgtggagaggccagtgaaaatcctggacaccatggagcgcaggaccaggaaccgggtaatccgtttttgcaaggtccagtggagcaatcacgccgaagaagaagctacttgggagcgcgaagacgagctgaaggcagcccatcccgatctcttcgccagttcttccgaatctcggggtcgagattccgtttaaggggggtaggtttgtcgcgacccaaatcgactctaaaattcatcctcgaaattgtgcaaagaataattaaaattaatgtgaaagcctccaacaattaaaatgtgcaaagataaaagtcaaatggggcttggaggatttttgtatatttcctaaaagcctaaaatgcttaaataaattttagtggaattttcagagcacaaataataattgaaaagaaataaacaaagttaaaaaggttttataaaaagaaaaccctaaaagaagtctgtttcccccccccctttccctcttgggccggctcggcccattccctccctccctctctctcctctcccgcggcccatcggctccccgcgcgcgcgcgccgctgacaggcgggcccgcccgccactctcgctgacgggtgggacccacctgtcatccccctcctctcgccgcgcccgccgccagcgcccgtgccctagcgccgccgccgccgcgaatcccgccgctcccggccgctccgcgtgcaatcaagaggggggatttactccccgtaatcccctcccccgtttccccctcttttccctctctctctccctcggattcgctcggaatcaagcccgaaatcctcgccggcgtattcaatggcggccgaatcttccgcgcgcgattcctccctccccggccgctctttccttcccccggcgctatttaaaccctccccgagctccgcccttccgtttccgccgctcaccgctcgctctcgccgtcggaatcgtgctcgcaccgtgctcctctctctccgccgtcgccgccgagctccgttccgtcgccgccgtgcttcggttagccgccgccgccgctccgctcttcctcccgactcggcgacacctccctcggcatcgccgcatcgccgtcgaccccgtccgcgcctccacttcgcccgccgaccgccggagcaccgtcgtcatcgtcttcccgaaccgcgccgccgccttcttccgcttcggccgccattctcgtcgtcgtcgttgtcccggggtgagccgaagaccgccgttcgccttccccctttcctcctctttctcgggtgccactccgccgcgccgttggtcgccggcggcgaccatcggggcgcgggtgcgcgccgttcccgtcggccgcgccggcgaggccgccctcgggcgcgccctcgcggctaccaagtgggcccggcagtcagccgcccgcgcccgcgggtgcggctgacgcgcgggacccacggcgccgaccgccgccagccgcgtgcgcccggtccaccgtggaccgagcggctgacgcgtgggccccacttcccgtggacccggtccgcgcgcccgcccctcggctgacgcaataaatggtattttttaattgaaaattaaatgaagaaattcgcaaatatccatttaaagagcatataatcttcaaatggccatatcttggccatttgaactcggaattggaccgttcaagtctctaatttttccttaagatgtaaagaacccatttttgtgctttgtttctgctgttatgtggagttatttagtgttaaagccttttttcttttccgttggtcgtgtagacgctgcagcttcggaagatccgctcttcgtggaagtcgaagccgtcgattgggaaaacgagcaaggcaagacacatcatcttgatcatattgaatcccagtttataaaattatgttgatttaaattattgcattatcgctttatttaaattcccgcgttatcactgttttatttagccatgcctatttacctttgttatgaccatattattattgttattgttattattattaccttgttcaccctagaataaacaaaaccccaactagtggacactctattcatggttccactagtatgaatttaggtagatgcttcgctgattaattaggcaacattaggtggttttataactttagacttgggaaattctcatatcatttggacaccatggaatggttggcttatgttggaagtggacacacacctctcttcctctttcaaaacccctaaaacctgttttcggtggggtttgggtgcatgccagttgtgggaagtagcaccccggccactataaggactaaagctcgggcctctgttgcaaagcactaccgtacttccacatgtctaatgggtaaggcttagtttgtggctcagtctagtcataaacaaaagtacacggattggagatggatgaagtcgggggtcgatggacattctccagggcaaatgaaggctacacgagctgcggcccggtagtcgagatgtcatacggcggagggttggtgcccaatgctaggggctcagttccgtctgcctgtcccgggggttccggccgtaggcggaattgggtcggtactcttgtctaaggctaggatgggttggaaactatgtcacatcttccgtccgtataccgtggtggtatgtggcacgtggcaacacgtgaggaagatgtgtcttgtgggtaaagatgtacacctctgatcagagtaaatctattcgaatagccgagccctcggatatgggcaagccgagcaatgtacccaagtcagtgttataattcttaaaattttgctcaacaactaaaatgtggaatggttggcctgggttggcttaggacgagctgggacccagggtcgggttgccagttcggtctgaatcatcataggccttgggttaaggcaggttcgtgtgggttcacggccttgattaataatattgtttagttctaggatcgtgtttacaaaatggccttgagcaactaaatgtctttaaatgctgtttactgcaaccctaacccctctatgttattattcctttgtactcccttgcatttattctgcatttgtgggtgtgtcttgttgagtacggtggttgtactcagtcttgcttaattttcccaagcccagatgaggagctccttgaagatgaaggctttggtgtctagctcgtgcctgccgtcaagcgcctgtggtcgtcgccctagtcttccgctgtttttcgttgtctttgtgtgtgctgggccttcgctgcccatgtaataattttatatacgcttccgcttgttaaactctgatttgtatcaacttttggtgtaccttgcctcctgggacaaggaataatacacgcacgtcaggaacgcctgttgggtgatttccggtcgtgacaagaagaggggaacgaggatccaaaccagtacttgaacgaggaaggaaacgtggagagggatgcggaggggaaccagcaggggcacgtggaaagggatgtggaggggaaccaggaggaggaggctagtggtagtcaaccctccgttggacagaagagggcacgcgggcaacgaggtgcagcgaagaagcttgagggtcggcacatcataacggaagtggaagaagatggacgtcctagtgccccggccgaagccgccaagaactatgtacgtcacagcggttgggttgtgcgggataacgtgcctgtcagtacggtgtactggcgaagaacaagggcacgcggagatcatgagagctttgtcccagattcggagaaagagatgctgtggaccacaatgctcgagacattcacccttcctgcgggtacagaggacaaagtgaaaaggtggactctgaagaaaatggcagaacagtttcagagcttcaagggagatctgtaccagaagtatatactgaaggggcagacaccgaacttcgacacattcccaaagctaagggatcactgggacgagttcgttgcatataagacaggtgaacaagggcaggcgatgatggaaagaaacaaagaaaatgccgccaagaagaagtaccatcaccacttggggtcaggaggctatagcgtcgcgatgccgaagtgggaggagatggaggctagcttgattgagaggggtatcgaaccggcaacagccaattggccggaacgatcgaagttctggtactatgctcacggtggaacgctcaacccagctgatggctcactggtcttcggcgttcagatacgagaggctgcgcaacgactaacagatgcagtggaagcctcctctcagggcacgttccgacccgacagagatagggacgagctgacactcgccctgcagactccagagcatccaggacgaacacgagggaaaggggtgattccttggaagattggtttcaaggaggacatccacacgtacaggagtcggatgaggagcaagagagataccgaggcgaagattgcagacctagagttccgggtatcgagctacgaactcaacatgcaagaggaggtggcaaggaaggttgatgaacgcatggccgcacatcggtcccatgatccccagccgaccattcctcctgcaatggtgagcccgtcaggaaaccgtagcagctgcgcctcaacggggcaggtaggatcgcagagcatggacgccatgcaaacacaggacgaatcgacctgtcccgttgatgacatcactcagcggacaccatgtgagctgcatattcctttcaagaacttatcaataaaggtaagatttagccattccgctagttgctgcttatgtatgttgattactaataaataatctctcacaacatgaaggtggcgtcgggcatggccatcccaacggacccttcaggtacttaccactgcaggccgattccagcaggatactcgaaggtcgaagttgagttggtcgaaggcgcgtacgaggacctcgagctggattaccctggaggagacggtgagacgcatctacgagacacaagccatgccattattctatggcgcaggcggtacatcatcctccctgggcgacaagcggcgtctcgtgcaccatctcctccggctccgccatctcctcctcaggatcctgcaccgtctcctcctcatgctccgccagcaccgtctccacctcaggctccagcaccgactcctcctcaggatcctgcaccgtctcctcctcatgctccgccagcaccgtctccacctcaggatcctgcaccgactcctcctcaggatcctgcaccgtctcctcctcatgctccgccagcaccgtctccacctcaggctccagcaccgactcgtcctcaggatcctgcaccgtctcctcctcgtgctcctacacctactcccccgcaagctcctcttccggcaccttcaaggtcaagggcccccccagctgcaccgcctgcccacacaagggcaacgaagaaggcgaaagttgacgccgcaaagaacaaggacccggggtacgattgcacgcaagaggagcttgacgcttacgttgcatcagaagtcaagagacaattcaagcctcgaagtccagaaaagaagattcctatagaccccagtgtcaggaacttcttcaggggtatgtctgcatctgtcaaggaggctatcaagctatcggactatgagcgaacgctgaagaaagcatcttctggaaagtccaaaccagtccctcagcttggagagcaaccaaaccaggagatcgagccgttggtgaccggtaaagaaatgacgatagaacaatttattactgacaccggtctaactacggatcaattgctaggagccgcaccaatcgaaaaggcggaagtgaaatacatgtacgaactcggtaaaccgcttgtcaagcctgagctgctgcagtccctacccacacaaatgtacaagttccatcagctgtacatggagatgagcgccaccggtagagagatgatcggagcgaggatcagggacacggacttcttgcaaggagatgacattctctggatcaatttcacacatatctacgaactataccagctggacgccgtcgacgtctctattatgagttgctggattttgtaagtatatcgttcagttagaattcttactatacgtctcctttaattaattaggtccttgtatataagtagactatagaaaataatatactcccttttatcgttgtagaatggagattcaaagggcccgacggcggagggttttcgatactggattcatcgaccctcggaaagtaaacgtcacaatgctcgaccaatatccacaagaaacagaggacaatctcgtccatctcctgaaggcccagcattacaagacgttcatactgttgccatacaacacagagttagtttaattttactgtcttcctacataccaaatttcattcccgtacgaacttgctaagtgtttcatatgtaatgcatcccacgcacattgcagattccactgggtgcttttactcttcgacctggaggcctgcaccgtcaacgtatatgactcaatggataaaaaagagtctacgtttgacaaggttttcgaacttatagacaggtaccgtcataagttcctttgttaattaagaaaatcttgttatgttaattgctactacgaatcatagctttaaactccatgtagggcttggtatcggtttcgtcatttggtccgcggcaaatggagagaaagacttaggcggaagttcaaatttcctgtgagtacacatgctctacatttatatttctccgattcaaatacatacaagtgtatattaattagatctctcgttgcttgtcatttatttgtagtgcgcaaagcaaaagcagggaaataacttgtgcggctattacgtgtgcgagtattgccactgccttgcaaaccaaatcatcaccacaagagagctcgatgtacgtacaaataaattcaaaatttcagtacgtagcgatttcttgttttattactaatcaatttcatacattcatatagtttattcgcatgagggataacctgaccacacacaaggaatttatcgcggcggttcaagaacaactcatgggattcatcaacgaagaaatccttgatcccaagggtgaattctactacgacggaaacacaattcaccggtccttagcttctgagctagcagcgagtactactacgtcgaaatcgtagctagctaggacatataatggattgtaattaatacatgactacatatgtttctatatgcatgtgtacacattttctataatgtaaatatattttggtcatatatatatctatatacatatgcatttgcataacatatatatgtataaatacatatatatatgtatgcatatatatgtattgaaacatatatatgcatggtttatatatatatatatatatatatataaaccatgcagcaacagagccatgaaaaaaaaaaaggtcagctcgatctttactcccggttatttcacccgggactaaagatagcgatctttagtcccggattggtactcccggtttggaaaccgggactaaatgggggttacgaaccgggactacaaagggtttctccaccagtgtgaattagcctattgactaggagacatacgtattagttatcaagaagttcatattttcggtttctctcatccaaaattttcaacaaggatgaaaatgagaaatctattatctattatattatattatattatattatattatattatattatatactaaaagtccattaaccttcctacaaacgctcccgagctgccatgtagcctcctacaaactctcataagccgccacatggcgttctaataaattagaaaaaaaagggtggacccactaattttgccaattaaatctccacctaaaagaaaaaagattcggtatccccaccaccgtacgcacgcacgtacacgtactcccctccacaccattcaaactctccgctattctcctactccttccgtttcacagtataagtcattttagcattctccatattcatatttatactaatgaatctagacatatatatatatatatctaaattcattagcatcaatattaatgtggaaaatgctagaatgacttacattgtgaaacggatgaagtatttttttagctaacttctcctattttatagctagcacttaatatataaaaaagataataatcgattatctaaatctacaaaattctcaagttacatattttttctcatttttttcaactgttgtgttatttatcaattaaatatcaaattcaagatctatattacccatattttgttatttaaaaattaaaaattagatcatgtgacctttatctaattattgagtttttatatgattttgtcagttaaaaaaatagaggaggtgaggagcgagaaggacaaataaatacgtacgtacatgcacatctcacgtacatgtctcacgtacatctcacgcctttttaatttttaagataattctaactatataaaataatggatctctcatctttaagttaaaatcgatagttagactttttttagaatttttatgattttatctgatttattatactgtcatatgatggtttagtagcgtttgtagaatcacacgtggagtgtatatgcttggcgctctaataaattatagaaatcctagaaaatcagaggaaaaaaaaacattcaaccttcaattttcacttaaattggtggatccgttattttaaaccgttggattagatctattaaaactcccacgctgttaatctccatcccgaaaaagaataacgtacgtacgtatcgtacgtacgatcatctcactttctcactttctggaaaaaaaaacttaattacctacgtcatatactatggagaaaaattgagagcagagctactagagccatacccaaatccttctgaagacttctcagactaagactcctattctattcctactccactagctttagaacactactaaattagagagagagctttgattcttcttgcttgaggtgtctcatggagtggaggatgagagggctttatatagccctccaatgatggttgtggcggttggaatggtcggaaatgccctccaaccatcattggggagtgatccaagccattcagaagaaaccctgcgtccaacggcacctgggagggttcggccgaaccatgggctggaccattctggccaatctttggcaggtggcctcctcttttgctcctttggcgatggcagccgaaggagggagggggagggcggtggaggcggcagcggctgcttcgggcacggcggcggcagggaggtcagcggctgcgactacggctctcggtatcggctcagggagggtggttgcgacgacggctcacaacgtcggctcagggagggggcgacaacgacacgggggagggagcagcggatccggcggctgtgttggcagggagagccggatccggcgcttgactccccaccggcggcggcggcgatgttgggaagggtggctctcggcgtcagctcagggagatggatctggagggctcggcggcgtgtctccttctccctctccctcctccaccgccgccagctgccgtcgccaccaccgccgcgggctgccgccagctcggggctagccggatttttgttaatgtgttgatttttgtgatgcttgaatgctcaggtgaatggaaattttttactgtaaattgttgatgtaaatttctgtggattttttagtgcttgggtaaatttctgtgaaatttttgaatggtggagtgttgacagaggcggatggagcggtgtcgctccgtctgtcgtttttttaaaacatggccagcattttgactggcggagtgaaaatgttttttcgctggtagccgtcttaagctannnnnnnnnnnnnnnnnnnnnnnnntgatggctagcttaagacggctagatcttgattttcactggcctttgctttgtggcggctctaaattcagccaacgaaatcccaaaatagccgccatgaaaaatggatttcgtaatagtgttccattcccttcttagtgaagtggacagcgttgacaaacttttgtatggctcttagtactacaagccttcacaagttgtccttcctctctttactgatccggaaacggttacgatgatgctgaaatactttcgcaaactattctttgatcctttagtgattagtatcataccagcaagttccgatgggaagctgatgacatgatagaccaactgcaacaggatattggtgatgatgataggatgatgacaaaggctaactccgacgatgtggaaaaatgtgattttctttttgttgtttccagcaagcttagagctagtgcatataccgatccactgattgggcgatgaacgatcaagccataacagggtcagggtagtaatccaatcaaattacacattacttcatctttttaattgttacactctctttctctctctctataggatagtcgtctttaaaattttgctcatatgcaacatggtgatttaatacagaatgaccatttaagcttctgcagcactttataaacgtaagcaaattttatgagcatctttcccatccttgaaaaggtctcacaaggtactatgaggtacgaggtaccattcatatccaactgtccattacaaagggtatgatgggaagtaaaatctcgacatcaaggtgggattcattcaacgtagcgctgctatggagcttgccatttgtgttgccgccgatctcattcctactcgcctccttccagattgctctgattcgttgagctcgtccaccgacctatcgagctcgcccgtcacgccgcccgtcgtgctcgagcttgtccgcctgtgcactcgagagtcgagcctgctcgtgcttggagctcctcctctgcggcttcgtgctgtcttgattccataatagcttggccaatgaatttaacctggccactgccgaagtgaccagcaagagagagttcattttaaatcaacaaggtagcccgcgcattcgcgtaagtatatatcgtagggctgtatttcaaacactataaagatgggatataagccagagaatatttgttgttaaaaaaaagaatgataaaataaatcatacatcactatatacaatgtaattaaggaaatgtaaattatctagcaataaaaaaagaaaaatatttaccgtaaaatagatggaatatactactaaatatgataagaataagaatatctctcatatttaaataaaaatctttttgtcgtggtcatatataaactcctctattgttcttgcttcaaaagctatgtgcatttttaataaaacaacattaataccactaaaataaattatacattattaatacactaaaaatcatctacaccgcttaacttggtgttcaccacttatttccacatctatgtataaatagtctaaacataccacttcaatcgaataatacaataacaccattaaaaatagacatgaatgtctctctaacggataaagttgactataattgccaaggctttcttatgtaatgccctggaacatcagtcccacatcgacgtagccgtaaccccaaagatcagcctatagcatcatttaacacttaatacactattggcacactcacaaatgattctattagttagtatgtccctttatatacattgcctacattagcctttcactgatgccacctgaactcaaccatatgtatacccttgcagtatttacgatagcatagtgaatactataccctgcattgaaggacggagagggacaacaaggaggaggtgatgaaaatagttataatttttgtcccctacttatttctgtgtagtatttttaacaaaatcgtagtttaaaggctatggacaacacataagtgctggacggccggctttgatgttttttttcttgattagtatttctttgattttactattgatatattagaatattcttctttatactactctggtattgtattactttccgagtatatgaataccaactttattatatatccaaattatattaattatgatgctagcttatctgggaaatgcaatggtgtgagcataatgatcatgtatacgatttctctatgtcatgacgatgatattaggatagtatttggtaatttaagcgtggtgtttagattgctggatatcgttatttggggttatatgctgcgaacatgtcgaggtgggccgctgatggtgacagctcagtacgggtattcctccgcgcatgtatataatcctaagttactttcctggggagggtactcatccgtatttagccctagttggatggtcatgacggattatcgtaagaaactcggcaatcaggagtggcttctcaagcaccacgagggcatttggaaagagggtattagctaaataatcatataactaggaagtatgtataatgtgtatgtatattagaagtataggaatagattctttctattttcgttccacttagcttagatgatttattatgagagtatgcaattctcttgctgtgtgtcactctaccctattcattatcttaaccccttcttagactttgattattacaagtaatatataaattattagtatagctctctctattataatcatcccacgggattaaataaatacgatacccttggaatactctcgggtgaaatactataatggtatattcgtgcgcttacagatgaaatcggtaaccataatataccacgagagtttctgcgccattgctgggaattatatttctagtaatatcgttaagaaacaccaatagggtcctcgacattcgtgcctccaattgtgtcacacataatggacaattcctgaagggaaactcaccagtgcggtgacgcatgaccaatgatgaagccgagccatccatctttgatgcaccaccaccaccaccaccaccgctgccgccgcttccagtgccacttgatagcccgccgcagccaccagctgccaccaaagccacagccgccaccttgggataggtttggatggggatttccggtgtgtgtggcgggagcgacgagtccgattgggtgtagttcaaccagccgcttctagcaccgattgcctgtcattgctaccaaccatctccaccactgccaccatcgccgcctaaggttagatttggggatttcgagtgtttgtggagggagcaacgagtctgacagggtctagttcaatcggacgtagttagggttacatggtgcgatgccaggggcacttccgtcatttcgaaattctctctcctctttttgcctggaaataataaaataatgcctcgggtatcctacgaccatttacacaagttatatgtggaatccaacgcagtgtcacgtttctgtgttgtcttccagccaattacatgattttagatgtccagtagcaaattctgcctacaaattttagctctggaaaacatgccagatgctaatagtatttgttaatttagacctatacttgtcaagcactcaaaaaaaatccatccaatgcatccatacatctaattcatctaaaattcatgcaaaattcatccactgcatccactgcatagcaatacaatgcaaaaaacatccactgcatagcaatatctaattcatgcaactatacaatgcaaaaaacatccactgcatccatacatctaattcatccaaaattcatgcaaaaatcatacactgcatccattgcatccacaatgcataaaaaaaacaagggagaggaagtgtacctgggaggaaaggaggccggtgggggcgggcttgacattggtcttgaggatctgagaggcggcggcgtggcagcggcggtcggcgaagcggccgcgacgtctgtcttgaggacttggcggagaggaagccggcggtggcggacttcgagaggaggccggcggcggcggtcttgggcgtggaggaggcgctggcggtcggggaggccggatcttgaaccgggaggcggcggcggtggtcggggaggccggatccatgagggctcgtggacgacgagggaggaggaggccgtggtcggtgaaccgggagggcgacggcggtgtcgaggaggacgaggcggcggtggcggcgtcgaggagaaggaggcggcggtggcagtcgggaggcgacggcttggaggaggaggaggaggcggcggcggtggatgtgagagggtgatagagtgagaggcggcgtcggcggtggatctgagagagtgagaggcagcggcggtggaggaggaggaggcaacggcggcgtcgaggaggaggaggcggcagcggcggtggatctgagagagtgagagagttagaggcggtggcggcggacagaacggataaggacccgtggatgaggattgactaagtaaaccctactcaatcctcatctctatcgggcagagtactatacccgatgcggatgacactcatccgtgacgggtgctatttctaagcctgatacggatgacactcatttatgatgggcattagtactaagcacgattgagatgattacatctctatcgagcatagtactaaagcccgtcatagataacttattaaaatagttttaaaattatgataagttataaaatcatttataatcacatataattaacaaatgtcttatttacatagtttaaaattcctagtaattttctaaagttcatataattaacaaatgccttcctcacatatagtttaaaattccttttaatttttaacaaatgtcttatttacatagtttaaaattcctattaattttttaaaatcatataattgacaattggctttctcacatatagtttaaaattcctaacaattttttaaaaccacataattaacaaatccatttcttcaaagagttttaaatcgtaattaactggaatggcatgaaacatatgcaattcattcattaaggctccaatacaaattaaatacatactgataccaatttggaaattacattactacaaagacttcatttacagtgatatgcctttcgaatggtttgaacgaacgtacaccacgttgcccaggcatgtgatgggccgtcagagatgagaggatatgtactagtgtttagacctatacttgtcaagcactcaaaaaaaattcttaggataactgaaaggcagcaaattaaataaactagccatttttctatagtactagttggatgcccgtgcgttgcaacgggtatatatacatttgaaaaatcatcacttaaacaatcgtaaatataaatcacatcatgtcacctactacctcgtggacaagattgttttcgtgaggcctctacttaacctctaatctagtaatctctaccaagcattgtgagccacggaggcatcgtggttgcacattattctatgagaaaatccatgaaattccattgacaagcaccctaattccagaaatgccatcgacaaagacaacttcgcagaaacgccattgcacaagcctctttctcccaaaaataccatcacaccgtaactactgttaactcctctccgttaagttgtatgaaaagacaatcttacccctaggcatccatttgctcacacaatattattttgcattcatgtatatttctacccacatctaaattcatagacatctaaattcaccccctgagctcgattgtgaatcatgggtacctaaaatttctaagtaaagcacacagaaacaacaaggacagcaagaaacagcaagcacatagaaaagcacatggaaattaccctcctcgccggcgcctgtgggactctactcgacggcgcctacagcccccgcgctgcagcctgcgaccgctgtgaaccacatcggcgcgtcctgttgcgctgctgccgcgggcctcccctaccgcaccacccccgtgggccgctggcatagcggtgccgccgccatggaccactgccgagctgagcggcgtgatgggcgtgcagcactgcaaaaaggcacgatggtcaactcgagcaacatgacggcgactggtggggacgtagtttttatcctcacgcagggatgtgttggagatccgggatgcatttagtggagctggaagcaatacacgcacggtatatccctaaggccttgttcagtttagaggggattgaagaggattttattccctctcaatccaaaatcctcttcaatcctctccaaaccaaacaaagcctcaaggggattaatcaaacaagaccccagtgagtctggaccccccccccggccccccaccacccgcaccccaccatgtactcagcgtatccccatcctccccccttggagtcccatttggtcttccgccaaccccaatctcgttagccgcatccgcaacggagtggagcctggtgtttttattggacggggcgacctgcctgccccgcgttgtgctatggatcaactatcagcagcggggacatacaacgagctttagcccccaagacggccgtcgccggtgaagggacgccactgcaccgcagagttttcattcacggttcacggagcttcttctgcgatgcagctatggtccatccatcggcgggaggtcaactcaattgttctgctcaatatctccatcgcaattcaagaagattacagaaataagatccaagagcagagcgtttcgaaaatgcaagtcgcagagagctgatgttgtattgactttcctgtttagacgtactgtcgaaacagggatttgtcagtattaatttcagctactgatttcactttgtcttgtaccattattaactcgttaattctctcaacagcacattgcagagaaagctatcagcggtgaactgttagtctgcgattgtgatgcttgtattataattcgtaatcctattactggatgcttcattctttcttgtggtgaatgatactgctacttggccgcactatttcgtgaaatgtgttagatggatctccctccccttgagcccaacggctcaagggggccttgacccgcgccctaatcgggggcgcccagcccaatggctggtgggcccccgtcacactgtgccatataaagaggggtggaggacgggacgggataacatgacacaaggaacgaggttcgtcgccgccgccactccaccccacaaaccctaaccgatcgagggggcacagccagtgacgggaagtccaccgccgcgccacgcctcgtcgtcgacaccgtcgctgccgcaaccgcatcaccgccatcggcaccgagcacaccgtcgccgccgtccacgtcaagcccgcgacgacaacgacgatggccggccggacttcctcctcctcaacaacgactggtcacatccctaaaccctctcactccctctttgttcattcatctattgttgttcatccatcgcaaatagaaccacccgactagatctaaacctaggtgatccaatagacaaccctaacaatggtatcagagccaccctagagtttagattggttggggaaagaaatccaaaagaaaggcaaagaaaagcaaacgatccaacggatcgaaaagatcgaatccctaaccctaatcttacctcgtcgccggccgtcgttgacgccggccacggagggggagaggggcaaagaggcaccgccgaggagccactcgacagccgcgcgcgcacccgcgggtgcacgcgcgcgccggcgagggggcccgcggcggcgccaccatctccgtcgtcgccggtctctcactcttcactcgcgtggaggggtgagacggtgggggggagaagagaaaagaatagagggcgtggcggcgcgagggcgtcggccatggcgcggcggcgcgaaggctgccggcgtcggcgacgccgctcggcacggcgcacgcccgcaagagaaaggagagggcgccgcggcacaaccgctcgacggcggcgcactcacccttgagtgagtgcgcgcatcggcgaaggggagtgcgacggcgccgccgtgtcgccatgccgccgccggcgctgtgctagggtttcggcgacggcgacgccgctccgtgcaaccgcaagagaaagaagagaagaggagctagggtttcggcgccggcggccggaggcggttttgtttgcccgatccgcccgcgcgaccgtccgatcgaaaccctagcaatcggacggccgacggcggccggaccgaaatcggcccatgtgggagcgcacggcaagccactttcccggcccaggcccaggttgcggcctggcgaaaggggagggggcgcccgcccgcgcgcaaggcggccgtgggccgaccggcaaaggccgaaaaagttcattttaggtccctcggggccgaatcaaaagaaaggaagttcattctaagtccctgtttcagaagcatttacaattatagttgttaattgtgtttatttctaagcaatttgaaccaacgtgaaaattgtttagagaatagataaatgtgagaaatgcttctgaacatgtactttgtatattttcatgcaaattacaatagaattttgaattgtttttacatgttttacctctgtttaaatttgaaccaacgggagaattttacagagagtaaataacagagttttgttacaatttatatgaattgtatatagatcttccgctgcaaatagatgaaattgatgaaaattagtgtttctaaaattaaatttcgaaccaacgggagattttaattttaggaacattaattatgtgctatgatgttgtaatttttctgaccaacgttgataattgcaatgttatagttatggctttatgtgttatgtctattttctgcccaacggtgatgtagacttaatacataataattttaatgttaattttgttctcacaatacatgattatcttaggtggctactccttgatgggttacattaaagatattccgaccctgaaaggagataactacgaagaatggaaaagagaactcgaccttgcttttatcttgggagaggtggactgggtgttgactaccccatgtcctatagaacctgctgaaattttcagaggtgaaaaagagtcagatgctgaatggcaaaagagagagagggacaatgcttccctcatcatgtcgtatgacattgagcatgcgaaatggtcttcagccaacaagaattgtttggctgcggtaaagaacacgattgagccaaccatattgggctcaatcccagagtatgacactgtctctaagtacctcgaaagtataaagagccagtttagtggttcttcaaagttttatgcgacacagctgataaagcagcttgttacagagaggtaccatggaggtggtgtaaaagaccacattcttaggatgagcaatatggcttccaaattgaagcaaaaagatttgggcatctcagatgactttctggtccatctggttttgtcctcattgccaaagaactttgacaaccttgttgtcaactacaaaataagtacagagaattggaatattgaagagctcatctctaattgtgtgcaagaggaggaaagacacaaagagaccaatggtgactccattaaccttgtcaaagataacaaggaaaagagccacaggtcaccctcctcaaaagaaaaacagcctcagcatctgcctcagaaacaacagtttacagttgagacaagatcagtgtctacactgcaagaagacaagacattccaagaaagatcatcttgacttcctgacagtgatcatggcaaagaaaggtgagaacattattacatttgtaaagaatctcattatgattggttattctagatccacatggtggatttattctggagcaactattcatgtgtgtaattgtttaaagggattccgttccatgaggactacgcaaagaagtgaaagatccattagagttgccaatggagttgaagcaaaagttgaggctgttggagatcttcgcctagaactcgcgaatggcttcacacttttacttccagacgtttttatgtcccttctttgcaaagaaacttgataataagtgtatccaaattggattttgagagatatgattgccattttggaaatggcaaatgtgaactatggtataataatgaatgtattggtcttatgttgcaagatcagttttatttgttatctctttctgagaatgtgaatgttgtgtcctcgttgacaaaagaaaagaaagcgaactcctgatgtctcatcgaaattatggcactgttgtttaggccatatttcgagggggagaattgagagactggttaagaatgtaattcttcctccattggagttctcagttttagaacaatgcatacaatgtatagaatgcatcggtgcccaaaacaccgtatgagctatggatcctccgtgtgtgggggagtcctgcaaaggataaagtatttaacccaaaacagtaagctgccattttattggctattctgaaagatcaaagggtcatcgtttctactgtccaaacagttatacaaagtttgtagaaacaagatacgccgtcttcttggaagacgaaatgattagggggagctcggtaattcgagaaattgatcttgaggagaggcgggtgtctgtactcgctccgtcgactcaggaactttccttctctttacctgctaatgttgtgccagcaatgcatgccgttgcggtaccaacacctgttgttatctctcatgtagcaacaatgaatgaaagtgaggaacctgttctacaggattcaacagaaattgttgccacatcagaggaggagctgcaacagcctcaaacagataatgtgcctgaataggaggcccctagaaggcctgaaagagtcgcatatggaggatgatcccatctcatatgaagaggccatgagaagccatgaaagatgaaatgaaatcaatgatgtctgggatttagaagaaattcctaaaggagccaaaacagtaggctgtaaatgggtctacaaaaccaaatatgactctagagggaatatagaaaagtttaaagtgcgactcgtggcaaaagttttcacgcaaagagaagagattacaatgagacattttctccagtctcttgtaaagattcctttaggattataatggcactagtggcacattatgatttggaattacatcacatggatgtaaaaacgacatttctaaatggagatttggaggaaaaagtatacatggcgcaaccgaaaggttttgtcatgaaaggaaacaaaaatatgggatgccgtataaagagatccatttatgggttaaagcaaagcttcaagacaatgctacttgaagtttgatggaacaataaagaaatttgggttttcaagagaatgtagaggacaactgtattgattcaaagttaagaatgggagactcattttcctaattctgtatgtagatgacgttctactggctagtagtgatgtcaatctactacaggaaataaagaaattcttgtcctcaaactttgacatgaaagacctcggtgaggcttcatatgttttgggcatagagattcaccgaaatagaacaaagtatgcattgggattttctcaaaaggcatatatatagaaaaggtgttgaagaaattcaatatgtacagatgcagtgctacacctgctcctatagtcaaaggcgaaaagtatggggcatcgcaatgtcccagaaatcagtatgagctcaataaaatgaaaacaaagccatatgcgtcagctgtaggaagcctacagtatgcgcaagtgtgcacacgacctgacttggcatttgttaccgggttatttggcagatttcaaagtaatcctggcctagagcactggaaattggtatagaaagtcttgcgtgattgcaaggaacaaaaggcctcatgatgtcttacagaaaagcagaatcgctccagatagtgggatatttggattctgactttgcaaaagataatacaaagttaacatcgggatacatgtttaccctggcagtaggagctatttcatggaaaagctcaaaacagtctaccactgcagggtctaccatgtatgccgagtttatagcatgccatgaggctatggggcaggtgaactggctaatgaagttcatacccggttttaaaggtggttgatagtattgagaaaccactaaagttatactgcgataaagaacccacagtaatgtactctcacaacaattagtcaagtggtgctgccaaacacattgacataaagtactatgttgtgaaagacaaagtccgggatcaaacaatcagtctcgagcacataagaacagaaaggatgctcgcggatccgctcatgaaaggcctacctcccaacatgttcaaggaacatgtagcatgcatgggttttaagggaagccttatgaatcctggactatagggcccaaaagttaaagtatatgtttctgaatagagatgtgtatagtggctgtcgaatccatcggtaattaaccgtgacgatgaaacatgctctatatgtaaatctgtgatggaatagaaaaagctaaaggaaatagtgagataaagggggagaatgttagatggatctccctccccttgagcccaacggctcaagggggccttgacccgcgccctgatcgggggcgcccagcccaatggctggtgggcccccgtcacactgtgccatataaagaggggtggaggacgggacgggataacatgacacaaggaacgaggttcgtcgccgccgccactccaccccacaaaccctaaccgatcgagggggcacagccagtgacgggaagtccaccgccgcgccacgcctcgtcgtcgacaccgtcgctgccgcaaccgcatcaccgccatcggcaccgagcacaccgtcgccgccgtccacgtcaagcccgcgacgacaacgacgatggccggccggacttcctcctcctcaacaacgactggtcacatccctaaaccctctcactccctctttgttcattcatctattgttgttcatccatcgcaaatagaaccacccgactagatctaaacctaggtgatccaatagacaaccctaacaaaatgtacatgttctgaagtagtatgatcaatatcaagcaatccagaaccgaaaatcaacaactaaaaattgctttgatcaaagatagcttccgctatttttagaagaattgaggatttggagcaaagcacggttttcctcaagcccatttcgctcattcactttacgaattgagcagatctatatcattccagctacgccttgcctcacaaactttttttttcatttttaatctcgcgtaagatttaattatccatggtcgctgaaagagatgattctgatgaaggaatcctccctgccggcaccacccccgctgccgccgacgctcgccgtggacgtgtccgtcgtagtgggcctgctcacggccgtcctcctcgcgctagctcttcttcttcctcatctacgccaagcactgcaagcaccgtggcctgggcgtggcgcgcggtgtcgctgtgctgggcctcgggttccagccgtcgtcgtctttgtgcaagcggtgccgctccggcctgagcagctgtgccgtgggagcactccggtgtcccggttcggcgacatgggcgacgctgcgcggcacggcgagggaccaggtgaccgaatgcgccgtgtgccacggcgcgttcgacaccgccgagctgctccgcgtcctgtcccggtgccagcatgcgttccacccaggctgcatcgacgtgtggctgatgacgcactccgcgtgcccggtgtgccgccgcagtgccgctgatggtgcactccgtgtgcccggtgatagggaatcaacgtttcctagctatgtatcggcgtcaaagggggaggagcgctgcgacatgcgcagatggaagcgtgcatcgcggacacgagcggttgcgtgagcgtggatggaggcgcagccgtgtaggggtgggtggatgcgcgatgcgagcgcggatggatggggagtgggctggtgcgttgatcttgcgggaggatcctgggagagctctcagccattagattgtttaggactcaccaccgccactacgaattttttaagtagtaaagataccggaggttaaaagatgacggcaactcagctactatacgagtaaaagttcacctcctattcactttacgtgacatggaagcatatatgaatataattggaaattagatctacagtataattcaatgtcgaattataaaaataaataacttgcaaagaaaaccaacaatacagtttgattcaactccatgtagtcaagaaatatcaacttccaaacaaaaatctctttgtttttccaccatgcgtgcaagttgttttagaagcacgcaacacaagacttggtactccgatttatatatgtatgtctactaagttacaaaccacaccatgaattcaagtcattatctaaagaaaactttaggttcaagtaccaaacgaaaactgaagatcaggtctgaattccaatacgcattcaagggtacacctcaattattgatagaaaacctaatattggcatgattttgtaggcactaaatccagctttggaaaatatactttcccattctttctcctctctctcaaccccatctatgtacatcatgtagagatcaaacaacgcttgtgtctctttgaagatgtggggacacccgataaagtcatggtgtcccacgaatacgtatctgcccaggatgttcagttacgcatgaaatgatataaaagcataaacttcgtttatacaatacttaagtcacttagttcacaacacaacataaatacaaaccattacatatatggcctataaagccttatttctaaaaacagataaactgctagacttcaccacaggaactgcctgagcgtaggatgacctagaaaccatagttgtcccactctaacagatcaacaggtcctccacatgcatcttcctcttcatgatctgaacccatttatgagtacaaatggtactcagcaagacatgcttatgataataaatacaataattgcaatatacaacatgtagtattgagaactggaaggattataccctaaccttaacagttatttcatttcatagagcctatcttaataagcatttgttataaacactattgaacatttaatttaaacaataataacgagcataaaagtatgaatgttacttataaataacatgaatagaacattaaataataaataagttaaccatattaattaatagccatttagtttaacttgtgcccataatctggaatcacccatagacacatctccattaaccgggagcatggcgtattcgaatactcaacgactctgcagcgtctgcccagctttacccacacgatacccacagctggcagggctgaaaagtaacaaggtgtaatattgctccatatatctctcccttctgtctagtaagttaaaggatgctcgagatgttgcttggagtgatccagtccaaggtgtgtaccaacctacctccgcatccacttaccattgttcgttactcgatgggcagctcagaacttcatggacccaaagggtagttctgaactctcggggcccatcgagcccacatatataaatcatataaacatggaccatgtcactttgcttcacacacttgaaagctaatggccagtacaccgaaaggcctgcagaagtttaatcaattggagcaatatacggctagattcgataactcgatcgtgtggatgggcgaaactatgtcattcttattgacacaaggggggttgattattatatcaattttaaataagaaataaccataaatatatccatatattcaacacgaccataaacaggtccataaaaccaaacactctatcatgtgtaccacccgcttacatgcggtgtcaacaattctcagcatatagccataaatagttctataagcatgctttcatatgcagtaataatatccataataaatcaatagtatgttaaataattaacagtttgtttaagtgtttatcaaattttatcctaagtttgttagactctaaggcttattaaggtatttataaaaacaacagaaaaatataatgcaataatagcaatataattaacttgaaagaattcgtgcagtctatcgtactccaaaggacaagtacgctactaaaataactcgctatctactgggattaaattgttcaagggagggtgcatgtcttgcaaccttcgggctcgatgtagtcgtacaaaccgtctcctactggcgcggagatttcactcgctccgaataccggaccaacgtcagcgttttctatttatgcaaccatcatcatcacaataaataatagaaaaacaaagataaccaaaagaaatagtatcacaaagtgcaacaatgggtgaaaaggatttaaagaaataattttagggatttatggaatttcggagaacggcgaaccctagggctaaaattagggtcgcggcaacgggtgctcggattgcaacgaaactgatactgatggattcggaataattctaagagtttggaataggtctcggattttgtttttgaggtcaaacaatggtcaacctgatagaataagaaaaaggatttttctgatttatttttcaataggaaaattggatttgctgttcttctcgttctgcacaggaactggccagaatcccacattgccggcggcagaggaggccggttttggacaagggggcgccggttttgtgatctagggctcgaggcgattccgtttttgtggtcggctgcgagaaaagcgctggcggtgaggctggcggcggcgggcagtaacaggaggcggaggcggccatggtggcggcaactccggcgaactccggttcgggaggcggcctggtgaggttcaatgaggcgagaggagtcccagggtggtgacggccaaagctagcgggccctggagcggtggcgcaccatgcggctggcggcggccgaacagagaggcgacgccgagaggcggtgccggcgatgttccgacgatagattggatgggtaaagagaggggaaagggagtactcggcatggggaatccgattttaccttcaatttcagaggatcggcgatgtatgcgacgagtttcggagctcaatcaatgacgccggtattagggcttcggggatttttcctccggtgacgacgattgagttaacgggagtaggggcggatttgaggaggtgaaagaggttgaaattgcgcttcttttgcctccggtcttgagcgttctagtggagggacgaaggaaatacggaggctggaagctggaggtgtcgcggcggcattcgttcgtcgttcatcctcgtgagagctcgtgcgggcgtgtggcgtgcgaggggcggcacgagctgggcgcgagcacgacgcgaggcggcacagggttggcacgaggcagctcgagcgcggcttgcatcgggctggctcagcctagcttggcctagccatgtagagaaaagaagaaaatatggggaagattaaaatagttaggatttgaattgatgtggaatttagatggtccgacattcgggatagatttaaatcttattcaaaggaattatttgaggaatgatatgcactttgcgacaaaattaaacgagaaaagaaacatcgaaaacaaacatggaaaatagtattttaaatgaactactaacttgacggttatttttttagaagatcaaagcaaactaaatcggttttaaaaagttgtcaaattttagggctgttacagaagatgtccctctgcgagcctgatccaaccactatgtttatgattatcacctttcctccagcatctctagtaggtattgcatctttgcaccgtcgaagtatcttgacacaatcgtcatcaccaaaacaatgcaagacatactgaaacataaacatttagaagtataaaataaaagaagtttggaggctaactagatagctaaattgaagggaaaatgcatctctaaaaccctcgaactattataaattgtctagtcaaacctatgaagtttgtttttattaagccagatctgttaggtgtattcattatggctaatgcgccagcctggccgctcggcagaatccgtttagattccccgccgggcccacaaccacagcttgggaagtcgtgaggcgccacgtcagactgtcctcaagaggccaatgtctgacgtggtgccgggggctactgtcggagatatgggctcgggggtatgtgaagtgaggggaatttaccttcccatcctgccgcgtggccctacagcttggccctacccccgcacctcgcggatcgcagaagcagccgggaggcctcgaggtgccacgtcatgcccctcgggccctcgcgccaccttgccccgaggccctcgcccaactgccatgtggcggggggagcgagcggggaggggacccaggctgaaccgctatcaatgcgcgaggcgccccaactgcccctcgccgcatttcatgcggcaggggcagacgtgcggtgccacccgactgacgcacggcagtcaggaatgaccggtctgtgaccggcctgtcaccggtcatgaccgattggacgggcggccgtgcccccacgtcgcctctgtatccggcggagtggaggtaggtatgacccatcccatcggagtgtcattcggagctccctccacgaaaggacgaccaccacaagtcttcacccatttatgagggaatgacaaggttgtcccccgtgtcaggcggggggcggcgctgggtcccgctcaaggacaagttacggcttagcttccgggcgaagggatagatcgtgatccggtcaaggtagggtgggttcccaccctgtagaagagtaggtagaggcggtgcatgtggtatccccttgagctataaaaggaggatcttgcccaccgagaaaggggacgactctcagcagacctgagctctaggagaagagaagcgggaacgctcaccgaaatttaggaaccctagtaactctcaaccttaatcccacacacaggagtagggtattacgctccatagcggcccgaacctgtataatcctctcacccacacgcgactagcaacactcagggaggatacgcgatctctagaggcgagccctttccctcgaccgaactcacaaaagggggatctcacgatctcccgctagagaggatcactcctcgacaatgccgccacaatctactccaaatttctcaagtatcaagtttgagatttaatctacatgtccaggagtttagagttatcaaccaatcagctcagttttgacgagttggacaacagcatatactttcctctaagtgaagcatctacaacagctatagcaccaagttctactgccatcttcataaattaagatgcgttgcatcaatcttcgtcacacacatgccaacattaagaaaatacttgagcatggatttcttctcaacagtttgatggattattgtcactgacaacatcaccagcacctctacttcatcggccctgatatctctgccattgctaaggggtgactacgtccttgccattggttgcttttgtcatcaccgactttcatcgccgacttgttatttcgtcttcacggttggcctactacgcaactgccgatagaggacctcatcgttatcattgactactacactgctattgactggatcaacgacaccgtcatcttcatcaaaccatgcctcttcggctatgcctactctgctgccgttgatgcgcaacttcgtcatcataaccggctatctctgttgccgccaattgtcattatcgccgattgcatccaccatcgctgattgttttatgcttttgcgtgattgatggatttcgccattgccattgatgagcgtccacgtcttcaccaccggcttgcctccgccgccacccatgatttattcgttttcactactggcttattatgcttctactgatgggtgtctttgtcttcttcaccgggcacctcgtctgttatcgactgattatctcgctgccatgactgcacaactttgtcgccattgctgtgcgccttcgtcttcactgctagctgacttgtctgctgccgactggtttcttcgcctccatggctatgcggcttcatcacctttgattggtgtcattgtctttaccaccaccaacatcttcgtcagctttgatgggtgatatcattttcatgttggtcattttgtctctatgccgactgcgtcagctaccatcaatggacaattgtgactacaacagaaggataagctacatgcttaggggctcatcaacacaagcatgaggattatattttcaatttggacttgttcaggatacattcaacatggattcatggtcatgagtcgatttctcaagctcaacgattggactattcattattccccacgagggccatcagctgagtgcttgcgccagtcgggattcaattatcacatctacttttgtattctccatgagggataattactcggatgagaagccactcaaatgagatacgcttgatctacatcaccgaggatatttatcactcaggatcatattaattggcgtattttatacgtcatattttaagggtatcggtagacatactttaggtctaggcctaatatgtctgtaatccatattttcaggtgtggcctgtcacgttcttttagggacttaggcatctttttgcttaggcaaaagtgcgagtgatcgagtgcccaataccttaaaatccttttataccacagttactcaactttttaggagttggtacaatgcattttaaaaggtgccgaacagtgaagctttatatggctgccccgctgactttttatatagtcaaggcactgtttggttttataaaacaattgattggatacaatatcgttgctttttgccgcgtaagtgtgcattttttattgaccaatattatggcttgggctgatcatatattatggtcatttttcaggcgattggtaaatcatttatgagtttatttactcggatgttacaccacatatgccatatatttccagatgtggtgaaaccatgtatcttttagggactcaagcacatttattaaagcagtgtgtgcatggtgtatgcccaaaaactttggaaatttatttattcacaacatacaagcttctttatagttgttttgctatgtgaattttcaatgatatagtcaactttagattgtacgcatcatattttacaaagcagtcggtatatcacttggatcatgttattcggggattcacactgcacatgctacatattaatatcaagtcaaatggttgactacaattatcaaatccattcggttggttggattatttactccttgactatatgtttagtttgttcaactaatcacatagtcggggggctccacctattaggtgcatctagtcgatgcacctaagtctacatttaattatttttcagccctccacagtcttcagatttagtaaagttactagggagaccacggtgaagatgattgaagcactcggctttggagtaatctagttcgagagaagattatcttttcgattgggaaggtctcaggggctactgtggagattataggtaccccatacccacacagtatggttatctgactagttataggggatagcttatacctatggaatatgtaacggatcatgacttaggtattccgtttctttgtatattacggaacggcttaaagtcctggtttgataatattgcaaattagatttaggaaaccgataccgtattggttaaggtttctatcttgtaatcctgccctccatcctatataaggtgggcaggaggcctctaggggcagatattcataccccagatcgtcagatcaatacacacccagcggattcaaatcctcaaataagagtagggtactacctctcatcgagatagcctgaacctgtctaaatcctttgtctctgcatccatccatatttaggtctcatgcgctaccccctttatagtgctgaaatattgtttcgacatgtaatccattatcaaaaaaattctcaagttcttgcagtagatcacacatcgcacccccaccaccaagtttttctattactacggactacaactacgcaaattagtgactaacaacagaggacgagttcaagcgtgatcaagaggtgcttatacctttatctcttcatcctggggtacttgttaggaatagtcccacattacttatttaaggggagttaaaccaacttaaaagtaggagagcccctcaccactcgagttagattttgagatattgtaagacttcttcctgattgggccaatgtctcccggttttggccaacaagtggtatcaaagccaatctctagttcttgtgcacactcagcgtggtgtaagcccaaaatctagtggaccgcgggtgtgtcctgtatgtgcccatgtgtggggccggtctctattgcttgtgcacagtcagcgtggtgtaagcccaaagcctagtggaccgcgggtgtgagtcccgtatgtgcccgtgtgtggggccggtctctagtgcttgtgcacactcagtgtggtgtaagcccaaagcctagtggaccgcgggtgtgagtcccgtatgtacccgtgtgtggggtcgatcagtgctaagcggcaccaatgtgtgacgggggagattgttaggaatagtcccacattgattatttaggaggagttaaatcaacttaaaagtgagggagctcctcacctctcgagctagcatttgggggtgtaggaaggtttggggccaacagaactgtcctttccttcttcgcgatcctccggaaagtcaaactctgcacaaaagcaatccaacaatcagattataatctccaaatgaattaagaagcaagcggccaccaacagaccaactcaccaaccccggacaatcggaagatggaagttgtttattagagcgaggcgagatcggttcaaacactgcagttgtagtactttgttaattgattcgtggttatcaaatggttattaccggtccactgcccgaaatcatcacgcgattagattctcacgaggacgcaagagctatagataattggataaagtattagcaagtgacggttatatttaagcttgtgcgcgcgcgcaaggaaagcagcgggatggacattggcccaagatgctacagatcggaactatcgcagcaccgtcctcatcgccgcatccttcctaaatttatcaccatataataaaatttaaaacttcttaaattaatcatcataagcatgatgttttaatcgatacgtgcatcgcagcaccatcctcatcgccgcatccttcccaaatttataatcatataataaaatttaaaatttcttaaattaatcatcataattagcatgatgttttaatcgatacgtgcattgtgagagaatttatgcatggtgtattgattgatgtgacttaaattatcattggtcttggtgcataaatatatatatgatgattattttgagaataagagagtagttgggaactaacgtgcagtgcacgtaaaacggagcgactcattagtgcataattaattaagtattagctatttttaaaaaaatagattaaaatgatttttaaagtaactttcgtgtagaattttttaaaacacacactgtttaatagtttgagaagtgtgtgcgtgaaaaacgagagagtgagagaaagttaggaacttgcagcaacaaacgcgcgtaaatcagtagccattcactagtgcacatggttggcgctacatactgacactgccctcattggcttggatcttcctatgtcacgatttcctttattttatatgcttactctaccgctgtcaactaattaagtaattttacagttcctgtggcgttaccaaaaaaatacaatattttaaataatttttatgtaaaatttagttcctcttgatatctctggaatgaaaatttacattgaaagttttaatacctcttggtacctctcagtgattataaaatttctccaactaattactatatcccttcctgtttgctattatattagtgtcctctgctaatcaatttcccatgtttctcctatcgagtccaccaaagtctattacatctctcttttagtttgttgaggtcacctaggtttgcaacttccccaactccacgttggagttagcctttgtcatcatcctatcatcatcaccaacgtgccatcgcggttggtctatcatgtcatcagcttcccatcggaactagcaggtatcttcctcaatcactgaaggatcgaataacaatttgtgaaggtatttcagcatcattgtaactgtttccagatcagtggagagccgaaggataacttctgaaggcttatagtactaagagccatacaaaagtttatgaacactctcgagtccacttcactaagaacgtgatggaacttctcttcttcatcatcaaagagttgcatacttcaatgacatcacatcaagcaaagacattggatttatcttataatgtattgttaatatagagttcaaccttcaaatgaatgtatttagtatttagttgtacctttcaaatgcaatgttattacatacatgttgcatttgagtggagtgctaagcatattagttttagacatttcacgtcaattgtacatattttatatgcttattggaccttatcaatagcaacccaaagtccctctcttctttcccaaaattgacgcagaagaggctcatttgacaagtgcaacgggatgctgaagaaattttagtgagaagcaaatgcatggtggtgtctcatagtccaaatatttgcactaaaaattatgggatatatgttggtcaggctgcagtgttctctgaggatcacaaatatgaaaatttttttgatgggactcttgattcacgtatagatttcaatagaactacttccttggttttcctaggttttgagcagtgataaaaaaaatcattttcattataaacttgaaaatggaggcagttcattttggcgatttttcagaaattatttttaaacgtgatatccacagtaatttattttgatccaaaaatttccagaagtttgcacagataaattatatccaacattgtttatgtctgccacaatatggaatttaaactttatgtttttatttttatttctttgaaggcgctataaaattctttaatggacagtttcattatttgagtattaggatatgctgtcacatgcacaatatgtttgtgcaatcatgctgttattaccaatttggcaaaatttgctacaggatatcgaaaaatcatgtaattgactgggagataccacaaaagttgtgtaattggttgtaggacacccgaaataatattttattattttcgggtaaaaagaggtgagaaaattttcaaaatgacggaagtgcccccggcgtcgcaccatgtatcccgactcttcgccgtcctcccacaccctccccccccccttcgctcccaaagaaacacccgaaatccccaaagctaaccctaggcggcgacagggtggaggcggtttgtggtgacgtcaggcgaatggcgctggaagtggcctgttgaactagactcgacaacgatggcgatggagctgtgatttttgtcagcgggcaagcagcactggggatgatgtcactgaggaagaagtgagatgggaggaaagcgtcgctacgtctaacgagcacggaggttccaatgaagccattggacatgtattgggatcctaatggtaagtctcagtgcttttttgttacaatttaggattgaattgtatgatttttttagggttttttcacgtaggatggacgctagctcaacttgcagcgttgttgtttaggttggttcatatgttcagtttgatgagaacggtagaccagattttcatgtgtcttgtgaaattagttgggtactagacaaggataccatttgttgcaatgaccttatgaatgattttaatgacgaggtcaaacgtagttctcaacaacagataacaataactttttgggacaaaaatactaagaggtatgtgcagagatagttctttgcgctgcttgatacatttgatatgtactgggagatgaggaggctcactttggttgttgatatgagtgatgacctacgaaataggaccaagccttgtatggaacagggcaacatgaaaattttgcacaaacgatgtttgcaaagccaaatttcattgcataaactcatatgttcacgattagggtacttcacaaacttcattgtttgggttctttggggtcctcaatgttcgcgctaccagttgtgtcacacacaatggacaattccccaagggcactcaccagtgcggtgacgcacgaccaaagatgaagccgagccatccatctttgatgcaccaccatcgtcgccacttccagcgccgctcgatcgcccggcacagccaccaccagccatcaccgaagccaccaccgccacctagagttaggtttggatagggacttcgggtgtgtgaggggagggggggagcgacgagtccaactcagtctaattcaaccggcagcttccagcgccgctcacccgccatcgccaccaaccacctccaccatcatcatcgccgcctaagtttaggtttggggatttctagtgtttgtgggagaagcgacgagtttgactgggtctagttcatctggaactagtcggggttaaatggtgtgacgccaatggcacttccgtcattttgaaatttctctctcctcttttttcctggaaataataaaatattgtctcggatatcctacagccaattatacaacttttatagtgtccatcggcagtgtcacgttctttacggtgtctcccagccaattacacgatttttggatatcctatagcaaattctgcctaccaattttagctctggaaagcatgccagatgctagtagtatttttctacgcctatacttgtcaagcactaaaaaaaattcttgggttatttaaaaggcaaccaagtaaactagccatttttctgtagtataccagagcttaaaagatgacggcaactcgatctactgtacgagtaaaagttcacctcctattcattttacatgacatggaagtatgaatataatgggaaattagatctacaatagaattcaattcgaattataaaaataaataacttgcaaagaaaaccaacaatataggttgcttcaactccatgtagtcaagaaatatcaacttccaaactaaaatctctttattttccatcatgcgggcacgttgttttagaagcacaacacaagactttggtactcgcggtagcatcttgaatgggaagacttatgtatgtctactaagttacaaatcacaccataaattcaagtcattatctaaagaaaactttaggttcacgtaccaaacgaaaactgaagatcaggtctgaactccaatacgtattcaagggtacacctcaattattgatagaaaacctaatattggcatgattttgtaggcactaaatccagctttggaaaatatattttcccattctttttcctctctctcaaccccatctatgtacatcatgtagagatcaaacaatacttgcgtctctttgaagatgtccctctgtgagcctgatccaatcaccatatttatgattatcacctttcctccagcatctctcgcaggtattgcttccttgcaccgtctaagtatcttgacacaatcatcatcaccaaaacaatgcaagacatactgaaacataaatatttagaagtataaaataaaagaagtttggaggctaactagatagctaacttgaagggaaaatgcatctctaaaaccctcgaactattataaattgtctagtcaaacctatgaagtttgtttttattaagccagatctgttaggtgcattcatctttgtacaaggtcttgaagttcatgtttgtttatttaagccttgcaaatatcttatttattatatattagtcaaattaattggtgtgaatatcttgttttttgtaaggaaatacttgaccttcaaccctggataattactcactttattgactcttcaaaagttgtgttttggtatagtatttatctttgctaattggaggctactcttgaacatttatcgatccttattaatcatagagatgaaaacattggggatttcacatattaattagaatactatatagtgcgaagactggattgagtatatgatcgaaatcgtggcaatatatagttgttaccatgataattgcactaacacaatgatttttttctggcgataggtccatttcctagtaatgtgagaaaggacattcaattattgataatcgttcatcttattaaaaatattatctaaatatcttttgtttttgttacaacttattttatactccatccatctatttttgataggcatatttttaaatctgaaaaaattacttttgataggcatatttcaatccaaccacctattctcttaatgactttcttgaatttaatatgtgactccccattctttcataaagatcggctatatgggcatcgagaaatgtaaatattaatgaatcgcttgtttacgaggaataactagtagcttgtttaaatggatgataagtagaattacctatccttagtcattgtgccaaaatgaaatatgactatcaaaaatacatggagcgagtatcattaatgtatacttctaaacttcataaaaatataaaatttttaaataaaatggatggttaaacccatgaaaatcaattgttttagacatttaaaaatggaggtagcatatagccacatactcaatacgattttccctaaaaaatatacttcctccatttcaggttataagattttataactttgattaaagttaaactgatttaagtttgactaagtttataaacaaatatagtagtatttacattaccaaattagttttaaactaataattaaatatatttttataataattttatattggttaaaaatattattattttttataaacttgatcaaatttaaaatagtttgacttttatcaaagtcaaaatatcttacgacttgaaatactaaataaagatgcgacacaccttgagtagtacggcatctgccggcgggacgtactcaaacatgtcgccggcgacgaaccgcacgtcgccggcgtccggtggcgccttcctgaccacttgcgggaggtccagcacgctgcacttgacatgggggaacgccgcggcgacggccgccgcggccgcgccatggccgccgccgacgtcgacgagggagccaatcccgcggaacacgtcgccgccgccctccctgaacacgacctccatgacgaagcggctgtccgcggccatggcgtcgttcaggacggcgccgtacgcggcgtcccttccggtcatctcccacctggggaagccgtgcgccatctcgaacagcgacatcgccgcgccgccgccggcggcgacaggctcctcctcttcctcctcgtcgtcgaccctgaaccacgcgtgcaggctgaagaacggggtgagagccgtggggtgcacgagaaaccttagcatgggagacatgtcgtgcccgccgccggcgccggcgacgaggaggcgggacgccggggtgagcgtgtacacggcctcgccggaggaggccggctgctgctgcttcatggcgaagatgccggagacggtgagcacgcgcatgaggcgccgaaggtgcgggaccttagcctggcggagcgcgacgtcggcgacgatgtcccggagcgtggcggcgccgccgcggcggtggatggcggcggggatgccgagctcggcggcgcacttgagcgccatggacttgatgtaggagaagaagtggtggtagagctggaggtggccctggagcaactcctcggtgctcatctcgtagctatgttgtgttgtgtgttcatgcatgcatcgctagctatgcaaacaagcgtatttataaggacagacagctctctagattagattagtagtattatgatttgtttaattcagttttagattgttatattttaagatggatggagtcgtatatcatgatagtcgaaaatagcgtgggacttatgatcaggtagtagtaccgagctgtgatcattggttcgaaattttggaaattttgaatttttggaccccaccggtaagcacatatcttccccgaagattttgttttttaaaatatttgtggatttgactgataatatattcaaatttaatcaaaatatgttaaaatttccccaaaaaaatcggttagaaaatatcaaaattcatgaattttaaaaattttggcagccacataaattttggtgactaccgaaattgcaaacactctctgtgattgaaacagacaaaaaaagtagctatcgccaaacaccctaattcatttttttaagggtaaattggaaccatgccattataattttgcaaagtttgagatatgccatcggtatctcaatgacatgtaacaccctaattcgtttttttaagggtaaattggaaccatgccattataattttgtaaagtttgcttgttgccggcagcgacacttaacctagtacctgttattatcagctacccaacgtgtatgacctggtaaaagaatattgtattgtatttgttgtttcttacaggctttcctcccacattatggtagcactaagaggacaattaacatgggtatggtcatcgtctcccaccaatttttaatttaagacaacatcatattttctgctgtgtacctgctcattgaccatgaactttaactttgacctggttccaaaacaccgtttaatttgttataagaatcatcgacagcaacaggtggttaacaaattttatcgaaattaaaaagtataaattaaactaacactttaaatttggcctgcatgattggttgaaacaaactactcatgaattaaatttgaagtatatggatttatatcattccggctagctagtaataaaatttattcgaatgaaatttgacctgcataatcggttcacatctctgtatttggaacctttgcttccagcttcgacatttctaattaacgccgtcacttctactgtataccgtcaacattcacgcgccgccaccttcatcaaggcttcagtagttcagttatgcccggaagttgttataaaaatccattcccaatcatgcgccgtgtacttaaaaaaaactaagttttagacattgacaaagcctcaaaatgcacattgttattattactttcttgatctatatatttataaaatataaaagagtagtaaaagtacaattgcagagaaaaatcgatgttaactctacatggataaatttcacgtattaataattaatgatctaaggtatgaaaaatcctgaccggatcagctaacgtttatgtgttgtactgaactttattacaatatttagggataaagaaattactccctccatctctgaataattatagttttagttagtaaagggcatgtcaagaataagactaaaagaccattatacatttcattaatatggaggaaaaataaggagggagagaaaacgaggaggagaaatgagtactattggtttactggataaaaatgaggagcaaaagatgcagtagtcttctctgaaattccaatttgaagacaagttctcatcctaaaactacacttatttatacaatgactagaatagtaaccatagaattaaatgagttatcacgtaggataaaatataacatgtcaagtcagtaattgaagaaagaggagtaaagcgtgtcttacattagatatggtttctacacaatattcacaatatattgacagagtagtagtattaaattcgaatataatcagcagtactatttgtgttggaaaagtagtagtttcttaataatttggaggatataaaaatcatggctagtttctttttattgtgattgtccttagagactgaggaagtggtaatctataatggattaaatacataatagtagtatgaatttataaaagattgtttagtttcgtaataatagaatatgcatatataatcctataatatttaatagttgaggacggagtaaataattatggcaagtagcagccatcttgaccacatcgtcacctgaattcaagattatgtcgatgtccatttaactacgcctttttaattttcttcatgtccatgtgtcgacatctctgttttggaaccttgcttccagcattgacatttctaacgccgtcatttccactgcataccgtcaacattcaagcgcagccaccttcgtcaagggtccagttatgccagatggtcattataaaaatccattcccaatcttgtgccttggatttaaaaaaataacattttgaacattaacctagtctccaatgcatatttttattattactttctcaatgtgaacggaatttaagaaatagaagtttttactgtaaagctatatacacagagaatagatcaaaactattcctattctacgactatcatatactctcttttattcattctaatttattataccaatcaaaataaaatttagccctaaaatatcttgtggcatgtaacagatgggccacttcggcctatgtgttgcatgtacgtaacctaaacagccatctacccccgcaccttatgacctaacaaacttctcttctcgctagtgttgttgggtctcacgtgtcaagttggtggtggtggtggcagactcactaccaccattgttattggcttttaaagtagtatagataataatatcaaaaatataatttggtaaaatagtttcacatattaaattctaatatattttattaatcaatgatgtaagattttaagttttgattgcatgaattctaggttgtcctttagagaacaaagataaagggtggagcattgggtaggtcgatgttaggcgcgagccatataaaaatcgctgggagtactctcacctgtccagcattgccaagagcccgaaagcccaagaaaccatcaccatggacatgacgcaaacaaccgagtgggacaagagcataagctgtcaagggggagaaatcacctccttgcctcacccgcctctctgccactgtgccgaagaagccgagaggattcagatcctggtcattttaaaaaaaattattttacaaaatgaccactgaaaaactaattctaaaaaaaattcttttttgcgcatcggagtgcctggtaccgtcgtttaataaggcggtgccatcacctctcacgctgtccacatgccaacgtggcaccatgggggccaaccgacgttgatatggcggaaggagggcgccacgttagcatcggctggcccccgtattgtcacggtagcacgcagaggacactagaggtgatggcgccgctatgttggacgatggtgccaggcactccggcaaaaaaaaaaatcatttctagaataagtttttctagaggtttttttataaaataagttttaaaaaggactaaaatttaaaaaaatccagcgggatctagttgtgttgttcgggaaattagaaggggctctttgcagaattattcttgcatcagagtccgcacctaatcgtcaccacgctatatcagcactcagatcatgtcgtggttggtgtggattagtaagaccctatttaaatgggacttagatgggacttttaagtccctatcacatcggatgtttggacactaattataaatattaaacatagactattaataaaattcatccataattttggactaattcgcgagacgaatctattgagcctaattaatccatgattagcctatgtgatgctatagtaaacattctctaattatggattaattaggtttaaaaaatttatctcgcaaattaactttcatttatgtaattagttttgtatgtagtctatatttaatactctaaattagtgtctaaatacagagactaaagttaagtccctagatccaaacaccacctaatggatactgaatcgagtttaggggtttaagagttcaagcacttagatgacccatttacataaatatagaatttgtgtgtgcacttcactcttattatgacaccattgactttttacacaatatttaaccgttcgtattattaaaaaatatagtatgaatatgtaaaggtatgggttaatattatattttatttgatggtaaaacaagtgacccccaaaataaattatatttataattttttaaataaaatgaataatcaaacgttaggtaaaagtcaacaatatcgtacattttaaaaatagaggatgtattattttttttaaacgttgacttgttggatctcactagcatcccataatatcataatattaagagaacattattgtgtacttgtgtactcggtcccgccatgaacaccctcctcctttttcgttcttccttcgctactaatatagataagcgaaaacaattttaatcatctcatatggttccaacttcaaaactgtatgaaagatcctgattattgtttatgttttctgtaccgatcgttttattctaatattctaatatctctatccaaggcaagtagcagccttctagtgcttaaccatattagagtaagttttgttgaggtgatggtcacctctaattttatccatatcattttctagtagcatatacaacacattgcctctaatacacttatcccattatttatttttacttaatctattggtcactttctcttatcatctatctaggagcagtttgtgtaaaggttgctcattgcatgatcagtggctctttttctttctccccattgctctcttttccacattatcatatattatcctatttctttcatcctaaaatattagacataactattttttctcatatctcaaaatataacataagacgtgcatgcatacatacaaacattaacttaactatcacctcttgatattttaaatttagtttattttaaatcctctacgatcaaaccctcaatctcattgcttgcatctatggacatgatccaactgaggaggtgattaagttttttcttagttttttattatcagttactccctctgtcccaaaatataagcatttttagctatgaatctggacagccatgtgtccagatttatagccaaaagttgttatattttgggacggaggtagtattaagctttataatttgggatggagagagtatatggcatttggaccaagagctctctcatcacctgaatattctctccctctcaatataaataaatgtagttttagaagtaaggggagaaattaagagggagagaaaattacctaggtccccctagtgaacgagaagggtaggtagcgagtggatagttgatgtatgtatgtatgtatgaagagaaatttaaattagatatgattgatgggataaatagtactacatgatttacttattttgaaacaaaatttgaatataagaaatatatacttatttttggactttggggaagaggtagtatttttaaaaaaaaaaaaaaagtggatgtcatttgatacgctttttaattttcttcacgtgtacagagtacagactacagtgcacggcggccttaggacgttcgtcagttgtatccaatatttatttcgccgatcgtgacaaatacattgttttgcacaacaagataacgtttcaaatttagttttgatcactaattttaaacagtggtctgcatggcggctttcccatgtttgttgggaataaaagcatcatcatgccaaacattggcagccaaagttgggcttaaaaattaaaacatgtagtagtacatcacccaacaggtttattactactcgctcctcggtttgatttctcccgagttgattattcaaagctcccaaatactcgctcctcggtttgatttctcccagagttgattaccgattcaaagctcccaaatgttgcgttcatatttaacttctttttctgccttcggcttgcatgtcaaatcccattactcactcatattaactcggactcgctcacatcatcaggttgtttatcagacaacaggagccattgtgttaacacataattcagacaatacaacaggagggagccaaacgccaagataaataaacagatgatactataactcgaagaaaaccaattattcttttttttagttacttgctactatgccccctggctacagagtaaggtatacatttgcgaacaagcaaaatttgtggttaacacatactgctttgtaacgacattagcatgcagcttgagttcacttgccactgaaagaaaaaaaaaagctatgggtgtatgatctggcaagtttttttgtgctctatacaactgcagaaaatatttaataaaagaatcaaaaatgaaaattgatgggagccgtgaccgtgatcatggcagcaagatgccacctcttgctcaaaatggagattccagtggctgtaccaagacagatgatgcatacaaaaaggtttcctgcacctgtcgacgagctgcgttgtcacaccccggatcctcggctctgatcagaaacaattgctggccatgtatggattggcaattttgcgcacagaacaaacatcaacttctcatcaagcttgatcctgatccatgatgaattttgttgtagatggatataaaggcaaatgctcttactgtttgcccgcagtgtgcaagttgtagtttggttttgggaacaggtgctcagttaatgccattcaaggggttctgcctctttcttcgtttttcccttaggacgaccaaacattctcacgtttttaccagtcaagagcttcagtgcacgctcgagggtaatcttctttgggtcagcactctgtcatatacaattttcaagaaattctcaaattgaccctgccatatacatttttttaagaacttctcaaatttaccaaaacaaggaagcacacaaactcaatttgaaaaaaataatatgcaagtctaaagattttttttttttaaaagcaagtcagtaattgcaattgttttcaattagaatttatgaaaacaaaacaatagaacgagcataaaagaatgaacaatgcattgttcgtttctatgctcgttattatggtgtctgatatcaacattcaacagatacaatattcaacaaatacctttggcaaggaagcaagagttctcctgtgtctgatactaaatccagctttagaatgtgtgataagtacaggaagatcatcatcagggtgttttccctgttagacaacaaaaacatcatgggacaactcatcaacgtgtactaatgaacagctaaaatgttagacataccagaattttgggatactgcaatagctcgattgcatctttcagagtgatagagtcaatatctttcacctgaaataaagggtagccatagctaaggttgagttcttgaaaaggtcaataagatagatcattgctaaggacagggttgcactgtgtttaaaaccagataaagtggaagttacctcagaaagaggagctcttttcggtgatactccctttctatcctctccaacctggacgtagtggccataaggaccttgtttcaaaaacacctgtaaaataagcaacaaaagtatatcataaatatttgttacatgcaaaattacaaagcaggatagccgtagtaaatataccttttcatcagaatcaggtagcgctccaagtaacctaggtgtgaaagtcctttgagtttcatcagatgcttcagtttcatcgtcatcgtctgataacgtgcgagcaatgtacctacaagtttaattacacaatgtgtactcaattataattgagaaatgctggaattagtttataaacagcgctaaaatggataatagcagtgattatactcaatgaattgataatttctaagagaggaacagagggtcatacttgcatttcggatgtcgatcacagcctatgaaatagccctcaccatacctactaactttgaatcttagggttccttcagaacaactgcagatattgcaatcattttaagcacacgttatgcataaggattaaagatggcattgtagttatcggttaacaatgccatattaatatgtagtactccttccgtcccaaaaagagttgatttctggctattttccaggtgcatagctagaaatcaattctttgggacggaagaatatatagtatgaacatgtagatttcacaatatgataaatattaactctctactagaaaatagcttctagagagcgatgacatgaattacctagggcatatcctactatcattgtctaggtcagaaaagaggatggaaccgaatttttcttcaagcattctttctacctgcaacaaagtggatagctcaaatattgttctcaatactcaagggattgcacatctatatgtcaacagtttcatttgctaataactagaataaagatgcatcaaaatgattattacaggctgactaatttgtctcatttctcatttcgtagcccaacatttctcatttcttatgccaaagaagaaacattgagatttgcaagtttcaagaaacctaaggcaatgattacatgttacaaatcctacccatagaaaccagaatccttgtatttaataactacaaagatcatttgatggaatcaacaccggatcagcagaggcaacggatcatacgatcttgcacgagaacaggagtttgttcatgcacgaggtcctcgcagaagcactgcacgagcttcaggcatggagagccgcagggtcattaggtttaaaactttccaagatgatgaccagggcctgcatgcccaatccactcccttaccagctggctatctcgtgtatgacgacgatgtacaactttctatctctaatggaaatacatgcatagcttttgaatgttccccccaaaaatagaagggtctggtatcttaattcagttgctatgacttgacaaaagccaatgtgatcatgtggcaaaaataaacttatatgcatcatatggtaactagagcaagctgtaatactgttgctctaggatatattactctcctgttcatttttagagacgcagtttaactttgacttggtaaatatctcaaaattaaaatacaacaccaagatcaaatgaaagtgatttgaaatatgaatttaacgacacaacttttgactctgtaaacttataaagagagaaccatcgtcacttcaaaattacaaaatttgaacctttaaaggcaattgcaccttatgagaaatcaggagtgatttgcgttctacctgtaagggtaaacaaaattatactaggtatctaatgaataaagcagtacctttctgacgtcaaggcgactagcatcgccgcaatatttattgaatcgttcccaaaagtctttcagaaggcccttccattcagttgatccagcagagacattatctagctattaaagcagcaggaaaggagtattaatatgattattataccaataacaacattatcacattaggtggctagctcttcacaagaataggaaaagaagtttatatggtttcacacagatcaacccatgtcagtggaagtttgagtgataggaaaagttacaagaatcctaccgtttacatccatatatactggcatacctcattcaaaatgacaagaaaaaaacatcatcagtggaaacaacaggcctgacctatgatattgaccaacctctttttgtgtttatatatttcaagctaagcaattctaattttagcatattgacccacatctgtgggagtaactagccagcttaggctgtgttcaggtgttggtgttgggaactaatccctcgcgaacgcaaaacggagtgactcgttagcgcatgattaattaagtaataagtaatagcttttttaaaaaaaatggattaatatgatttttaaaagcaactttcgtatagacctttttgcaaaaaatgcaccattagcagtttggaaagcgtgcgcgtggaaaatgaggtatgtgagttgggaaaataggataaagaacacagccttatgctggtttccgaactcaaaaaataggaaagaagatgcatatataaactacaaactgaaatttgtttactacctcagtctccatgttagcagtaaagctgagatctgcaacttcagagaaatgatgcataagaaacgccgagacctgaggaagatggtaccgaacatttgtcaaaaatagaagaaatgaaataatttaattaattaaagttatcagaagaaacattgatgtgggaactgaaagaatggaatcacatacaaaaggaaaacataaactatggaatgcacaagttactcatcttgagaaaaatgacataggaagagaaaatagagaaaaatatccatgtggcgattgcatcactgaattacaaatgcctattttgcatccttgattgatcaaaatagataaaacatcccttacaacctaatccacccaggctttgtttgacatggcactgcttttgagattgagattgtgtggttacgtgtatgtttcatcacacgtgacatgcaaatcatccttcacttgtgggaccaaccatgttaagaaaataaaagcagcgaaatgggggatgtaaagggtcgttgtcagccaggtggcagcaaagagctcacagaacagtgacagccagatgaggcagcagagtcctgagtctagcatgctgctgcgggtgtttaaaagggacccatcacctgcagcagcagtgtgtcactatcagggaatctccgtagatggcaactttacttgttattagtcctgggtagcgcctacgctcacaagcgcagctctcactatagaactactaccagtgctcctacacatccatgtgaggcatcatgaagaaaaggcacgagacagtgcaggtagttgaacaggatgaagcggaagccacaagggtgaggattggccattggaaatgtgcagatatggtttctgctacaagctggtcttgtggatagttacgaaggcagaagcacaagcacaagcagaaagacattgtaaggtgatgtttgggctctattcaattcatataattgctagctagaatgctagatgccacataaatgcaccattgcctactataacaacatgattggggattgaagtttgaacagtttaactattgaagtttagaaaacttgacaagtttaggggctaatatgtaatttccttacaaaaattacacttctgcgtaatggattatatgatataaggacatattgtctttatttaaaccaatataatgaaaaataaatgtgataaggattatagatttattgccaaataaggctaaaaggaaggttaacatcaggaactataccatccgaccacgaaattcagggtgtagaacccgactttttattgtcacatatttacgatcctgaaaagcaacaggtaaacactgttatccatgtggcttgaatcattgctaattataataatgatgcaagatcctggaactttgcaactgtttattttgtccatgtgttctacaaaaacacaaaataattttcatcatctcacaaatagcaaagtaggcctgcttgatccattgctaacatttgaccccaataaaagacaaacatttgtgcatgtacgcttgacaaaatctgtatgtttgctaccttgcccaggaatgggatgggatgggattggatcccattcaatccctgtcaatccaagttggatgatggattcttggggctgagatgtttccttagccttaccttatttacggccatatattagatgacctagcacccatgtaacaccttagctacagtacctccttgatttctagattcagatcttatcttatgttacaatgaactctaaagcccgatcaacaatttacatggcagtgaactacaattgacatcaacattccagtcccagagcttaatgcccaggatgaccaacatataaactgaccccaataccccacgttagagaccatgaaaaaaaaaaacttccaatggattcgaaaggtccagggtgatgtacgtccattaaagtcctacagttaccagatggtctgtattgcatttcatggtttatgcatcactacaggagtagctacatgagcaacccagaaaaaacatgctgtatgcgcatattagtgtgttcaatgagatatagttctggagataacagagtagatcttagcaatatggcacctgcaatactttcattatagatgcatatgtggatggccttccaattccaagttcttctagctttttaatctgcaaataccaaggaaaaaatgatacattcttaaatatatctgataaaaaggaaatatatttctataccaagcatggaaatgcccagaatgaacagataaaaaaccaacatataggttattactgaccaatgcactctcagaataacgtgatggaggtttagtaaagtgctgtgaaagatgaacgttaactggagacaccaagtccttaacctgagaaaaagaaatgcaacagtaacatgcttatatagttgaaagacagacaacagtgcacattagcataaaaaataggtcatataggaagtgcatagttcaggtaatttgacagctgctgacctctaatttggacaaggcctcaaagttatcctggtgaacagcatcaacctcagaattgtaactggaaggacttgcttcagtgtcctaaaaggatagcaaattttcccgttactgagttaagcaagctaaactgaacactaggcacagagttcttaatagaaacgtaagtactgatcgttagatctccaaaggtaacatattttcttaatagaatattaaacataatgataatcaggacagatccatgcatctcagtgaagatagaatgctcaaatagaagctctctagataattaaaatggaggtagcaccatggcacaatctcgtatgttctacaaaattggcaatttcatgtatcaattactcataatagaattaggatttaggaaacataaaaatggcagaatcaaaagaaaatataggatcacctagtcagatactcagatgtgtgtatccaattctagcttagcagcgcatatgacagataatataactctttttttaaaaaaagaaaaaactagggtccacatcagcctaagcctaggacttatccaagttgtcccaggatgtcacatggtccatataggcatacatataaaaagaaacaatactgcaa

SEQ ID NO: 6089 - DNA, 2436 bp, Oryza sativa
tgacaggtctaatggcatttttgcaattttctagtggcagttttgcaataacgattcaaagtagtggtaaatttgcaattgccccaagaatttaagtttgttattaggtcgagcggcagataagaagtcgtcttgtattgcaatttatttgagctgcgagtcgtggtttcatgatagtcgtgttgaactcagtttttatctgcccgctgccgtgcggacaatgagcgcccaccaatccaccgtaactgataactcttcgtcccattttaaatacagccataaatttttatatctaactttggttatccgtcttatttaaaatttttctataattaatatttttattattttatatgataaaatatgaataatactttatgcatgacttatgtttgttaatttttttagaaagtttttaaataagataaataattaaagttagataggaaaacttatgactgcatttaaaatgggatggatgaaatacttaataattactaattacagcatcacaaacaacggcttccttacgtggcacacgtaagccgttgcttgctttcttcgacctcccaagtagggctggacggaaaactcgaagctcgttagctcgctcggctcgtagcaggctcggctcgactcgactcggctcattaggataacgagccgagccgagccaagattttagctcgttagtataacgagccgagccgagctaactcgcgagctgctcgcgagctgaacgagctgcgctttctggactgcaggccgcatccacctgtgtccgcaggccacaacccagtagcccaaaagcccccccagcccacacgcacatataggagaaaaaaaaaccctaagcctcttgcccttctcacttcctcagtcctcagagtctcacgcgcggccgcacaggcacctggccgccgcaagctcgcggctagggttactgcaacagcgccagcacgcgacgcggcgcgccggcgccgtgaccagcgcctctccgtccgtgagtccacgagcaggtcccgttccgatcctcactcggtcactcatctttcctttttcctctagatagatctacatttgctgattgccgaactgctactgaactgctgactactatgctccaggtccaagccctcagtcggggtcgcagccatggagggtgagaataatgcatcgccgcatcctccaagtttggagtcgaggagtaagcttcgtggacgacgaggaacaagcactcggtcttcatcgaatcccactgtgtccttggaagtggtggtatgttatctaatttaaaattgctagttcgtacagtatagacttgaatgttgatttaattattgctatccagagtgctgtccagattatttagttacttccatgtagatgtagataatgaatttatccccaaaaatgaagaatgtcacacttaattttaatgcaatggcaacgattcagctatacattaatacatgtatatttccttatgcagccattggagaaagtttcagaagatgaagacgatgataacagcttcaaccatagggatgatatgtctgaaagcctacctacagttgatggtggaagtggaagccagaagggtgatgatgagtttgatgatggtggatcaaaggctaagaaggcaaagacaggagggaaaaaagctggtgtcacagtgtctcccaagtgcaagatagcaagaggcaaaagagctgagtgctggaaacattttaaggttatcaatgtcccatccaagaaggagagaggtgtcatggtggcaaaggcaaagtgtaagttctgccatagaagctatgtgtatcatccaggtggtgctacaacaactctgaaccggcacctggctggttgcacacaatatcagaacaagttgacaaaggctaaagctcaaggtacactaaactttggtccagaagatgacaactctcttattgttaatcctactgagtataatcatgagcacactagagaactgattgccaagatgataattgctcatgagtattcatttcggatggtagaacataaatggtttaatatcttgatgaaatggatgaatggtaactacgagtttattggtaggaagtctataaaaaatgaatgcatgagggtttatgaatctgaaaaaaatcaactcaagaagagtttgaaagaggcagaatcaataagtttaaccactgatttatggacgtctaatcaaaaccttcagtacatgtgtttggtggcacattatatagatgagaattgggttatgcaatgccgtgtcttgaactttatcgaggtggatcctccccacactggaattgtcatagctcaggctgtttttgaatgtatggtagaatggaaaatagaagacaaggtcacaacaataactcttgataatgctacaaacaatgatactgctgttacaaatttgaaggc

SEQ ID NO: 6090 - DNA, 25196 bp, Oryza sativa
  unsure (1)..(25196): unsure at all n locations
tatacccataggtgtccctgtccaagtaaaactagggaaactaatatgcatacaattcgagtagtgcttgtcgtttcatgtagaactctattcatccttccttttgtggaactcctcctatatccgaaggttgtttccgtataagacatggtatgtggtgggtcttgccgagatttagtcaactactattaggtacgtggtatccataatcctgacaccgtatgaattagattatacatatatacttctataaatcaagtacgtatcacaacaatattcaggctttgatatggacggaaacagatcaacaaatattagggggacgaaagctacagcagcaggttaagaaacgttaaaaaaagatttccgtaaaaaaaagaaagaaaaagatttctgtaccaaaaaaacaagcgctaaaaattttaggaattgctaactagcagcctccgataaaaaaaggtgcaaaaatcgggtttccgccttccgtaaaaaaggaaaaaaatagtgcgaacaaaatattttgtccgattcttaaaaaaaatcccgtcctccgtgccaaaaaaaaaacaagcgcgaaattttttttctatccgattaaaaaaaagtgtgttcctgttttccttaaaaaggaaaaaaagtagtgagaaaaaaagatttttgtcctatccttaaaaaaaatagtacgtataaaccggtcctcccgaaaaacctccgtgcccgaaaaaaaaacaagcgcgaacaaaggttcccgttttccttaaaaaaagaaaaaaatagagagaaaaaaggttaatggaagaaaaagtttttgtgaaaagttaaaaaaaaatctgattccataaaaaccgatgcttttccaaaaattcctccaaaaaaaagaggttgatgggaaaaaaactaagagtccataaaaaaaatccaatacgagattagtaaaatttaggaacaaaaaagttaaaaaaatcaaaattagaaaaaaagaaaagaaaacaagagttaagtagaatacaatttaaaattaaatataatcagtatagaaataagagtacatatcagaacccaatagtagatgaattaaaataaaaaaataaagtagatgaattaaattcggaataaaaataaaataaaatctaaaattaggcaaatgaaaaagatagttaaagtaggaatacaattttgaaacggctgatgaaaataaaaaataaaaagaacaaaagaacacaataagaaaaataaaataaattctaaaattggtgataaaaagtaaagactattgaaagaaaagaccatctaaaacacatgacgagattaattaagtaacaggcttacagtggagcagagtggtggctgttgatgtgacatctaaaaactattaataaatcaccagataaaatcctaatgacgattaaaaggaaggacgacgggcatgtcgtgaagtaatcggtcaaggcggttggcgggacttctagaaagtaaaaaaataaaccccaatgaaaatcatatttgatttttaaaatctcaattaaaaaaaagagaggcagcgggtgggtcgtataggagtacaatggcagagccgctgatggttggtgggtcttctagaaagtaaaaaaatgaattccacgatagttatgttcgattttacaatcccaatgagaataaagagtatgcggcggacgggtcgtagaggagtatagtggcaccgtttgacaggatttctataaattataagaaaaaataaaacccaacgagacaataaactctaaaaaatataaggtctaatttttaaaggtttgggcttctaaaaagtaagaaaaataaaccccaatgataatcatgtttgattttaaaatctcaatgacaataaagaagggcggcagcggacaagccgcagaggagtacagtgacaaagttgctgacgttttggcggaattctagaatgtaaaaaaataaacctaaacaataattatgtttgatttttaaaataatactccctctatcccattttaaatgcagccatagttttccgcacgtaattttgactgtctatcttatttgacatttttctaaaaaaaaattaaaaacattagtcacgagtaaagtactattcatgttttatcatcttataacaacaaaaatactaattataaaaaattcaaataagacggacgatcaaaattgggcgcgaaaacttatggttgtaattaaaatgggacggagggagtaatgacaataaagagaacatgcagtggacggtcatagaggaatataattgaagcgtttgacaggacttctaaaaattacaaaaaagaaacctaactggaaaataaactctaaaaactataattttttaatccaatttttaaaggtttgaaggagaatgaatagaaacaatggtggatcgagcaaacaaataaagaataatatgatagaagtaaacggtagcaactggtgtgacttttaaaagttataaaattataaacacgaggacgataagatttggtctttcaaaatcttaagacaacgaggtaactatttaagaaattttaagtaaaatcatgttaaaaaatataattttatatgggtgctagccgcgcaattgcgtgggccacccgctagtttgtataataataaggttaatggtagaagagatgaagtagtactaattaagctgactgaaattaaacgctgcatgcggcaaatcctcccgattaataaaaacaactcgtgatcagccaatgtgaaggctgagaaaatcattatacgacatcatcagaggccactacgtaccgtaccctacccgcgaaatgacaggttcgtgctcgtgcaggtagtaataataatctaaccaaattaaagagataaaaccaaacaaaaatatctcgaccgatcgccgccaccactactacgactacctccttcccagtggatgcgcagatcgatccaatggctgactacctgggtgcgcaacgatcgaattacgcgaaaacgacgacgaaatcgtcgtgaaatctcacgtttccggcgcatgcatccatgttctgcccttgccctggccgccgccgggcgggcggctaacctcacctcgcgtcgcaagacgcgagtggctccactcacccacccacaccgccacacgcacgcgcctttcctttcgcgtgaaaaggtagcagcagcaagccactcaccttgtcacgtgatcccgtcgtccgtcccggtcacctcgcgacgcgatgccatgcgggtccacctgtcagcgacggacgaaaaggcctacggctgtgtatgatttatctactactattagctagaatatttttaaaatagattaatatgattttttaaatatttttttatagattttttttaaaaaaacacagtgtttaaccgtttaaaaaacacaggagatgtgaagtcggaaaactaagcttaagaccagataagtggggcgggcacggatcgatggagaaagtgcatcggatggtgtttgtatgcatgggaccatttctggtacgcatccaccgtaacaaactagcaacacacttatatatattaataaacttgcacagatgtaaactgaaaaatcgttgaaaatgttttgcatctgctgcctttttttttatctccagcccaaatttgaaaatctgaaaagtagcgcactcacacacacacacacacgatgtttcgtctggacgcagtggagacagattgttagttatcgtcttcatcaacgtgacaacatcgatcgatcgtccacatggttgttttctgctcgatgacacattggccacgttacgtgcgtacctaactacggccacacaatactgcatctggaccgtgcatattatacacttcttttttttttccttgtagaggaagatgtgaactggaactctttttttttaggggaagaaattaaaatcttagatgttgaatttgctgatgcaagcgtctcaatgagtgagacttgactgtggggtgagtaggaagcagttgaatctcgtggtcgatcgatcgtgtcgctacagcaagcagctgtgcatatgactatctccaatttttttttaaagtagataaatattaataagtatagtttttttttatatgaaaggctagctcgatccaggatttggtgacatggactcggataacgggataagataaggtcgccgccgagtatctccatcgatcgactgtcatcagtcagaagaccgaaataaattttggttttgacaaattttcgttgctcaatttcgaatatactactacttgtagtgaacagcgatgcacctaatggacttttcctcgcatgcaacgactttgaatgaaggtctgaaggacagagagatatatgatcgattgatcatttgatcattgagttagctaatccatcactgtttgttacaaaaatgcatggcttttagttcatgctcgcccttgataactcaaaagagacggagaattaaggaaaggtccatcatatcaaacccccaattcgatcttgatcatggatacggggtatattatatatacaggtggaaaatgaaaaggagctatactaaccaagcctctctgtgcaatttcgagctgtccctaataattgcgagacagaggattatttgcctaacgatggatcgatatgatcgaaccactcaatattgtttcccggacacaccttttggcgagacgcatcatcatcatggagtccaggaaaccaaatcaaccgtaaacaaaaaacaaggcgtgcataattaattagtcactagtaaattaattagattgaaacaagctagcagatgcgtacctcgccaattaagaatcccagcaagtggaataataagcatttatcatatggtataatggtaatgtgacccttatcatcataattctaagtagtagtagtagtacttctcctgttgaccaacaactctactgatggagtgatgtggagttgctgtgttttgtcctttggtggctggattttgaggccaagaaaatgcagatggatggatacatggtaacaccagggataatagtacagttcaggtatagtgactacggtcataacctaacataacaatgatggtcactcaggtgttaaattgggagaggacgattgcatttgtacctgaagctgaaaggaaggcttttggagtggtacacgtaacacgtactcgcggtggttcagagatgttgttgcaaaataagggaagagagatacatgggagatgatgatcgattggggaacaaaagttggtggctttttctcggggtgttagttaccaagttagttgctcgtgtgggtctcatggacgatctctcgatctccttggaggtttcctcctgctggtaaatcccctcgtcgattcggacagaacggtttgattattttactgtgttttcggtaggagtagaagagctcgctcgtgacgcatggttgaccgatagctccgtctggtactgcgtcgcatctatacaaaatacggtacactcattggttggtacttatggtttttggagagaattttgttgtatgtgacaaacagagacatgtctgttttcgttgatctgggttgggaatccatctcttacgcccagaaaacggaacgtcccgttaacacgtgattaattaagtattaactatttttttaaaaaaggatcaatatgattttttttaaagcaacttccgtgtagaaacttttttaaaaatacaccgtttaatcatttgaaaagcatgcgcgtgaaaaacgaatgaggtgagctcggaaaactaggcaaagaactcaggccgcggcgtgacagaggcaagcgaagatttcagttggactaagagcaagtttaatagtatagccaattgttggctccaaaccatttataggctgtgtttggatgcctccctttcccaacccctccccatcgttttccgcgcgcatgtttttgaaactgttaaacggtgtgttttttacaaaaagtttctatacgaaagttgcttaaaaaatcaaattaatccatttttttaaaaaaaattagcaaatacttaattaatcacatactaatgggtcgctccgttttctgtgcgcggtgtttgggttgggatctgcctccggcgaacacagccatagtcaacttaatagctaattcgtacaatagttacctataaatatatactacacaattaatatctggtcccgcctattatacaggcgtgcatcttggagtccgtgttgtagcagggtataaatctgtagccgctgcttttccctctcttcttttatctcttagaattgtgtttatagctggtttatagtttgctattgtacctactctaatcatggttgaagtgaaaacacggcgtataacattaacaaatacatggaggcatggagtgagcgtcgttattagagccgtggttgcgacgcaaaagtgcaaaaaaaaaaaaaaggaaggagggaggcgtcgtggtcggggtggttaggttagcggcctcgtccgatccggacgacgatccaatcgtccttttgctctctcctcctgcctgcgcgcctttgactcccgtggaaaacaaacgccacgacgagagagaaaaggcaggtggtggtgggggctatccacggccgcgcgctcgcgcgcgtgcgtgaccccgaagcaaaaaccaaccaaccaaccaagccaagcccgccaagcgcaagcgcggagccccgcgcgtcgtcccaccaccaccgcgcggctgcattcgacgcgattcacgcgatgcggccctcctcctcaccgcgcggcgccgctgtcgcgctgcgccgacacacgcccccgcgcgctcacccgcacgcacgcaccaacgcgatgcgtgtgcgccatgtcgctcacgcgcaacagcggctggctcgcgcgtcgcggcggtggttgtgtttttcttttctttttgggctaaggtgatcgatgccgatggggtggatttggatgggctccatgtggtggtggggggagatcaggagatgagatgctgcctcggccacgtgagttaacgagggtgtgcactgcacggacaggacacgacacgaccatgcgtttgtcaatgatcgcatttgcccggagctaggggctcacgcgcgcgcccggattgcctaacaaaaatacgtgtatttgtatatcgtcgtcgtcggtgtagatgtaaacgaaggaccgtgccacggaccgtagcataactagcacagctaggagaagattagctcacgtatatccatacacataataatgctagttgatactgctgctgctgctactaaatgcaagctcccagggtccccaactagcaaccaccactggtacgagtacgtctttcggaccgacacacgcgctgctcatgacaaaatcactgcatgcgagcgttctgttgatcaaatactgtcatggcatcatatgtttggacatgaacaacttccggtagctatagtttctctcagtaatttaaaatagttgaaatttggtaactatataagaaatcctgccaaaatttgataactatataagaaatcatgccaaaattttggtacagttgtcaaaatttcgacaatgccaaaatttggtaatgttttttttggcatcaaagtaaacatgtcactaattaaaaatcaaaaactgagttttctcagtttcctcatattcttactggtcgcttctcgaaatctaaaattcttaaaaaatgggcgccgccttaattgtactactaccatgtttgaactgttgtaattcggatgtaacaaaacggcatcgtactagcatgtgttaatctaaagttaatctcggatgggtcgttttcaatcagcagggcagatactgttctcatctcgcagttttctttttctgtaactgtgtactactagtacgagtacccaacgtatacgtacgttttaacagatgatttttttgggagtttctcctgtggattatacagtatagaaatgtgcgctttgcttgatgacagtgaggcccggggcccctgaaactcccccaaaaatcccagttatctatatatacccggaaggaaccacagtccctgcctgccatcatcataattcgcagggcaaccaccgctgggcacgcacgctgcctgctggagagcaccacccaatggaaactgattgatcctgcctctgccatggtgagctcgagcttgagctgagagccatcttcttgtacagctcgtcgtcagctttggtgttgttttgtgtagtgtagtagtggagtacagggtcacagtagcagtagtagttgccgagttccttctttgtttgctcccactctccctggatcttttttttaaatttgtttttttatttgttccctttttttttcaccggcttctatcttttcccactgctgctcgtagtggcatctgctgcttctttgtgcggcggcaaatgcgaaagctgccaactttgcgctcggttggttgttgttccttctccaacttagctagctggagtactcttttgcagctctccccaatcccccctccaactccaacctcctataaaatcagcggctcgtggttttctctctttcctgggtagattggattagaggaaggtgttgctctcaagtgactgatcagttgcttagattcagattcgtagtgcttgcttgcttgctccctgttcgttctgagttctgaccgtgcgtgtgtgtgtatggttggtttcttgattagttgttcttgctttggtttgagttgccgaggtggatgaatccggctaatgtgggagcaattattggggttttgtggcaggtgaggtactggtatgcaggagctcggtgggattaatcgattcttgaagaagagcagctcggcgctgcggttgttgctgtgcccaatctagcggcggcgccaggaaggaagaaaagctgcgaaaatctttggttggtcagtggaggtagcagcgagagtaggaggccatgccggagtcttggagagacgcggaggcgaacgcgtcgtcgtcggcctccgtcgccgcggcggactcgagcccggggaatggcaagggcggtggcggcggcggcggcgccgcggtggcgaggggagagcgggcggcgtcggcgtcggcgtcggcgcgggtgccgttccacaagctgttcgcgttcgcggacaagacggacgcggcgctgatggcgctggggacgctgggcgcggtggcgaacggcgccgcgctgccgttcatgacggtgctcttcggcaacctcatcgacgccttcggcggcgcgatgggcatccacgacgtcgtcaaccgggtgtccatggtctccctcgagttcatctacctcgccatcgcctccgccgtcgcctccttcgtccgtaagtgctggaacacaccactgtactctactctactctactgtctcgccgcaaagattgcaaagctgaacttgttgttggatgatcttgtggccagaggtgacatgctggatgatcaccggagagcggcaggcggcgaggatacggaacctgtacctcaagaccatcctgaggcaggagatcgccttcttcgacaagtacaccaacaccggcgaggtcgtcggcaggatgtccggcgacaccgtgctcatccaggacgccatgggcgagaaggtgagctgagccaccaggacacactcctccacatgctcaattttgctctcaagctgtaggcagctaaccattccccccatgtcaacgtcgggctcaggttggcaagttcattcagctggtggtgacgttcttgggcggattcatcgtcgccttcgcgcaggggtggctcctcaccctggtcatgatggcgaccatcccgccgctcgtcgtcgcgggggccgtcatgtccaacgtcgtcgcaaagatggcgtccctcggccaggcggcgtacgccgagtcgtcggtggtggtggagcagaccatcggatccatcagaacagtaagcatcaccagcagcaaagtgatcgatgaaaaggagcacacaatagacacaggattgttgtgccactatcatatagctgaaagaacccccactaatgcggcaatgtttgacgcctcaggttgcatctttcaccggggagaagcaggcagtggagaagtacaacaagtccctgaaaagcgcctacaaatcaggcgttcgggagggcctcgcagccgggcttggcatgggcacggtcatggtgctcctcttctgcggctactcgctggggatatggtatggtgccaagctcatcttgctcaagggatataccggcgccaaggtcatgaatgtcatctttgcagtgctaacaggatctctgtaagtcttatttcgggttatttttgtgcatatatagtttcagtaatatttatgcttgatttttaccaattgcttggaaaagcactacctttgtgttgtgtcctcaatgcttgaagtttctgcttcggttcccagtttcattttttagaaatatagttaagtcatgattccaaccttcaaggcatgctcctaaattacagcagttggtaggtgggaaaggattagaccgacgattagaatgtttagtacacacatgtacttcaaagttccaaattcctctttttgggatggggataagggaagttacaacagctaaagttttgtgattatgatgatttcgacgtgttaggctacaagcacaaactaaggtgcatgcctcttttttttttggtgatggtgatagcacttatcatgggtaaatagcttaacggattttgggtgtttggcacattggcaagtgatttggtagattcacctcccttttgttccaagttttgtactacctaactaccaactcccaccagcagcctcaggtagcatccaggatgcttttcatggtcaacaaaatagatgatgctaatgaaattgaagaatttactccaatttataaaataaatgaaataggtttttgctgtgaaaaattattggttcgtacactgtttttttagtctttttgtacctttttgcttccattttagtgatggtagccagtttgtacttcagttaaattgaccaagcaaactgattataataccagatgctgacttattttgttatcatatttaacagagcactagggcaggcatcaccaagcatgaaagcttttgcaggtgggcaggctgctgcatacaaaatgttcgagacaataaacagaaaaccagagatcgatgcatacagcaccacaggaatgaagcccgatgacattcgaggggatattgagtttagggacgtatatttctcctatccaactaggcctgatgagcaaatattcagaggtttctccctttccatacccagtggcacaacagttgcattggtcggtcagagtgggagtggtaaatcaacggttatcagcctaatcgaaaggttttacgaccctcagcttggtgatgttctcatagatggtgtgaatctcaaggaattccagcttaggtggatcagaagtaaaattggccttgtcagccaagaaccagtcctatttgctgctagcataaaggaaaacatagcttatggcaaagacaatgcaacggatcaagaaattagagctgcagctgagcttgcgaatgcctctaaattcatagataaaatgcctcaggttagaagtctactctatatgcaagttttgtgtttccagtattcagaatttttagatcattgggcataacatactgagatttcttccttctccttgccaatatttacagggccttgatacttcagttggtgaacatgggactcagctttctggtgggcagaagcaaagaattgccatagcaagagcaattctaaaagatccaaggatcctactgctagatgaagctacaagcgctctggatgctgagtctgagaggattgtgcaggaggctcttgacagggtcatgactaacagaacaactgtcatagttgcacaccgcttgagtacagttagaaatgctgacaccatcgctgtcattcatcaaggaacattagtggaaaaaggtaaaattcccaaaaggctcatatcaatgatcaaaatcatccattttatgagctctcagttgcccattgcatctttccttaaacatttaacatttttggtcaggtccacaccatgagcttctgaaggatcctgaaggagcttacagccaactgataaagctgcaggaagcaaaccggcaggacaagtctgaccgaaagggtgactctggagctcgttcaggcaaacaattgtcaataaatcagtctgctagccgcagccggaggtcatcccgtgataacagccaccattcattctctgtaccatttggtatgcccctagggattgacatccaggatggttcctctgataatctatgtgatgggatgccacaggatgtgcctctaagtcgtcttgcgtctctgaacaagccagaaattccagtgctcatactaggttccattgcatctgtcatcagcggagtaatcttcccaatctttgctatactgctgtcaaatgtgatcaaagcattctatgaacccccacatctgctgaggaaagattcgcagttctggtcatccatgttcttggtgtttggcgcagtatactttttgtcacttccagttagttcgtaccttttctctatagctgggtgcaggttgatcaaaaggataagattgatgacatttgagaaggtggtaaatatggagatcgaatggtttgatcacccagaaaactcaagtggagcaattggtgcaaggctatcagctgatgcagctaaagttagggggcttgtgggtgatgcacttcaattagttgtacaaaacacaacaaccttgattgctggtttagtcattgcctttgtatcaaactgggagttatcactcatcatcttagctttaataccactcattggtctaaatggatggatccagatgaaattcattcagggtttcagtgcagatgcaaaggtttgtcctctactgaaatgtttgttttgctggattattacttccgcaaaacctgacttctttacttgtttatgcagatgatgtatgaggaggcaagtcaagtggcaaatgatgcagtaagcagtataagaaccgtagtctccttctcagcagaagaaaaggttatggatttgtacaagaagaaatgtgaaggccccctaaggacagggattagaacagggattataagtggaattggctttggtgtttcatttttcttgctatttggtgtatatgcagctagcttttatgctggtgctcggcttgttgaggaaaacaagacaacttttcctaaagttttcagggtaagtattctgtactccggcagtggtaggagaatttaaacttcagctacttcatatataaacttttaacatcgctcacatatttttgaaatgaagaactcaatttttctgccatctgaatgcaggtttttcttgctcttgctatggcagcgattggggtgtcgcaatcaagtacccttacatcagattcttccaaagcaaaatcagctgtgtcttcgatatttgcaattgtggatcgtaaatctaggatagacccaagtgaggatgcaggggtaactgtcgaaacactgcacggcaatattgagttccagcatgttagcttcagatatccaaccaggccagatgttgagatattccgagacttgtgcttgacaattcattctgggaaggtacgaaaccatccatacaagaacctctttacattcaaaatgtttatgcttgctaaagctaactatccaaatcatttttatcagaccgttgcacttgttggggagagtggtagtggcaaatcaacagcaatttcattgcttcagaggttttatgatcctgacgtaggacatatactgctagatggtgtggacattcagaagtttcagctaaagtggctgaggcaacaaatgggtctggtgagtcaagaacctgccctcttcaacgacacagtacgagcaaatattgcttatgggaaggagggagaagcaacagaatcagaaatcattgaagcagccaaattggcaaatgcccacaagttcattagttcctcgcatcaggtttctttctaggtttctttcttttcattggtgtttgctattgtgattaaatgctagaaacatttttctcaaagatttgttttacctgaaaatttgtagggttatggcacaacagttggagagcggggagctcagttgtctggaggccaaaagcagcgtatcgcgatcgctcgtgcgattgtgaaggatcccaagatccttcnnnnnnnnnnnnnnnnnnnnnnnnnnnnnnctgaatccgaaagggtggttcaagacgcgctggacagagtgatggtcaaccggacaaccgtgatcgttgctcaccgtttgtctacaatacaaaatgcggatttgatcgcagtcgtcaagaatggagtgatcatcgagaagggaaagcacgataccttgatgaacatcaaggatggcgcctacgcctccctcgtcgcccttcattcagcagcttcttcatagccgccggtagtaaggctcctgcaagtgtctgctgaacatatattaacagaactggcacacacactgcaataattctgcaggtgctagtctttgttcctcttttgatggcatacataactgcttatagccaagagggaaaggctatacagatagtaaggaccaaatgtaaatgcaacaagttggtccttaacatatatattaattcatatatatatatgtaacacggatcatagatacccaaatagatgatgattatgattacctctcatgtgtttgctcttattttcccttggagattttattttctaccatgcaaggaactaccgaagggggaactgttcaagaaaggatgaacacatcagaaagatgcaccctggaactcaaatctcatcctgccaggctgccatgttaaattgttaatcagtcaccctcctctgacaagatgaaagaaactcgatggaaatttttatagacagaaatactgaaacaacaaacctgatgcatggaagagcagagttaaacaagactccgcagaagcatgatttttcttggcgatctccttgaaggttgcaagatcagatccaaaaaaacagcaggtgttttttggtgaccaagaaacaccaactctgttcggcacaatcgtcaatggccatggccaccatggcaatcgaaaacctactggcttctctgaatttatcaggttttgtcactgtcatgtactagtatactggtgtgtggccggggttgattcgtgcaagtaactttcaggacctaacccctctacttccgaatgacaacaaaaaaaggcccaatttcaaagcgaactgttgttgctgagagcacaccttgcaacctttgctcgttgtgaaaaagcacatataggagtgtacttcccttctagaatctggttaggaaaattactaccaaatccgatggagtatagtcgagaggcctgagatggatctaggtatctaaacgattcagacaacccagcggaatagtaaaacgagatcccacaataaccaagacctaatctcacgatatattagacggtgggagaagagcaattgggggagcctcttcagttgaaactccgaactggaagctttcccgccacatcaaacaggaggacacaggggaaaagcaacaagaggaggaggaagaagaagaagaacacagaccaacgcgacggcgtggcggaggaggcatcaccatggaatcgatcgatctcatctcaccaacgctacccgtcggcgatctccggccggcgagggcgacggcgcgcgcgccggcgtgatcgatcgatctccgcgtcggccatcatggatttgccccccgatgaccctccccaccctccctcggttgctacccctggggttgaaaaattgttgtcgtgcgtgcgcccatggattggatgagcgaagaagaagacgaccatgggggaatgtgccaaagcccgttgacattttgcgttcaaccgcggctgtttactgaggcggttgctgtcgattactagttttttttcttgtcaacaaggattttttttttttggggtcagtgagctgtgttgacaaatttgttggccggccaacttggttgtatatttttattggattggattgggctcttaataaaaaccctactagatcagttggcgggtatatttatattttgggcttcctccctctagtagcactgaaacaaatcgtttttaaacttgtgaagaaaatttaggagagtactcgctcaaatgactatcgttgtacatttacactgaactggaaaaagaacgcaagccatggaaggatgtgaaaaggcgagcgaaaaaaattgacaaaaatagtttatatttaaaacgaattataattagaaccgaagtagaattgccatggtgaaatagcacagttcctctaaatttagttgtgtaaaaacctgaaaaacgaaggtaggctctctttataaaggcaacgcaaaatatatctatacaagtaattccacatgagatatggcctattgatctggacataaaattcatgtgtaaaagtgaacttactttgaaactacttcctctgtttcagattataagatgtttttgactttagttaaagtcaaactactttatgtttaactaagtttgtataaaaattagtaacattttcaatccaaaacaaatttattataaaaatatattcaattattgatttgattaaactaatttaatattataaatattattatatttatctataaacttagtcaaactttaaaccgtttaactttgacccaagtcaaaacgtctcataacctgaaacggaggcagcattactcttacaaaggtgtcctcaataatatataccacagtcgtgcagtcagatctacaacagctgcaaagctctctggaagtccgggttcagattattcttacatttttttttacagctcaaaaatgaagggggaacagactttcagttcagatttcagaatgtattctatatcaactgaacatgaaggtgccaatcgcccgaggaggcaaggagaactgccacttgccacaactaagatttcagtcacaatgccttccattgggccggagagctggctagctggaatgctggatgtcaactcctcatgccagagtttcttcctgcattcaacaatcgataggcacatgaaagttagtactactgactacagtgtgattagccataatagtttgtttcaaccacttgcatatatgtcaatggctagagtaagggttagttgtgagaagaatcacagagaacgtgatagttgctatcagaaactgcaccagaatacacaatgcagtgccaccacaaactcacaaagtaaactgcatttatacaagcaaagtttttaccaagctcacggctatttgaaattttgcatgaggataaaaaaagagtactcaaacaggtcgtcttttgtcattgaagttgtagtaaagacagtaagatgaataaaactattcttgccaaaaaaaaaaaagaagaagaaaaagaagaatagaactaggaaatgcatagaaaccagagtgtaatacccaagatgatctgaatgagaagctggtttagtttggcatgaaaatttgtggccttgccccgttctagtgagaatcttttcattatcacagcgaacaataaaattctatatttctctgcaacattatccatgatgcacagaaaatgaatgtacatgtttctaacttgagtagaagacgagattttaaaaatcaatgaatcataaagtttgtcacatgcgccttgctccttccatagaaacactagacttaagattttaaaccatagaattcagaaagttttgtcatgtgcgatgttgaagaactctggtggggaatttccaacgaatccttccatagggaatgtatcatgtatgggcctggtcagtggtcacacacacacatatcttcatagatgcgcagcccaacaaacacaatgtaaccttaatccttccataaaagcattcatcaactttctaatgttaattattccctttgcgaaccagaacaaagcaacaatcaaaagcagaaaaagttttaagcgctccatgccgtgagcactactgatgagaggacaaaagcttccaagaatgctttgagcaaatctccatattcctcgtggcaactggcagccttatcatcaggcacaaccatatgcttttggaccgaaaactgaacacccagaccctgtattgctagtggaagtccagggcatctttccatcacaagtacagaatcactgttacttccaaattgtttaatactccctccgtttcgaaatgtttggcgccgttgactttttatcacatgtttgactgcttgtcttattcaaaaaatttaagtaattattaattcttttcctatcatttgatttattgttaaatatatttttatgtaggtatataattttacatatttcataaaagttttttaataagacgaatgatcaaacatgtgctaaaaagtcaacagtgtcaaatatttcgaaacggagggagtagtaggtagtaaaacagcaacagatcgattgtgtaatacagtataatgaggcaaatagttctagatacgggtgagtggccttccaccgtttcgcatcggacatctgtcatcgtattcgtggtgctatgccaacaatctctgatctcatagaagtatgcaacagaaacatctctaacgtaaagtatgatttcgaactttcaatcgtgcaaaagaaatctatatgctgacaaaccgtcatatgttctatacttgtccggtgcgacagagtccatcgatataaaaacaaattgtctctcatgtaaattgcggagtgtgagctgtgaatactgtggttccaaggtaagcctttctatggtagcaatttggcaattactataggatgtggattttcatccctcaagggggcatcccctcgttgtttgcatgtcatctaaatagttattaaaaaattttaaaaaaattgataacatagattaatacgaaatatatcactccacaaacatgaaagtccaaattcaacttctataagttgcaacaaaaataacaaattaaactgaaaatagttatggtatattcacaactgtatttgttatttttgttacaacttgtagaagttgaatttaaacttgcgtgtttgtagagtgatatatttcatattaatctatgttgccaatttttttcatattttttgatgactatttaggtgacatgcacgaaaaggggatatcccctcgagggatgatttcactttcccattgctatataaacataggttagtgaaatgaagatcttgaagtcttggtacacatatgatatgcccattgaatttcttaaatatatggacaaaaccaaatagaacattgcaaactatatttcaagtacttaaatgcaaattgcactactttaattgcaattattgattgtttcagttaataatttggtacttcgcaatccaacagctttgtataatcggcggttgagccatcactgaagaaacatgtcccagcaaaggcttagaggctaccacatcaagcatatcaagaaagaacacgcgatgtgttccaggtgttccagacaaacaatttgtttttaccaaattacacagtaataatccatcaaaattcagaactaaattaaccccaaataaaaaaaacagcagctaaacagaatgtttcagcgagatgatcagttcagtgtaccttctcaggaggccgtaactttctgcaggtgaagccgtcggcgacgagcttggcgaccgcgtccctgagcgcctcgtattcctcccggacgttgtacacctggtgcgagatcctcacgtaccccgtcaccggatcgccattgccgtccttgaccatctccggcggcgcatccgccgccgccgccttggagttgtagtagagcggcacctccaccttgaactgcttcctcagcatcgtcctcaggccgacggcgtcgtcctcgctcccgacgcccagcgagccgggcagccccaccatgagcatgctcccgcacatctccggcggcgtgccgaggaacgtgccccacgcggcggcgagcatcgtgcccatctcgaccaccttgtcgtggttccggcggcgtatcccctccacgccgccgtcgaagcgattgacgaagtcgacgacgtccgggaccacgagctgcgcgctgtagtcgcgcaccccgatccaggcgctctccatggggaggccgttgccgtactcgctggagacgacggggtggtggagcttggaggagacggggtcgtccttgcgcgtgtggatgaaggcgacggcggaggggcagaagaaccacttgtggaggttgctggcgtagaagtcggcgccgatgtcgcgcacgtcgacggggacctgccccacggcgtgcgccgcgtcgacgaacaccttgtcgacgccctcctcgcggcagatggcgacgagctccttgaccgggatgaggacggtgggcatggcggtgatgtggtcgatgacggcgaggcggacgcggcggcgaccgccgtccctggccaccgcgagcgccgcgcggaactcggcgacgatggcgtccggggaggagacggggaacgggaggggcacctcgacgacggtggcgcccgcgcgggccacgtacgcgtggatggagttcttgatggagcagtaggtgtagaggaacatgagcacgacgtccccgcgcgcgaagtccccctcggcgaagctccaggcgacgtgctgcatgatgatggcggcggccgtggtgacgttgtcgacgagggagacctcggaggcgtccccggcgccgacggccgcggcgaccgcggcgcgggagcgggcgagcccgggctggaggtggtggaagtagaacgcgtcgggctgcgacaggaacaggcgctgccaccgcgcccgcgccgccagcaccgacgccgggcagcagccgaaggtgccgttgttcaggcgcgccacggcgcggtcgtggtgcgcgaactcggcccggacctcggcgtccgtgatcgccgccgcgcccgcgcccgcgcggggccgcttcgccgagggcggggacgcggcgccgtcgacgtcggcgtcgacgccgttcgcggccgcgtcgccgccggactgaagcgaggccatcggaggttagaggagatgttgacttgcaagcttggagccgtcagaggtgtcgggtatgggttgggccgttgggggcgttatctttgatgggattagtatgcaattatgccgtatgtggatgaaaaatcacggttgtctgatcaataataaaccaaacaagcgaaacaaatttttgtaccgttgggcaaaatgtatctgaaaatggttccgttggagcatgaccaatatgagaggagctgttttctttttttgaaaatattttgattgactcaaagttgttgaagcaagaatcacaaaagaagaaagattttattcacttgacaccggaccattagctttctccgtagctaagattcttttggattaaggctgcgttctaaatactagtacatcaaaagagaaacacgtccgtgtcgctcggccggctctgcaaggacggcggcgggcagagctccgttcttcccccaagggcactattcagacaggggtttctaaggcgacctaaaaagaagaggtggcggcgccgtccagatctgtgctctccctagccagatccggtgaggggtagcgacgcagttttgaacagcggtggaaggtgacacagatgggaaagagggtgccgaggcagccgctcgtgcagctggatccggcaactcctacttgcgtgggtcgacgcggcagcggggaagagggtgcagagcaaaggtggctccttcagctgggtcaaggctggagggagtggtggtggagggcgctggcggtggggaagagggcgtggaggaggcgacttgtgcggctgtacctagcgtccccatagccaaatccggtcgccctcattccatcccgagggcgcacggttcgcttgtcggtggcattagagggctagcaagtgtggcgacagaggcttggggtgctggccagcggtgacgaccccgatgatgatctaggggggaagttgtgccggcatggaggagcattgctggcggagggaggctagcgaggcgcatagagtatgcggcacgaaggcccgtggctggcgagcacggcgcggaggcgacgaggccggcgcgttggatggagtggtgtggcagcgagcctaccgtggtaggagcatggcatggctagggcggtgcggcggtgaggctactgcggtgggaggacgaaggcgatggtcatgcgatcaggtggcccgttaggagacacgagcaacctggtcaaggcaacagcagcaccatgaggtaggcgttgaaggctttggtgagttcctttctaagtgtcaatcctcttgccgccacaagatggccacgttggacggggtagcgtgagggagaggtgatccattcttctctcttaccctcttcctctctaacccacccacatgtgatcttattcttatgactctttctctagtagttatggcagtaaccctatcaactatcgacattcacttccttctagtggcagagccgaacaccatgaagcctagtaggagtataagacgaggattctctattgaccgtaaaatgtttttttttggtctatgaacaataatgcttgttaactggcactccctaacttagaggtggctcttcatcacatttaaggtccattacagtttgctattgtaactacacataatactagtcattcatttttcaacccaatggctcaaatcgattgcaacactgctatttatgtttttatacaatgttttgctatattacattgccatagtatctatgcgaatcttacctcttctcccttgatcctatattcctatggcacaatagcaaccgtatgggatctaaattgctccaccaatgtctcattttctacttttatctaccatggtctcatctttctaagggctttcacagtgtaacctccacacttgaacaacatggaatatcacataagatgacgctcctttaaaacaactcattccatagtgcaaactagttttaatgggtctcactcctaaccgtattcacttttcatctccctctctctctctcctctctgccaccccacggacggaggatccgggaagcgaggcgtggattcttcttcgccacctctacagcgcacctcgtctctgctcgccattgtcagccacatccacaccggcgccccctcttcgtcggcgccgctctctatcccccttcccctacatcaagacgacccacaccgtcgacaccaccgaaaaccacttcgtgcattgctcccgtgttgactaggtgttgaggacgagctcatggtagagattggggtggtgggcctacgagctccatggcggcggtgcgaatcaagcgacatcgacggtatcaacggcacggaggggggaagatgatgagctttgcagggtgaagagggtgacgacaacgaggagctttgcggtgcggagaaggtgatgacgacgagacttgtagcgtggagaggaggaggacgacaagctctacaccggtgaggtgaatgcagtgcccccaatctggccagcgagcttcgaggccgtcgtcccctcctcattttgcctgaagtggtcttggtggccgtcccctcctcccgagcggcattgcggcttgggccaacgagctccgtggtggccttgatttgcttgccgaagtctacaaggcgccactcccatcttcttgtccttcctccttttgcctattttagaccaccccttgtgcttcactctccagaggaactcgtggttcaagcaagaatgaaaatccttggagaaccactgattccccctcctctgtcctccacggcagcagacatctaacgtggtgcatcgaatccacacaacagctagatgcacttagaatgacctaatagagcccccatcgtacattctttgccctattttagtaataaagcagccacatcacatcacctgttttagtaagagcacgtcatgtctccttgcatatttgcacaacacacctttaattttgcaaaactgcggatgggtgcatttgtttttttttttcattgtgtaaattgcatagaggtacaacggaattgctctatgcaggtaatgtggattcattaccgacgtgcctgttaacgtggaaaaaatttatcacgcttgacacctttttagataaaaatacaatcatctaagtatctaaccaagttatttcacttgaatgcttaattttgatgacattattgtcaattatatcattttttatgcactccgtactcaaagattgtactatactcaattatacccatcctccaacttcttacacatatatgcttaatttttaaatttttatcctatctacttgtaagtttatatatgcacaatagaaattttacacgtttacaagttgaacataacttttgctgctatttcagacatcactccgtataaaaaactagtgattcgaaaagcttacgtatcgatgtatgaattgcggaacatcggcgcagtacgagaggggctaaaattgttcctagtggatatattatggcaagtggaaagtaattaaacaggaagctgtcgatgaagacgagcataaacttcaaattagttgctttagtgacgtaggagatggcgattagtgcgcacagccgtgctcccaacaaataacaatgattaagttttgattaggacaacaattcattcattgagtaatactaagaatttaggggcaattgcaaatttaccaccgatttttttaatattgcaaggatgccactcgaatgacaggtctaatggcatttttgcaattttctagtggcagttttgcaataacgattcaaagtagtggtaaatttgcaattgccccaagaatttaagtttgttattaggtcgagcggcagataagaagtcgtcttgtattgcaatttatttgagctgcgagtcgtggtttcatgatagtcgtgttgaactcagtttttatctgcccgctgccgtgcggacaatgagcgcccaccaatccaccgtaactgataactcttcgtcccattttaaatacagccataaatttttatatctaactttggttatccgtcttatt

SEQ ID NO: 6091 - DNA, 56094 bp, Oryza sativa
  unsure (1)..(56094): unsure at all n locations
ccctattttaaaatttaaacataggccaaaccactaatgtgtaggtctttaccttaggcgatattatgtttttgaaaagatagggcgtagtatgtattattgaatccggcgttagatctggttagtatgatatgaacttagttaacctagttagtttttcatcaagcaacaatgtcaaagtaaggtcatgttcaaaatagttcacggtgaaggcaaaccttagattggtccaatgtatgtgttgatctgtcagattttgtaatgacattaaagggcatcgataggtctattgagagatcatttaagtcaatttataattggttgaagcgaggatttagaatagacttaaaagtccacacaatgtcagtatctgtttgtagtgagtcgtgcaacggaaggttatttttgggaactcatgccgatgcatatcactgttgcttggaaacggtatctggagatggcttttgaaaggtcatggcccttggttatttttgtgtcagtgcatgaaaatgatagaaatcttgcaatggaaaccaaagatgtcgagggtccaagccatgttggggattatattgaaccatcgggggaaaatgagggaaatgacacggggtgatgcaggccatgggtgtagtggatgaggaggagagaatcagtacaatcgttgatgaaatggagagggaagattcggataacgagcaagcgaagagcgatgcatcatccgacgagaaaggtgatgtaatgcccactgattagacaaacgaggacttctcaggacttgttatctcagaggggcatcatgtaccctgggaatacaaggacaacgaggtaattcagggtgctacatatgctcataaggaggatatgaagaaggcagttgtcaaggttatggataccacatacctaataatagttgactaaatctcggcaggacccaccacataccatgtcttatacggaaacaaccttcggatataggaggagttccggataaggaaagacaactagagttctacatggaaacaacaaggactactcggattgtatccatattggtttccctagttctatttggacagggggacacctatgggtataaatacaaggccccctaggaggagaggggacatggaacaatagatcaagatacaagatcaacatacaagccaacatgcgctaagacaagatgtcggatatggacttcagaggtaagcatggctagtcccctatggtgtctacggatactgataggagagacatagcgttgtctctgatctcaccggacaaggattagaggaggaaggctaccctgttgtcgactacgtgtcagcacttcagaccgccatgtcgacaacagatagataggctaccccaaatattgtactggtgtgattatggtaaataagagcaatgaccggcttcggccaacaggagtagggttattacctgacaattcaagggcccgaacctgtataaaaatcctcatctccatcttttttactacaatctcgcatatatcctagtaccaatgatccccatactatataaataccggaatcgcgacatcaaacgtcgacagcagtgaagcattgggcagtctcattgatgagagagtttagggtggtcaagtcaaccaattatgtgtatgaagtaagttgcgtgaaagaagattgtccgtggcgggttcatgcatataagggtaaatggaaagattattggaaagttagcattgtgaccgagcaccagtgccacttacaaggggtggagaagtatcaccgcaacatcacatcagcttttgttgcaagtgagatgtacaacagtgttgtcggtaactctggctttgaaccaagagcaattattagccacattgaagacaaattcaagtacaccataacctatgccaaggcttggagagcaaaacataaggttttagagatgaggtatggcacttttgaagcatcatatgataatttgcagcgtctgttagccaccattgcctagaggaatagcaatacatactatgatgtgcatacatttccattttactgttgatcctaccaagagtgtgctgcaaagagcatttttctcattgggtgcttgcatcaacgcatttgtgcactgccggccagtattatgcatagatggaacttttttgaccgttaaacacaaaggtcagatattgacagcgattggagttgatgggaacaatcaggtgttaccaatggcttttgcatttgtagagagtgagaacactgaaagctggtactggttcttggatagagtgcgaagggaagtcgtgcatatgaggcccaatgtctgccttatacatgatcatcatgcgggcatgttgcgggctattgactacttgcagaacggttaggatgagaagggaattccagctaagtggcccgaccttcggagtcggtggtgcatgcgtcacatgggtgctaatttctataagcaattcaagaacaagctctagaatggcaggtaaaccccctaggactccccacatggcgggaacgtccagagtgtcgttgtggtgaccgttgtcaggtgataaggtccgtaagataacgaactcgaggacaaagatgcttcgtgtgtcctaacattgacgacgacgatttcgtcgtaagtatcttttttttgggtaccactaatcactactttcatgcacttacctctccttacgcaatttttcaaataggaggaggttaggaaatgtcaattcgtacaatggatcaatacggtcagagttacttccattggtcaaacgataacgcaacctgagacgaccacgcaattcatttaggcatggatggagtacgaacatcaggtacaaattgcaagcttagactggaggaacaatccattaggtttacctaaatggtcggagcgtccaaagtgcggttgtagagatcgctgccaagtggctacctcatttgcagaacaaacaattggcaggagatattttgcctgccccaatgtagacgacaatttcgttgtacgtctaacaaattccaaatttaactagcatctgcttattattactattctatatgactaactatgtttcttagggcaatccaaggaggtgcggattcactttatggatcgacgatgtcaatccaacatatgatggccaaaagatagctgagtctgaaacataggtagagtaccagcgagagaaggaccatcaaaatgcaatacatgttgaacgacgcagaaggggtcggtagataaactcaggctcgatttgacaggaccgacaaatttgtatcttttatccatggcacttcttaactatcttgtcattataatgtttcattattatggtgtgttgttgtatgcgtcacgaattataaattaatgtgattgtatcgttccaatttccaaagtttctttgacgccacgatacgttgtatccttataatttataagtacatgcttatatttttataacttctaccttcaaatgtgtacatgattcaacatacgtgagaattatacataactgacaatttataggtaacaaaccccctcatcaccctccaatctatttgaaaaattagattattcaaattttataaaaatgtacgtactttgttcgtttcaaaacgatattttacctaattttaagtgctaaaaaatcaggtttatgtaaaatacctatttcgtaaaattttaagtgcaaaatagttaggtttatgtactgaataatttggaaccattcctccttcgatttcgaaacgatgatttacgtagtttttaaagtaacaattaaatatttcgatgtaaaaacacccttcgttgggctccaaacagcctaaacaaggtaccattcaattctaataatatttttcttgttttcacaatttttaaagtgacaatttactacattttctaaatgaacggagctaatcgccaggggctgcccttaaagttggcggcccccagcacagtacaaaatcaccctccctaagggcggcaagggggccgcctgcaaaattctaggggccctcgccgcccttttgcagacggcccccgcacagttgaaaatcacccttgccgagggcggcaagggggccgcccgcaaaattccaggagccctcgccactcttttgcaggcagccccctgaacagtgttaaaccgccatccctaagggcggcaaggggccgcctacaaaatgcaggcccctatagccagccgttaggcatgagccaacgaccgtctgccacgtcacgaaaatcaccctcccaaaaggcggcgggcaactagttttgtaaatttttgaaacacaaaattagttttgtaaatattttaataaaaaaataaaaaataaaaaaatttggcttgaaacaagcctaccactcaagaaggcccaacaagaaacttaggacgggatctttaaagcccatgggcccgctagttgggcaaaaagactattgttacccttgtaaatatccttgttataaggatggttaagtaaattcccgagtaaccaaaccctagggttgcaaaccaagggttgtaaaactataaatagactccaagagatacgtaataggacattaaattttttaagaaatcgatatatattccactttacatttccacataatagagtgtagttttcctttcaacaacgtatttgtcaatcgacaacaatatgttaaattatagtgtttattaaagttttaagttttatctaaaatagagacaaaataatttatccaaatgttatcaatgtaatcgtggatctaaatccgtggatttatagagctaataatccctatctccaaaaaaatttagattcagaattgtgcaagagtagatgtggttatgatggaaaggataagtaaatgctgatggaaagggataagtatcgataaagtgtccacgcgaacacttgtgaaacaggaaacccatgctagactcatcatatattataactattcacacatactctaaaattagatttggcctaataatattagtatattacagtgtattttaaccaacaaaatgacacaaagcaagattctattgtttaggttcagacatagtaacggtgagccgatacccacccaacagataacggtaaaaaatcgggactcaaaccctaataatttcacctaaagaaatcaggtctcctacaagacattttcctttcaatattctacctcatattcctctttgtgtctacaaaaactttctacaccttttttttttctgaagccacaattctcggtgctatcccaacataagtaagtaaataataataataataataataataataataataataataataataataataatagtggtagtagtagtaataataataatgataataataataatatgcatcttattaaaataaccatacataaatctcacttatcacataaaaatatatgtatgttgtagaaaaataaaagaagcataattgttacatatataccttgtaggtcggtttacttgatcaatagcatattatcaatctcagaaaccatttcatcgctaacctaggtatgtatttcattccatctaatttcacccactttacgtagtagaaaatttatgacacacatgttttattggaatatttacgtattctgcagcaacaacacaacctttattgttatatccttgagataattagtttaatttgcagttgataaaaaaactaaaattatcatcaagtaaagtcatgtataaaccaaagatctcttcaaaagaaatacacatacaacaagaattacggtaatattgcaagatgtaaggacaagttccaaattttcaaattagtttcgtatatatggatgggaatacgcttctgttgccttaaccactcaatcatctactaaaacacaagcataaatgacaatgatttataaagttgaaatagtgaaagtgattggatacattacttatttattctaattgttagagataaaacacatgcataaaagaacacgatctatccatactgcaatagcattattggaatagcatactgcaatagcataggtgacaaagggacgtcttggtgatgtgttatcctggagtgtatcatgcattattggatgccgctgctatctaaacgtaaaaaagaaatgactttaacccatttaaccatctttgttcactcggagattaaggttttcttattccttaaacacgagaaagaaacaataaatgattaaatatgtaaattgtttaaaataaggatggaaagacttttgaaataaaaataaatacaaatgtaacaatatcttatttgatatataatagtactacctaatctttaaacttgaatttattagcctttgcatacttataagaatgcaatgcagcacgattttgtattggccaccagttaaactcttaagataagttattagatatataatttgactatcccatcactataggagaaactgtttgttgttgccagcgagacgatttatccttatttgcaatacagtgtttagtgtaagaagaagaaaatttttagacagattgagagagggaggcatagaacatcactatgggagaaactgtttgttgccagcgagaagatttatccttatttgaagtacagagtttagtgtaagaagaagaaaatttttagacagattgagagagggaggtatagatacatgcaaggcaacattattaaaataaagatgataagcagcagtaacaatttcattggcattgacatgaaaaaactaatcaagataggtctgatacaagggcatgtcatcaaatgaatccgcatagtgctcaaaaggaatgagcctgtcccatcctcacatattctccaacgcaattaacataaataaattaaataaagaaagaaaaaaccctcaactggatcatggatagacggattcgagctttaatccataaataaataaaaaaattgaaaaaaaattaccaactgggaatttgatgatggtaagtgacggaggagatttgcatgtccacattttgttaaatccaagaaagcaatttctccaactcgaaatcagtgaacttaacatcaaggtaaggattcccaaatgtagcctggtgttgtcgaattactgctgctcatcctctataacgctgccgtaactgctttgggccttcatctctctatctctatacgtcgaatcactgctgttcatcctccatgacgtcgccgccactgctttggccttcatctctcaatctctatacgacgccatgatgtctcagggtgggatttattttgtgatcgcggcagagatttggagggagccgatgactcgttggaagcaagttactcatgtatgtggcatatgccctgactccgactagaaaacagatatgagatcatctccaccacaaatcaagggaactttatgggaacaactccctctgtccaaaatataggtccatttatttcataccaaaacatgccctgccattttattggcaaagtgaataatatatgtgttagtttggattaaggcttaatatttgcccataaccacctatctgctcatattttagaagtttatataccatatgagtaaattttataaaactacatatactttgcatgatctatcacaaaactacagatttaagaacttgtttcacaaaactttcttaaatctgtaattttgtgatagatcgtgcaaagtaccggtagttttgtgataaacggacatactaaatctgtagttttgctaaacaagctcttaaaatgtagttttgtgataaattgtgcgaaatgcctggagttttatgaaatttactcctaccatatcaatcatcaatatttctcaaataaactgcaagatgatttggtccaaatgatactccagtacaaataaaaagaaaaggagatccatggacttccaaagaactctctatcggaaagatgagaagaagaaacgaagttgtaaaatatgaacataaacgaactgatttgtagattgggataaaaaaaatagaaaaagaaaccgacaaactgaccagttgcaagtgcgtcgaaattgagcacatgcatgcaatgcacgcggtgactaacagctaggggtggaaaaaaagctcgggctcgtgagctcagctcaggcttggctcgagcttggttggcttggctcagctcgtaagccaaacgagccaagcccaagcctccttttcagctcgttggtgaaacgagacgagcccgagctggagcctaggccatcatatgtttatatcgattatttattttttatggagttattatttgtcaacttgaaatttttcattaagattttgaagaattgaatatataaacttgtcagggttacggataaggtataccctctatccttagatgtacgttgtatactgatacggtatacccgcgcgtatgcggatagtttccgtatacattaaggaaatctatcatgtgatagggatggtatttacggatggaaggagttctactcggacaagactgggtctttaccatattgtgaggggtccgatatctccgagtcctacttggagatcaactgacccgtggtataaaagggaccccctgggcaggacctaaggcattgaatctcaccgccaacacacccaccacagcctatggaaccggagcgcgcaagagccaagtcgccgggagatctagtcagatcaactcgactacggtctcgttggtatcatcaagttctgctattccctttgtaatctgtggtttccatcatataatctcataccaactggattaggactattacctaccaagggacctgaaccagtataatccttgtcttttgtttgcttgatgtcgtactacgtagatcctcgtaccaacggaccccaataccccctatatccggtctacgggtatccccctgtcgacaaaacttatttaaattttacaagttgatgatttgttcttgctttttttaataattataaaatatatatgaagaggtgtttcaacaggaaggcttgcaagccagctcgagctggctcgagccgagccgagctcaagttttagcttgtttccctaattgagccgagccaagccaagcctagtttgttgtgagcctggctcggctcagctcgtttccacccctactaacagtagtagcgaccacaagcctgggctctacagattctagagagaatagggagggaggaagaggccgagcaaggctataggacgataaccggctcgagacttcgtcattgcctccgccatcatcttgacatcttcatcctcttcttctcgctatcgctgatgtcggttgccgcttctcttattcgctatatccagtactttagaatgcttttgagggatactagaccatgggatgccattggatgggactgcttaatgaatcagtcctaacctcccacctctcacattgaccgcatctcgagctcccatgccacagaagaaatgaaacaccgcatcttgctatgtatatataatcaaaattatttttcacccatcgcaatgcactggtacttttgctagtaaagtatatatataattatgtcatctaactattttacactttatatgttatctatactatttatcatatagaattcctgcaacaacacacaaggtttcatctacttaagagcatccccagcagctactctatcacgtacgccatcccgaaaatagcggatgagggaagaaaaacgggctccagcaaacacgccatcacatcctctaattttcgcgcatccgccattccggagagaggaatgccaaatttggcgattctctctcctcacgccaaatcacaacctctgcatctgggtcgagctcccgcccccatctggaattcacagcggcagcagaggatgagaaacagggaggatcaggggcatctccggctagattggctatcggagaaggaagaagggaggtagagaggtggcaccaaccagatctgggctggggaggttattggagaagaagcaccgccgcctcccgcaacccgcgccgccgctcctccgcccggcgactgtcagcaaccccgccgccgtgccgccgctcctccgcccgcgccgctcctctgctcgccacctcgccgccgtgtcgccactccatcgcccggcgcctaaccgcgcccgccagccatcacgactgactgcgctacgtcagtcgtcgcccgcgttgacggacagagaagaagagagaaaaaagaaggtttgagaagggtagagaagaatggagaaaaggctgaaaaatagtgcttcaaatataatataaatgtatggtagttaaaaaatattactaaaatataggaatgtgtgatatggagaatgtaatatggatgatccattggagtgggaagggatataaaggagaaattttttttggatggccatccatataggcatctagaggattaaatttggatgagctgctgtgcgttattgattcatttcatttttccagccgcaaagccgaactgcaaacggctactgtttcctgacgatgggcttgtctaattgaccggcaataagatagcacaaatttaaatttaatgaaaattatccacattaagttttacatggtattacttcaaaattatccaaagaagaagaagaagaagcggtgcgggggcagtaggtccccaaattagacaagaacatgttatattgttaggtggttggctacttccagctagaaaaacaaagaaacaagcaaagaaacataatttttggagaagctcctgctgctgagcatgagctacaagtctacaaggatgcacatgcacgttgttcgttgcatacacgatttccatggtggagggagtggatgatctgggccgtgcagtgcatcgggtgcgtggtggcctgtaaccggcgggcgggtccacgtcggcgttggttggttggaatcctgtggttggtttggctgcctgccgtttcttctcgcctcgccaactttcccttgtccactttggttccttcttcttccattccattgtgttgatgagttgagttggctcatctcatcgtcgccgtccttgaattgccgcctcccatcccacgaattccgcccctcccaccctcctgagatctctctctctcccccacctccgtatttaggtaggcggcgggcgcatcacgttctattgccccctcctgcccgccgccgccgccgcacagccggcgatcgagcggaattcccattcctttccgcccggtttccggcgctgccgcccccctcttaccatcccgggggggcccagaggccaggagctgtcgccggaggtgagattaaatcatcaatcttcattctttatgctcttctttccttcttctgcgccccgcccgcaaaagaaaagatctttcctttctcccttttcttttctggaggcaaaaataaaattaacttaagctcaccctgtgggtagtagtagtaggtagatggtttgtttggatttggaattggaatttcatatgggccctttgctctttatgttcaatattatttttctataataatagattgtatttttttaatgttgggaattgaatctggagctgcctaccttctgcagccgtaagcataattagtgttcaacttgtttgcactcttacatcattgtattacctggcatctcttaggaggagtaatagtaagtaatttattcccataaatagatgcaggcaggtgtcttcacttaacatcaaagaaatttagagttttcatccagctgttctctcttcattctacaggatgccatttcttagagcacttgagtttcacttgcaaattgaggaaaacgccttgtctcttgttttgctagtagtattaaattagacgtcactgtttttagaagcagttgaaaagggttctgtttgatctttactttatcatcatgtcatgcacaagttatgcacataagacaacttcttcaaagacttctgaccctctgaatgcatgcactctaggatttcaatttttcggagccatttgatgctaatgccacaccaccactcctgctaaagctgccctcattatgaactcgctggacaatgagtagcaattgcacattgctgatttccatctcctgcggttacattcgtacacgacagcatgggaaaacttgcagctgttgttcgcaggtttgtatacttctctttttattttgaccccctacaccctcagcaccagaactaatatcatctccttgttcaactgacatgttgatatttgcagtgtacttagattaacaaatgaaagcatgaggattgttatggtaacaattattggagtgctcttgggcttcttcattggaatttcattcccatcagtcagcataacaaaggtaagtataacaatggttttgtcaacagaactgcatcatgtcaattgaccgtaagagaataacttaattatctctgtttgaattatgccagcttcactttccttctagctttgtatcatacatagaagacagaaactctgggctcacaacacaagctttgcttaatcacgcctggacttccgcccgaaatgcaagggaaaacagttctgaaccaagttcaaacactactttgaaggtactttatattacttttctgcactattagtttagctgtagagtaccatgaaccattagaattatgtatattcatttgatagttgtcacaaaatcctctgcttgagtaaatgatggtttgcaagtaatagcttgtattccttgccgctgttcatcccaaaagtataaggtccattgtaacaaagattttgctttcacagatttatgtcccaacgaaccccaagggtgcagagagactagcaccagctattgttgtgccagaaactgacttccatttgcgcaggttatggggagaaccaagtgaggtatattttcttgctcaacatactcgtatcattttattgccaaaaatatttggaattctggaatcttatctttgtttgttatttgttcttacttttatcaagcatatactccttaatcctttttcaaaggttttattttactgtgcctaatatgtcctgctattgagaaattgttgttatatattattaccatgtgtctcttcttgttcatcatgttctgattaagtaaaaactaagaaacgttaaccttatatgtcctggttttcaagtagttcaaaatagaagacctaaactctgtagctttccaagactgtgttggttggcatgctgatattatgattttgcatatgtaggacctgcccttcaaaccaaagtaccttgttactttcactgttggatatgcacagaaagaaaatatcaacagagcagtgaagaaggtaacgttgttgtaactttagtttgcttaacaactaaaatgctgccatccccagtttgtttaatttgcttttcagtctatatcccatttcattaaactcacagggtctgatcattttgttgttccgttctgcagttctctgacaattttgctattctgttgttccattatgatggtcgggtgagtgagtgggacgagtttgagtggtcgaaacgagccatccatataagtgccaggaaacaaactaagtggtctgctactttgctctgatgctattgtcattctctcaggtgctcaattttgaaggatatcttctaaagatttatttatgcacatacatgtaggtggtatgccaaaagattcctgcatcctgatattgtggcagcttatgagtacatattcatctgggatgaggaccttggggtggagcatttcaatgcggaggagtacgcttttgctcttgatgtttcagttgaccacttgttgatatgccatcatgccgcactaacatatgtctgtcgatgtatatgatagatacatcaaacttgtcaagaaataccatctggagatctctcaacctggtttagagcctgatcggggattgacatggcagatgacaaaaagaagaggtgaccgcgaggtccacaagtgagtaaacatgttctgctctgcaatagacatttttcagttagcagaaacccgctattctgttaatactactacctttttggaacctagcaactcaagatgcaatcttttcttgtcatagggttacagaggagaggccgggctggtgttctgaccctcatcttccgccttgtgctgcgtatgtgattatttctctgtcctgagttttgtctacagtacatcccaatatgtatggcgtgaaagtgctatccacttgagttaggctaactaatctatattgctgttgttcagctttgttgaaataatggctccagtcttctctagagatgcatggagatgtgtatggcatatgattcaggtttgtatttcatagtaagctcaattagtatcttcgggccattcattttttttcttcatttatttgattgtgttaatttcctctgcagaatgacttggttcatggatggggccttgattttgctctcaggaaatgcgtggaggtataggttaccttttggctgttaaatttcaccggcctggtagaacttcattatgaatatgctcaccaaatgctttgtgcatttcagcctgctcacgaaaagattggggttgttgattcacagtggattgttcaccaagtggttccatctctcgggaaccaggtaaatgagacatcttcctttttatttatttttccaaccaagtgtttgcataactaaagtatgctcatttgatacgtttttgcatccaaacgattaacagggcaagtcagagaatggaagaccagcatgggaaggggtaagagtctttgaaattttccgcagacatgaacacactagaactgcgagtccccttgtttgtaaccataatgtttgttcgttcaggtgagggcgcggtgcaggaaggaatgggggatgtttcagacgagaatggcggaggcggagaaggcgtactacaagatgatgggcatcacccctccgaactccacactggtgtagatctaagctaggctgattcttcatcttcatcttcactcccatctctgcctctgtctgaatgacgaggattctgatgtgttttacctgctgtacagacagttctgatgaactgatgagtgtgtaggtaggtggtcagatagagtgtggattggatggtgatgattgtagagcatacatttacacatgagggagggagggccatcgatcatgaggagggtgttatacataccatctataaaatcgattattttgtgtttttgtggtggtaatattgtttttgagttctgattgttactgaggaatgaaaggaatgcatgcacgctttagagagagtgcaatatgatatctggagcataagaactctgagaaacaaacataaaatggtgtaaattacctggaatttgtgatatccattccaaatgaggtggtatcgggcttgtttggtttggagccaatttttgccctaccaaaatcttggtagtgccaaaacattggtaaattttgacactatcaaattgagtagtattcaatttgaactattgtgggtagaatttggtagcaaactaaacgtacatttgctactattaaagttaccaaaattttggtagggtaataaattggaaccaaaccaaataggcccattatgtcattcaaattcgacggccctatcgtacatatttgcaaacgaataataatttgtgaatgaaacttatatatatatatatatatatatatatatatatatatatatatatatatatatgtgtgtgtgtgttcttagcgatctaaaaacaaatgctaaaaaataaacttcggtgaaaaaaccctaaaaaatcaaatttaactttaagggtggaaattgaaattttgtccgataagtataaacataagcgtaaaaaaatgaggccctaatatcagtgttgggaaatttcaaatgctatttgatccgaaacagggactattctgcaaacaatttcggatcttaatcaggggctatcctgcaaaatagattggccgcgtgcgtgtgcgtgtccaccctgatcgccgttggatctcccctcctcgccgtcactcgctgccggataaggaaccaatgcttcgcaccggcggcggagcgcgagccacggcggcggcgcagctgctctcctcctcctcctcgccgccgccgctccgcctcccccgacgcttcctctcgctgacggccaccccctacccgctctactacgacctcctcctctaccggccctcctaccccaatccgcccaaatcctccgccgccgatgaccggcacacccggcccaccgacgaccacctcgaccgcgccaagcgccggtacctccggaagcgccgcagccgccttctccccgaccccgacgccaccaccgccaagccctcctcctcctcctcgtcggagttcgtggagctgaagccggaggtggtggacttcccgcggctgcacgcgcgggaggaggcgctctacttccacgacgcgttcgcgctaccctgggagaaggacaagcactaccgcatgctctaccgcctcgagaagaagtacttcccggaccaatccctcgacaacgccttcgtccccgccgacgcctcgccgccttcctccgacgccgccgacaagggcctcgtcttcttcgacgacgacgataacaacaaggaggcggaggtgaagaagaagaaggatggcgaggatcgaggggaggtgttggagaggaaggtggaggatttcttcaggtcattgaagaaaggccctggccatggcgaggctaacgtgatgaaggcgaagaagaaggagcctccgcaggtgaggcacgaggcggatgaatggccgcagccgcatctcgcgagcaggagaacggagctgccgccgaggtggaacggcccgaccgggacagtcgtgctcatcgacaagcccaaaggtgatgcctctttatcctctcttgatgaacggtctaatgcacgtttcaagagattgcatcagaatttggttctggtgtaagaaattagaatgttaccactatttacacaattgcgagcttgtgtgcaacattgcagttattcgtgccaaattattagcaaataggtagatatagtacatcgtgtgccaacactaatgcttgccgacagcctttgtttaaaatggtgactggatggatataatacattcgtacatttgaatttgctgtatgtttacaaatatagtttatgtcatggtttcatgatgagaatcttaccttgagaactagagttgttgattttatgtatgttagggtggacatttttgagctgacaattcatttatctgagtatgagcagtacatatgtggacttttagattagttcctactagcagccgtttttgttaatttgtgcacaacaaaggtgattagtaaatgtctaaaagagacttggggatattgctagaaacttataaccttcttgtcttccactccagtttatggagctcaacatatgcctttcttgtaaaccaggctggacttcatttactgtttgtggaaagctgcggcgattagtgaatgtgcaaaaggtaattttgggatttttatggtagaatactgtggttttagatctttgctctacagacatgtttattgaatatatgatgtcaggtcgggcatgctggtactctggatccaatggcaactggactgttgattgtttgtgtgggtaaagcaaccaaagttgttgataggtactctaatattctcagtgaaagctattttgtcagattgcctgggacaatttcctgtggcttatcttatttcaagttcttatttgtgaggatttcaagcgctgctatgttagaatttgacctgcagtaaacctcctgttctagcattcttgaaaactttcctgagtgaatgtccatatgcttttaaagatatcaaggaatggttaaaggctatagtggtgtttttcgacttggagaagctacatcaacctgggatgcagattcaccagtatgtatcttgtattctgataaaatgacctactgcatatatttctattaggaacttcaaatcgggtttacttttaacttgtatgacacgtgagaaattaatacagtaagacaacttattaagtacacaattaatacaattgtgttggtttggccaatcttgattaatagaacttgaagtgtggaagatttttattggggaacaattaagttaaatctggtttttttgctacatttaatccttgttaaactttctacatctatattgactttggttcaaattatgctttttttctgtttacatgatggttatgcctaaccatctatgtatcatcaggttatccagagagaaccatgggaacacattaaagatgaagatattagaaaggtagcagcatcattcaggggcgagatatggcaagttcctccaatgttttctgccattaaggtacactatctcctatattacactaaacctgttattgtttccttgtagataaagagaagttgttgctagaattcttctgtgggatttgctaacctcgcagtatctcctatacagttatgcttgataacacagactacaaaccatttgaattatatgccggttgcactatctcaagttctcaacatctgttgctgtactgtgaatttgtgattgctgttgttattcaacttgttaatggcataggtgcagtcaggtttgactgtccctggttggccatttgtacattagttattatcttatgcaaaatgcagaatttgttaatagttatactttaggtctcacaagaagatgctgcgtagtagttggtagaatggtagttaactgtgtagcttaaagaatacatagtgtctttaatcgttatcaatctattgggaggaaaaaaaaatcctccaacttgtgttgatcaaccacagaactgcaattaactaaatagatatcaggttggtggtgaaaaaatgtatgacaaagcaaggaggggtgaaacagtagagctttcaccaaggcgaatatcaatacaccagtttgatattgagcgcagtttagaagacaggtattcttcctagtttcccccttttttacctttgacttccttgagcacagatctacatacgcttggttcatactgttcgagactccacctgacatgatttttgtttgtgtatttccagacaaaatctgatatttcgagttatttgctcaaaaggaacatatattcgatccctctgtgcagatttggggaaagcgctcggaaggtctgcttattattcggatattcgtgtacacagcctttgttttcattgtttttttttttttggtctttctgcttcaggcggttctgcattgaatgagttgatctatgcatagtagttcaattgtttaaaagtgcagaataacccatctcctttttaggtttctaagattgtgatatcatcatattaggctagaaaatcactttatccactctgaagataatagaatttcatttgctacaagtatttgcatgacattgaaccaggggaagatattttgaatttatctattgcattgtggtcggctagtttctggtgttggttccatcatgatctaataaccaaatgccgccttcttttcttatttttagggcatgtagttaaagatccacttatctttcagttgacgtccgagacttgtcctttctttccatttgagttgctgttgttggacgtttccaactttacatctcctttacatcgtggtgactaaatcagatatccatgtttgcctgcagctgtgctcatttaactgccttgcggagagactcaattggtaagttttcgtcttgtgaattttgactggttatgcatgatgatcaattaattttactgtaatttgaacgtctcgttcctcaacagtgaattgtatatcaaaattattcatacatatttttaagggacataagttcctttggtccagatcagccatcatattttagttttacttcgcaggcgacttttcagtcaatgatgcttggagttttgctgagctggaggaacaaatcacaaagggatatttatgattactcaccatgccatttggcaaaattgcagccatcgttgggttcagtttgagtttcagcgcttagcgaacaattgctttcttccaatcttccctggtaggcaattggtcgttgagtactgagaagctattaaccaacagtaacgctcaacccagagatcagcacttaatctgacgtttcagaccttgggggaaaggaattcattctggtgtccctggacactacggatgtagcagctttatatattgcaatgatgcatacctgatgtagcatgcatcctaaattttgatgtggaacattgtcaacattacgatgaaatagaatgtggttatacttgattatgaatttatgatgaaatagaatgtagtagtagcatctcttctttgtcgagccagttccagcgtcgtgtatattttttatgcgccaaaatgtttattactggtaaaggtgatgtccaacaaaggtataacttggttgtctctcatcataataactaaggttaaattgataggattacgattgatgattatatagatatccaaacattgtaggtatacatgtgccgaaggtcagcataaattaaatggcacatcattctgcacttgtcccaaatcctgaaaagcctacccaaactgccgaaatgaaccctagagaaacagtcttctaataagcaattgttgtcatcagcatctgcttcacgaactcgattctctgcaacctctcctcaagctcctcctttgatgcatcatccatcacaccctgctctctcctgcaagcatcaaagattgcatttggatcagtcagcattgttcagattcagcacaattgttaccaaatttcaggctgctccaacagcaccaactgcacaattcttaccttttttgatcatctgaggaagatgaaccatggccctcggcatcggcttcgctgcggcgcggcgaatcgaccggaggagcgaggctgcagcagatgaactgggagagaagagggtcaggagaggaatcaggagccggcctgcccatgcagtgtgagggtgcttcaaagtaggagtcctcttcatatgatcccttgtcagctgctgctgagcttggcttgcaagaaaaagaagaagacttcctcctctgtggatcatgatcaaaataccaaatggcaatgagctactaccagtagtagatttaatctacaggagctccaatgtggtttgcaaattgcaatgcctgatcatggcactagtagcagtgaaatcactgtgaaagcaatgagaaattgagtactctaccttgagtagatgtgagtgctgaaccctgaaatgttcatcagtgtccttgtcaaggttgtcggcgcagattggacacacctggaggaaagtcattcgatcagatcatcatcatagaggaactgatcccaacagtatcaccaatctgagaagaatcacaatctacagtaaatctttggagaatattttgcttagtgaactgttcaccaatcaccattagactgaacagaggtgaggactatttacaagttcacaactacagtgaacaacttgtgtgtagtttactactcctactacactgtgcagtctcatcaatggattatggtacagactggcacaaggttaaagtttttccttgtgaatttttactgaagttaacactgaagcttgattcatcaaaattcagagatgcatcgacaggcacatgagaatgcatttgcagcaagaagagaagaaaaggaatagatagcaggtgcggtgcgttcttcttacagcatttttcatgtcaaagcaatgctcctcctggagatggtcacaaaggaaatgaacctccacctcaatgtagcagaaggggcaagggatgtactcccaccactcatcatctcctgaaaaaaaaaaggagaaaacttttaaccggtaaattcacaattgcagttctttctcccacacctgcaatttcagagtacatctgaaacaaacaaaagaaaaggggggcaatatgtttttttaggaaaaaaaaatgaagctcacaatgcatataaattccaagcaacagtgaaggttccttttctgaactttttgtgtgacattgtgttggttatttgacaatggtagtaagttcacactaaacaccaacaatacctctctcacacacactctcatgtgatccgcactgcgaacctttcgatttacattcacaaaagagattaaaccggtaaacaccacatgaaaatgcatataatgatcctgaattaattctccttttctctgaaaggaatcctgaattagttccaatggaacagatgtcaaacaccaggagaaattctcgccacaaaaacctcccaaaaattgctgattcttttgatgataagagatcaaacatatgcaagacaggaggccattgtcaagaaatcagtaaacatggaaaaaaaaagaggaaacacagacaagagaaaacactccgagaactgaactgaactgaatacccaaccataagaaccactcgaggagctcaaaggatccaccaagaaccaaaatttccttggcacagcacaaaacaaagatcacctaacaagacatacaggcaggccaaagaacattcaacaaccaaccaagaagagatcaaagtgaccaacatgtagatacctgaaagttgatagtggggatggccataaaggtgctgcctccctgctgctggtggtaggaagccatggtgagcctccacttccatctctctcccctctcaccactcactattcactagtactactcctctcttcagtcttcactatcctcctcttgtttacctccacaacaacaacacatgcaaagagaggagttggaaaagcctttgttgctcctggctcttcctgtgtatttatatgtggctgtcaggacttcaagaagcctagcccttttagctgcaggaatatttcagtgtgcatctcaaaaggcaaagtggaaataaaaggctggtaaaaaggcaaaataatgagatattactttctacttttcctcagaaattattaaacaagacacaccagacaccactgcacattctcatgagccaacatcacatggaagctgtcttaaatatatgtagagaaatatctccatgtgttaatgaaagtaatataatagtgtaatgcagtaatcatctgcatttgccagcaatttgaagagtcagctagaaattagtactacgtattaagataggttactctcatgcatcttgctcttatccagagtgtccaactttagattacacaaacatgtggggtcaatatagaggcttaatttacttccgtcttattttaaatgcagttatggatttccgtgttcaatattcaccgtcagccttatttaatttttttaaaaaaaaagtcacacataaagcattattcatgttttatcatctaaataaaaaaaatactaatcatagaaatctttcaaataagacggatgactaaatgttagacataaacggtgcaaaactacggtgtttctggacggagttagtactttggattacacaaacatgctgaagcctgatcaaggcactttcatcttttgtcagctatcactaacaaaacacactgcattgtacggaactccatcagaaaacaagaaaaaatggtgtagagatcattgggggcatgtggcatgtagataaactaacattgcaacttgtgctgctaattagtgaaaggaaaaaaggaacagtcaagctagcagagggtcgttgctgattagcctagtgttctttgtgaccagtcttgctcgtgtcttactttaaatgtttcatttttctccttttatggttgccttttatcgcgtttagataaacctttttggaaacttggaagccaagtctaatggaaaagcatcagcaggaggaaagctaaaacagaacacttttatgtatgtccctttcactaatttacacatacatttttcttctactcccttcatctcttttttgtttgatgttgaattaatcaatgtcatacattttattattgaaaaaaatgccatacatttggaaacagagaggtagtatatgccaattgtcacacagagctctgcatttgtaagtaaatactcctttatagggggatgaattttctgttaattaatgtaataaacaatcacaaaatcctggaatgttgagaacttcagtataggaggattgtttcccattgcaacactcgtcgctcgagacggtttccggtgaacccggaaggccggaaaaagaagttgcagactcgcagttactctttctttctgtatcaaaataaaccaatttcatatgagatgtaacacctcagttcatatcagattcatcgtacgagtttggtttatttttgacggagggagtgcactgaacaccaccaccaccaccccgttctccgtgaagtgtgtgacagtatctttggtggtcagcacagcacagcacagcacggcagcagctagcctggggcaggactgcagcagcaatgaaagctgaaaggcgtcttgtggagttgtggaagccatctcaccattgccattgccatcgccattcctctctctctctctctctctggcctctcttgccacacaccttacatcctcaaaaagcagacagatagagacagccattgtcagggttctctgattctctcactcactctctctctctctctctctctgtgaatatgtgtgtgtgtgtgtccactcagcagtcactccctcaatggcagtgaggttgtgatgtgcgtgtgcccagctttgtgtgttggagtagtagagtcttgcagtgttgtgttgcaccgcaatattatggtggtgtttgtttctagcaccaaatatgaagatggaagtttccattatctaaagagaaataaagacggaaattacgtaaacaagaaagctattaatacacatgattagttaagttttaattattatatctgtattttatagcgacttctatatagaaagttttttatgaaacatattgtttagtagcttaaagacatgctaacggaaactaatgtaaaatctgcgtttaattaagaaaaaacattactatgtgaagacctttcgactggagcttaacttggagttagaggccacctttttctctctgtcctggggtttaggggaaaaagagattaaggaaaacaactagagtaaaaaatcatgttttttttctctcatcgtcctttcttgaaggcagatccatctgcttgcttgtctttttccatgttggcttgtgcatgccattgctgaatgctgatcagcctcagctgtgcagtgctgtgctgagctgattgattccctgcagtgctggcctgtcatgctcatgccctctaggattgttgttactggtaggaagagtaccttggtactagttgtactagcaaagagttggcaagatatttccaactttctcagacacgtttcgaccggtggctcttctagttctacacccttaattaatctgcgtcctgatgatcaccttgcaattggccatcaaactgtcgcagataattatagtacttactttgtactgacaaggattaaacttttgtccttagagaattctgccacacatgcatgcttatgaccaaggtctgactcatttcatctctaataatgcaactggggaacaaaaatccatccaagttctgcaagattatgagaacacctcaactgggtagcaggacagtatcatttagaacattaatcaagttataatccaaacaatactctgaatcttgatattaaaaaagcaggtaaacacaaagcaccaaacatttctgaagatccagcacgtttgatttgttaccacttccaaccatagcaatttttttggcatttcggtaatgccaaatgttgctagggttgattttggcaagaaatgaaacatgcccaaagagcacatcataatgtaaaggtaccattaacataggatccaaaaaaaagacgggaaaggaggtatttgttcatgttacatacaaagagtcacacagaaccaaagggttcagaaatgaggaagggggagggtgactccgcacaatttctactactcatcgtttagtcatttatatcacattatcaacacagcagtagcataacaattacataagcatacaaattaaaacagttgctgctgtgatatactctggtagcacatacgattgtattgacacacattgattatgaaacaaacaatgtggtggtacagtacacttcaggcggagccaggtctagcagaagagactaacaaataccaggcaaaccctgacctcgcagttatcaatttattggctgagtagtttggaatcacaggccacaatcttcaccttgccaacttgttctgtagtctcctcgttcttgaatgatgcttcagtcaagatgaatgtccatacattgtcacagaacctgtaagtgtgcaggtggccctgagaaaagaacatgcatcagtaaacagcccagctacaaaatatctgaaatacaggctcaaaaagttagtcaatcatccatcgtatctaagctgtaccagagaacttattcttaaataaacaaaaaaaatccatcaaatacaggtctgttcgacattgcgtccaaaatgacaagaggcttaaactcatgtaactagaatggaaaatttctggagcaggatagcaagttagaaaaataaagagtaaatttcacaaaactacatgtattttgcacaatttatcacaaaactacagatttaagagcttgtttcacaaaactacagatttagtatgcccgtttatcacaaaactacaggtactttgtacaatctatcacaaaactacagatttaagaacttgtttcacaaaactatagaattagtgtattcgtttatcataggactacacatttagtgtcttcatttatcacaaaactacaaatttagtgtctccattatcacaaaactacaggttttgacaatgctaaaacctgtagttttgtgataatgaagacactaaacctgtagttttatgataaatgaagatattaaatctgtagttttgtgaaacaagttcttaaatctgtagttttgtgatatattgtgtaaaatacctgtagttttgtgataaacgaagacattaaatttgtagttttgtgaaataagttcttaaatctatagttttgtgatagatcatgcaaagtatatgtagttttatgaaatttactcaaaaataaataaaacagagattaattcaaactccagttcatgatttttaaaatggtaaaatttccattagcaaaactctagttcatgattctaaaatagtaagtccagtttatgactgataaaaccatgtacatttcttagctaatggttaatggaatgccagttctcctgcattttcgtcaaaaataaaacagaacacgtaacatctcaacaccacatatcataaatgacatattgtagaggtgatcccttcctaatacagcaattcagtgtgggattaacaattctttggaaaagaaaaagagaactgcggtttgtcaaaagagggatttcttaaacccacacagtgacagttgtaaaagagtggccggatatatgaatttatcaattatcgcatgtcttcatacactggacattatcaggtaaaacaccaaaacaaatgaactggtaactatgcttcaaccattttcaggctaaacatacaaaatggctatgcaaacattacattttacaagtaaaaatgaaaatcagaacatgcaatctcctttgtgaatgtatgtcttagacagctgaataggtcccagctgatgggagattggtcgagagtgctcagagttgaaaattgaaaattgatggccatggttggatcatgaggattaagtgtactgctaaattggaaaggccgaaacaacttaaggaacaactaagaaggggcaagcagcagattcacgagagttcagatgccgacaaaacgtcatctgcaattttgtaatatcataaatgctttaactgaagatttttccataagccaaaactagaaatggatgataaaggtgtgccgtatttagaagctataagatagcgtttacctccttttgttatgggcatggaccaggcccatgcagcagtttaggcattataaattaggaattactcatataaaggtaggagattatctagttaggaaagagatgaggtctattagaaagttagagatagagattgcactggtttctatggtactagatattagttccttggatatcaagcctgtcctccctatatataaaggggtcccacgtactgcattatcaatcaatcaatcaatgaatctctaaagctagccctaggcctcagagcctcttagctcagcaggaagaagccctgcctctgctattagagggcgagtgccctatcccccagtctttgcacccttaccctagccaatccataacatttggtatcagagccaactgatgctccaccctcgatggcgtgcagcggggatttcaattggatgtggagatttcgccaccttgaacctctcccaacgttcaatggtgaggatgatccgcaaatttggttggagagtattgagcagttctttgttgagcagcgaatttatggaggaagagaagtggtggattgcatcaagccaccggaccaggtttgccgcaatgtggtatgagttgattgagcgagcctacggaattcaaacttggccagaactcaagaaaaatatcaaacttcgctttgatgatttgccgactgctaccattgaagttctttccaagaagatatctgctagtgctcgaagactatctgtccgcgaggggtgtagtgttatgggcatggaccaggcccatgcagcagtttaggcatcataaattacgaattactcatatataggtaggagattatctaattaggaaagagatgaggtttattagaaagttagagatagagattggactggtttctgtagtactagagattagttccttggatgtcaagcctgtcctccctatatataaagtgaccccatgtactcttatcaatcaatcaatgaatctctaaagttagccctaagcctcatagcctcttttagctcagcagggagaagccctgcctctgctattagagggcgagtgctatatcccccggtcttcggacccttgccctagccaatccataacacctttctagtctccggtagcaatagagatcaattcttgcaaaactatatctaggatagcgttttacatacttatcacatgggtgcatgcatgcaccatagcccagcaggttgtcatggacagatctgttcatcatccaggtggatagctgctatcaggtagtcgaatctacaagacaaacatgatctttccagctataactaattcttaaatgctatagatttagcccaactcttttagcatggagcaaagctcaccgataacaactacatagctacagtaatataatgctcttgatgcacctttcgtgaaaatgagtcatatacaaatgcatcaatagaataacaagaacagtgctgaactatctagtgactaatgggacaagaataaacacgacaaaacgattcacccgaacttggtgagctgcctgttgcgtctacgaatggcccagaggactgattgatactacaagcacagttagaggagcagagcactgaactatgacaagaatggagaacagggaagtgtgattatcgtacgaacccagcgatgagccctagattgcttgtgatcagaagggaaattgagatgttgagtggtcaagtcgcttcttggcacaaaaaaaaaaggtttctagcagagtaccgtcttatgtttggtacggtttctagcatcattactggtttgttattgagctccaacgctgtttgcggcttgtttctcttgcacaatattgcagataaagaagttctaataaacatgtacacaccagggtcacttagttactttatttcttgttttggtttatggggaaaaatcagtgttttaatatgggcaatattgcaatgtgtgagtttttttttctcgaaaccacaggaggactgcgattcatttcattaagaagagaaattgtacaaccgagtgacccaaaggacccctacagaaacacaaaaaaacatcacggaacgcgacgtgcaaccgaaacaccccctaggagaaactagccgtccagggggagcaacccacacagaatttcgaggagtgcctttgctccagcagtacaccaaagagaactctctctagccactgcatgcaaaacagccgagattctcggggaggcaccattgaagacacaatcattgcgatgcttccatatttcccatgccactaggataatcaaagagttcagccctttctttacctctttaggagtatccttaactgttttgaaccaccagctagacaagcgattcattgatggttgcagtgctgcagcgcccatccaaccatttggaagattaaaaaccatacttgccaggaaaaaacacaagtcaccaaaatatgctgtatagtctcctcctgatcgcatagaggacacacatccgggtgtggcattcctaactcgcacatggttgcgatgtggtagttagggtctgaggctattgtaatgtgcgagttgcctatattttgcatacttttgacttccatttataaaaaaggggcaaggggccaggagtaaagcggattacagtaagatacgtaaacaagtcacccattgttgggcaaaaatatcagtccatttctgtgattacccccaattcacaaacaaaaaagaatctctatcatgccatagaataacaaactacatgggtatcagaaagaatgacactaatctttattcataatttcattttggtgaggattatgctggcaagaaaagatcttgacatttctcaggcttgtttatccaataaaaggtttttctttcttttctttttttttggggccaaacacagatgagcagcttggaatctgagcaactcaaggagtacttgatgtgttgcaaaataagataagtggaaatatgcttgtacagccgaaaaaataaaagcatatatgtgataagtgcaagatttgtctggttatgcccgtgtattatgttgctgataggtcttaattctgttactcgcttactcattactataaagtttgtgcaatatccctcagaactcagagcagcgtacacaggacaggtacgtgtcgaacgtgaatggattcctttatgaataataataataatataatatatgcaagaaacaaattttagacttgattcctttagcaaggtgtgtacggaaaagaaaatcgaatggcaacgctgaatccacaaccaagtgtatcaattctagcactggagaaattacatcacaagcgcatatgagttctcaagcataaataatgagtaggctcgaaacagatagagattaaagttatgcacagcacaagtaaggcttggttttttttgggggggtaggaacagcaacatggcaactccgtgataagagcagataccttgatagaaaccttgctcttgacttggttctccaaggcttccgtcatagactaatcacatagatgataacaaacaaaatgaggagtcgaatttttcaatagtatagatagtaataggtggaaggagatatggtaaagtagataccttatcaaactggacaagaacttgaatggcgagctccgggctgagggtgccgctggagaccatctcgtcgagcgtctcagtgaggcacatgccaatggtggacctccggtagagctcgaaggtggccatgggcgatgcgtgcgcctaaactttttggggtggggggaacaaacaacaaaactgttgttacttgtagtattaagagaggttaaggctctgaaattaagagcttcttccagatctagaagagaagagaagagaagctagggttaacgaacgaacgcgagcaaattccagacaaaagtagagagtcccggtgggagagagagagatgaattcagagaaagaaagaaagaaagaaagaggatggtcacctgcaggatcccctcccctgctctgctctgctcttcttgcccgatggagatcgcgagtcggcttgttggcgcaaggagaggaggagcggaggagacgacgagacgccagatttctctttattttacgccaaagagaaccattactcgagttattttacagggaatatttgccactcttggaaatgctgctatccgcccaaaaccaattttggaaaatttcaggaaacgaattcagattttctttttctcggaatcggaaatatttagtatttataattgcaattatagataaatatagctctttttctccaagaaaataaattatacacctagttatattattattaattgataaaaattataaatatcgatttattgtttcagagagatattgagctatatctcttcatggattttagaagttcagcttaaggggcttttatattccgataaatatctgttaccgtattcgctccattttcgtattcgataatatttgattccatttttgtatccgtggttttcgatttcgaacaaaatatggaaatggaaacgataaaagagtttttcgtctttttccaaagcgttttcatccctactcgagtactccacctttatctcaatttttttactactttaaaactagctatttctttatgattattgatggacaaatatattgatagtactcagagaaaaaaaatgcaacaaacaaggttggggattgtatcaacggcaaactccttagaccaccaataaccactagttgccgctccacacacaccgccaccaccgctcttttttccattagctaccaccattgttcctcctctccgcctttacatgcatagccacaccctctagtcatcgagatgtcttttcccctcccccgtcatcatgcacactattgttatggtcaccgttgaggttaggggctgtcgggtttgcagggacttggagtggcaggagctggcccgacaaagagcagggaagctagatcggactcctccttgctggatctgacgattccctagctttcaaaaggaaaaaggaaaaggcagaaagagttagtgcgtggaatggttgtagagtcaccggccttgaagatggatagaatggggtagtccaaaatgaaatgtaaagttagatgttgtgtatatgaaaaaaatggttaaacgatgatataatatgaacactttcaagaatatatagtacaaactgcaatttatcttttttttttctctagcacaattaaatatgagttgtccattacccgatagtctcgcgatatgctaagcacactacagtttatcatctgtgcacatccatggagaccttgacatccaggggggacgaagtatacgcgggcatagcgacgactagggaaatactctgtgaaaacgagctaagtgttgaaaactcgtgaaatcatacctaaaagtttagtaaattcatgaaacatttgctagagatatgtgtagatttgaagtacattctcaccaaatgtcaagtccaaactcagcttcatttgagagtaataaaaatgacaaatttcaagtggattttcattcccaaataaagttgagtttatttgtcttttttaccattcacctgaaaatagttactattcacctaaaaaatatttatttttactctcgaataaagctaagtttgaacataagattcggtgagaatgtaatttttttcatgatttttcacgagttttcaatacttaactcgttttcacggcatatgtcctcaaaatttagaatcaacaattaacaacttgttactgctacgggttatcttttggtaccaatataattaggtgtactactttatgtttgatgtactattccgctgcacgtcgtcatgttgacactttcactacagtagatagataatcatatcttcttcctcttctttttttttaaaaaaaaatcattttccttcttaaacaacacagcatgaactgcaggctgtagatgcgtgccgccctgtgcttgatgatatggttgcgtgttcgtatatgtgttacgtgtaattaaggttgcaaaatataaactaaatagagatatagccgaccgacaaggtgtatatacacttgaataattagatggtcactgcaggcaagcaattagatcgcagaggcacatcaggggaggtattaggcaactaaccatgttcaaggattgtagttggaagctccagtaccagccatcgctattgtcatttttgtcatacaataagcacttccaattatgaagcattaattagcggtcagcagtttaagccatcgatttaatatgaattctgcagggttttatagaattctgtgaaattctaatcagaaaggaattgagtgttttcaaggaaaacatacgcctgtaatttgcaggctcatgcatgaaatccaacatacggattttatcaggtgatgagaatttggagaaagataaagctggataaacgaagagggtgattaagaaacgacagacagctaagcattcttttgtttcttcttcagaaaacagatgggcattgtcacactacagtagctgtatgtagcagtctaatttgatacaatgaatgggtagcggtgcaatgttcagctaaaatttgagattaaattcaaccttatttttagcgaggaaattcaaattaaaagaaaaaaaaactaaacctttagatgtcatcttataactcaagaaaacttacaactcaatttgtcaagcattcaactcagatgttccagttctcatttaaaaatagcgtatcccacgattcaagttttttttaacaaatccaaagcgttatagtcgagataggaagctttcacttttgatggaaaaaaaatccaattcggcagttacaaatcggttaattacttatttagtggtaatttcgaacttctattgttttaatttttaagaaatgagaaaacagctagtagcagctatcgagaacttgttttatttcttcttcagaaaacggatgggcattgtcagactacagtataggatggggaaatctaatcccttgtttttcagatgatgggtcctccctggagtgtgggaaagggttgcagtacaaattttaggttaaattcaactatttaaaaaataaaccttgtgatgtcagcttatatctcaaaacagaacttatgactctatcaaatttgtcaaacactcaactcaagagatgagctttcatcgaaaatatagtaccatatgcctcgatttcttacaatgtccaatgcgttatagtcgagacaggaaaataaaacaacttaccattcgacagctacagatgggttaatcaatttgtttcctggtaatttcgcaaataaccgccttatcttctagaaatgcaaagagtttgtcgcggggagaaaagggttggggggcctttcttcctgggttcagttcagtagacttgccgtttaagttcttcagacttgacnnnnnnnnnnnnnnnnnnnnngcagaagctttaataatgcttggagccagcaacagcaaagaaagggaaatccatccattaaaaatgacattgcaaccaaccaaaaccaacaatggactacttccatccagaccctctcaagattcttgtactccctccatttcaaaatgtttgacaccgttgactttttaggacatgtttgaccgttcatcttattaaaaaattttgtgaaatatgtaaaactgtatgtgtacatgaaagtatatttaacaatggatcaaatgatataaaaagaataaataattacttaaattttttgaataggacgaatggtcaaacacgtgctaaaaagtcaatggtgtcaaacattttgaaacggagagagtactgcatcattttcaggagttgtattgtaattctgacaattagaggatagttgtagatttattataataaggttgattagttctctgtagaatataccatttgcagaaatggtctcgaacgactgcaggagccaataggaacttaacaaagaaaattaagaatgaaaataagattcttttttttttgagagagaagttgctagtacaacaatctgcagatttgagaaaaaggaagaaaagttttggatgggtttgcaaaatgcagagagagaagaaggaggaggaggaggaagagtttgtggcgaggaggcttccaaatcagtcgctatcatacatctccctcccttaaatctcatcaacccccccaaaatttgttactttcggagtatatttatttactagcgcgacagtgccaatttcgcggcatctactgcttctgctgctgcatgctcctcctcgtcgccggcgatctatctcgccgccctgcctccgccgagatcgacatccaggtacttacttgaaccctcctcttccctttcccggctataaagattcgtttttttttctctcgatctcctcgcacccctctcaactcgcccaaattcgccggcgtttcgtggaggtggcggcctggttggggcaaactccctccgtttaatctttccaattccaattccaattcggtggatgcagcggcgatgatgctttgcggcggcgccttgattccgcgctcgacaatctactgtttttatagataagatcttcagtgagcgagatgccatccctgcagctgctgcagttgacggagcgtggccggggactcttggcctcaaggaggtaacaaaagtgcttcgcccaaaatactttcttcttcttcttcatcatccttttgctccaacctggaattttataagaagaacaaggaaaagaaacacattcttgtttgtgtgggaacaggaaaactcttgcggttgtttctggcgcgctgcttgccggaggagctttggcgtatgcacgctcaagccaaggccaacggagaaggcgttcagagggtgacgatgccaccactgcattggccaggaatggggacaggatgggccaaaatggtgtggatggtagattggccggaacaaagcgaagaaaaggtggcctcagatctcttcatttccttgctgccatcctactgaagaagattggaccaaatggcacccgctaccttcttggcttgacgttaactgcggtaatttctgccattctatgctgctgctgctgcactcatttctctatgtacattcttttttttatagaaaaaaagaagatcatgataagttcttatcagtagttcccacgaaataatttcaagcatcgaacaatttgtagtgcatagagaaaacattctatgatatgtaatagtacctaacactggattttcaaaagctatacataaccttattaactaaacaataatataaaatattattgtcagcattataacaatttcttttgcaggtgttacgtactgctgtgggacatagattagcaagagtccaaggctatttgtttagggcagcatttcttcggcgtgttccaacctttacacgcctaatcatcgaaaacctaatcttatgctttcttcaatccgccgtataccagacctcaaaatacttaacagggtctttgagtctgcgcttcaagaaaattttgacagatcttgtccatgctgattattttcaggtacattttggatcaatgttgattttttattggttgaattatttgttacttcccattgcacacatacctcacttgcattcatcccctgtaatatcctaagagtaccttcctagcttctgtctatcaatggaattattccagctggtatgcctgggaggactgtgtcgtacattgttataatggttgaagaactaaactagtgaccactgcagccaagataatagctgataaaactagagtttttcatgcaaagcatagctttgctatagaacataaatttaaaaaatatcctaaaagtgtagtgaactgggggttcaccatgctatatttatgtgccaacccttatttataagaatgtgtaatttcattcaacaatttcaatcattccgtagttgatagccaagggtgtattattaatactcggcggatatcatcaaccgtgctaatcttggtatggaaataatgtacaaacatgatgctcacaacttcctgatatgtcaaaaagagatgtcttttcctcactgagaaatccaaagaaccggaaaacttttaaatgatcctgttgaatttgacttcatattttaaagtactgactcctgaaactgaaattgttgattcatatgtttctcataccccatcgagaaaattgattttaccagtttctgcctgaggttatcttccctggattggttaagaaataactttctatttgttctagctggtttcggtattgaattatcatatttctcatttgtcagtgattttcctatgctattggattttgcaacaaattatagatatgttactaattacattgtcttgtcataattaagattgcgaggtttcttcatttttatatttatgtagttccagatcagattaatttattttttttgttaattattgtggaattacagtagactaacttgtgtgtgcatcttttaggatagaaattagcccatcttttgataatttacttaacgccttccattatgatatacaaccttaataaggtatatcactgcttcttttttgctgtatggacaattgcagaatatggtttactacaaaatttcacatgtggatcatcgaatatcaaacccagagcaaaggattgctagtgatattccaaagttctgttctgaactaagtgaacttgtacaggatgatctagctgcagttgcagaaggattaatatacacctggcgtctctgttcttatgcaagtccaaaatacatgctctggattgtggtaattttctaattgaaaagcttgattgccatttcatctagtaatgataccctttaacaattaggattagtgatcaaattatgctacattcctcttcttttcactgattctgtaatgtagatggccactgctttctcaccttgttatcttattagaatattagatattattaaaaataaatgcttttcagggatatatactagttgcgggtggagcaattagaaatttctcccctgctttcggaaagctgaaatccacagaacagcaactcgaaggagattatcgtcagcttcattcacgattaagaactcatgctgagagtgtggcattttatggtggtgagaacagagaagcatattatatcatgcagcgtttccaggctcttattgggcacctgaattgtgtactccatgaaaactggtggttcggcatgattcaagatttctttctgaagtattttggtgcaactgtagcagttgtcctcattattgaacctttcttctctggccacctcagacctgattcatccacacttggaagggctgaaatgttaagtaatcttcgataccacacaagcgtaatcatatcactgtttcagtctcttgggatcctatctataagcacaagacgtttaaatattctaaggtaaagccatatcttctgcacactactgataacatataggtccagttttgtcattgcaggcggcattttgcatgcagaaattagtgggtgctgtgtgcggcctaccaatctaattatctgaatctgttttaatgttttctgtaaatgcattttatcaattggcaagtcttatgctgctaactaaatacctatttgttgcaatgatttcagataaacatgttagttccaaacttgataatttgcaactgcacatcaatgcagaaataatgggcttgttcactttgttgccaaaatcaacattaccaaaatctggtaatgccaaattttagcattggatgtgtttggtttgatgccttttcaaatttggatggtgtttttgtgagaggaagctttcggaactaccaaattttggtaggatgacattggtaagcgcatgtttagtttgttcccctaccaaaatttggtaacaccaaaattttgtagggttgaaagtggcgatatagacataaagtgaacaagcccaatcttattacaagctgcatgcacaaatgaactagttgtccagtgaagattctaccaactaaagaggtggtggtgggatgacagagtcaccaccatgactaggttctttaggcaggagagattttgtcacaaaccataaagatcataaaccagtcgccatttctcatgaagagcatttcacttcttggttgctattccaagtataactcatatatttgtctgtgtgtattgtttcggtggaatataagtatacatgtttcctgttcctaatatattttacatatctttgccctttttaatatttcattgttctgttgaaatcacacaatttatgacattgtatgctgttcatggggcaaacttaatggtgacctttaccaccatgggttgcatttgctatctttgaattactcattttcttccaacatgattgtgacgcaaatgaacttccactattttttttcagtggctatgcagaccgcattcgtgagttactggatgtttcacgtgaactgtctggggttcgtgataaatcgttaaatcataattcctctgctggaaattatatcagtgaagcaaaccatatcgaattctcgggtgttaaggtaataactgcataaactgaaggagggtcatagtcgctatctacttccaaagttctcatatcaggtccttgcaggtggtgacgcctgctagcaatgtcttggttgatgatttaactctccgagtagaaaggggttctaatcttttgatcactggtaatcctcccctatcaaatgaatttggtttagcaacttttaacttttgtgatgtaagctgcacttaacattaaattgattgaaatttgaccttctaaacaggagaagattgggaatatatgtaccagtgcatctgtgcatgtatatttcctttatattttgtatatcatcctaaatcatctgctgttatttgattacgtggttatgaaatagtatgtgtcatgagatggtagttgctatatccacgtctactctagcctctgttgataccactatgcaattgtgaactgttcccatgattgcctgtgccttccctcccaacacatcaaatatgtaaagtgattctgttattatttccattcttactttgtatttatctattctattttcaattcactatctgtgctcttagggcataaacaatagtttcaaaatcgtaggttctacagtagtaattgaaaagtcttgttgatgtcagaaattttctaaaagaaaaccaataaaaaaatactggcccaaggttaactacagcatcatattgcaagttctgtgattacattaacaaaaaattgctgctgtctcgaaaggcactcatttgctagtcatattagttaccagaggtgctactaccaagttgaaaccattactgcttttgaatggcatgctccaaatttaccgcttaaaattgttggattatcttattttgcatgttgtgttacagatatttcaagtttgatacatctttgcatgatatgataacaaacttaatcgtccattgacttctcttatttcaggtccgaatggtagcggaaaaagttctctttttcgggtccttggaggcttatggccattagtttctggtcatattgtcaaaccgggtgttggctctgatcttaataaggaaattttctatgtcccgcaaagaccatacacagctgttggtacacttcgtgaacagctaatttatcctcttacagcagatcaggagattgaaccccttagctacgatggcatggtggaccttctaaagaatgtaagtaataggattcatattgatactcaattgccatttatattatgctttattgatctactactgagtacagggacctgctggattgtaaccttgctccttatgcaggttgacttggaatacttgctagaacgctatcctcttgataaggaagttaactggggtgatgaattgtcccttggtgagcaacaaagattaggaatggcaaggttattctaccataaaccaaagttcgccatccttgatgagtgtactagcgctgtgacaattgatatggaagaacgcttttgcaaaaaggttcgagcaatgggaacatcatgcataacgatatctcatcgcccagctttagttgcgtttcatgacattgttttgtctttggatggtgaaggagggtgggatgtccagcacagaaggttgtaaccctgaaataactcactgaatgtttacactctaaagttaattcggtagaaatttaattttgctcatgattttgcagggatgactcatccttttctactgaagagtctgactatacattattggaaactgatcgtaaatctgatgcgcttactgttcaaagggcatttatgggcagggcaaaggtatatgatttctgaacatttcttacttcatattcttttgttaataactaatattgtctgtgccgctgttttatgtgtttttttccatactagagcaatgcttcatcaaggtccaaagaacattgctacactacaaaggttatagcaacttctcccaagttggaaatagaacaaacaatacaaacacatagagtcccgcatttacggtgcttcccaaggcctctgcctgccagagtagctgcaatggtcaaaatattggtatgctatgttctgtttggtacttcgctagttttctctcgttgttattcctcaacaagtcaatattcagataatacggtaccctagttactgcagatattattgctaggtaatacttggttgctcctgtctgcaagttaatgtatatctgcagatgctagaaatttttgtttcttagtatactaatgtaagtatatacttatggaacttgacaattccttaatccttatttgccactggaatttccatgcaatctcttatgtgcccctgatgtctcactgatatctgtccctggacccacatgtcattgaaagaacaaggggcaaataagggaatgggtaaactttcaggggcaaataaggaatttatctgggtaaacctggacatatatctaaccaagcatatggatttatctcatggaagcttgtctcagatgttaatatattacttaattctaatgctgttctgatttccttgctctccaggttcctaagctacttgacaaacaaggagggcagttgcttgctgttgcactacttgttttctctcgaacttggatctcagaccgaattgcttcactgaatggttggctttgttcaatatcttactaatgtcagaactcagaagagctgcaaatgaatttcttgtctgatacatctcattttgtcagggacaactgttaagtttgtcttggagcaggacaaagctgcatttattcgtctgattggtatcagtgtcctgcaaagttctgcaaattcttttgtggccccatctttgaggtaatctgggagtaccttcatttcagaaattattttgcacttttatcatggtatcttgaataatcactttatgttccagtatgaataaagcacctgatgctttctggtcaactctttgtctaaaatattatcatcttctctagttgagagctattgacctgttgtaaaattgaaatgctctttgggtgaatgtttagatgctggtagatttatgactatttctccatacaactgaattcatggttttaataatctgtattttcacagaacccttactggaagacttgcccttggatggcggattcgcctgaccaatcatttgcttcaatattatttgaaaagaaatgcattctacaaggtacatcctctagcggactgcatagtaatagtcttctttttagttgatgctcagtgacactcagaagggacggtctttaaacattaggaagggttgtccgccggacttggccccttttatgaggtttagacagtgcgtttgtcacttgatgtctcaacacttgctatgttcgcaccttgttttagtttggtgtgcagtggacctgggttttagagtttaagaatgaaaatgcatattgcaacagatgtaatactaagggatttttgactcaggctaagttattctattatatgcttttaggtattcaacatgtcaggtaaaagtattgatgcagaccaaagattaacacttgatgtggataaattgaccaccgaccttgctggcttagttactggaatggtaaaaccacttgtcgacattctttggtgagttatctttggtatcaagcattcatatctatactttgtttcacttggtacatatctatcatatctaaaaactcactgtaatataaaaatcaaaacaaatttactaggtttacatggagaatgaagcttttgtctgggcgaagaggagttgctatcttgtatgcttacatgctgctaggtttgggcttcctgagagctgtatccccagactttggtcatcttgctgggcaagaacaagagcttgaaggaactttcaggttaatactgcatactttctttcgtctttgcagacctgactgctttgctgatttttctagtttcctagttttaacctggtgaactatgttacaaggttcatgcactcgagactgcgaacgcatgctgaatcaattgctttctttggtggtggatcaagagagaaagctgtgagttccttcacactagatacataatacttaaaatttgtttatgcctgcttgccattgtatttgttatctgtcttctggttatattattttattgtgaatcatgaataacaatgggtaattcaatgccagttccgtatttcatacttaacaacgatatatattaaccatgatgtcttgtttatattttaatagttggcttctttagatatatccagttattaagtttgtgctgttctgtttgacttgtttatattctaggtaatgaaataaactatgattcctgtttctgttttttaatgcagcttccctgttatgacccattgttcttgcatttattgaatcctttttatcaaaacaaatcttcagaagttagcttttaggagaagctaacacatagctattgcaccctaagacaagaacattcataaggcatcctttgttgtttgtatgctttatgctttgttattttacatgctgtgttccataaagtatcaattgacttgctgactccataatatgatacaatggtgtacgttaccttttgttctttcaagtttttacttagctagactttttggttttttatttttcttttcaatagtgttttctgcactattttgttagatatgatgaactatagtttttctgctaatgatttattctcatatatcagattgttgaggctaaattcatgaaattgcttgaccactcaaagattctgttgagaaagcagtggctttatggtattgttgatgattttgtaacaaagcaactccctcacaatgtaacatggggtcttagtttgttatatgctctagagcacaagggtgacagagctttgacttcaactcaaggttaataatcatcaaaactcgaggggagttggcacaaccacattatttcatcttgaactacactaaatattctacttttattttgtacaacaggagagttggcacatgctctgcggttcttggcatctgttgtgtcacaaagtttcatagcctttggtgacattcttgacttacacaaaaagttccttgaactttctggtgggattaaccggatttttgagcttgaggagcttcttcgtgtatctcaaaggggtatatttcagatggctatgacttcattaattttttctttaatttcttggtgaaagcattcttttccagtacttcatacatagtagggtacagtgatcatgcatttcaatagtagcattacaaccttacagggcaatagataatcttctagtgaggctattctatggtatgcccctgttttccttaaagatctattacattatcctatgacatggcttttcttgaggagtctataagtgctgtgaaacaacctgtctgattcggttgaatgacaatttcatgttcataacgttatcaatcaactgatgatatgctcactttttgagctttcattatatctattcatggtagctaagtattgactttcgaactgttgtttccctagatacttttgtgccttccgatgccactagtgcagaagaaaccatttcatttcacgaagtggatattgtaacaccatcgcagaaactgttggctagcaagctgtcgtgcaatgtggtacaagggaaaagccttcttctgactggtatgtggcctttcttctggcaacctttgaatacctttaattgagtagtaacggtatgctgacatttttttttctttttaccttggttcctgcaggccccaacggtagtggaaagagctctattttcagagttctgagagatttatggccagtgtgttctgggagagttaccaaaccttcagatgggatgtttcatgttcctcagcgtccatataccagcttgggtactctgagagatcagatcatataccctctctcaagggaggaagcagagatgaagatttgttcgttatacaatgatggtaggtgtcacttacctattggaatatctggtgttgaataaataacaactgtatatttcaaccttgtattgttctatttacaatgatacggaaactcaacggcaatccaggtaacgggtctagtgcttctaatctgctggatgatcacctgaagacaattctagtgaatgttcggttggtctatcttctagaaagagaaggatgggactcaacttcaaactgggaagatgttttatcgttgggagaacagcagaggcttgggatggtcagtgtaaactctgtttcagtctgttaattgcgatgaccagttgccgcttaaatccctttttattgaagttggagctgctgttttcttgcaggcccgtttgtttttccaccatcctaaatttggtattcttgacgaatgcacgaagtatgtgctgagccatgactttgattgacatttcttctctttatttgctgataaattagtgcggttcctaaaagatacttcattgcagtgctacaagcgttgatgttgaagagcatttgtacaagctagcaactagcatgggcatcactgtgattacttcctcgcaagtaagtattgacatgattcttgtgataatgacctgctgtgatcatcatgattgttggtagcaaacattagtccactgtagcactgaagcttgtccatcctgaatgaatggctgaatctatgctagctaccagacaccttagcttttagtgttgctgaatccttaccctgttgtttgcagaggccagctttgatccccttccattccttggagctgaaactcatcgacggagaaggaaactgggagctatgcgagatccaccaatgatttgtctgaccggttcgcatttctcggcattcggcttcccagtcccagctgctggcctgctgctgcttgttgatgtcaggctgtctagaagtgtgtacaattgcaaagcagctgttgtgagtgaaaagtacaggttttcagtctcattgtctttgaagaaagaaaaaaaaaagaccttgtcgacaatttggcgtagaacatggcatttgtagtttagttcatacggaggtaggtgatgggagttgcagggatgagcatagagagatgtggtatttgtttttaagtagataataaatgataaggtgatagtacagtacagatcttccggcattgttaatattaattcgataagtaataatgtggcttccttcttgctgccatcaagttatggcatataatgtatgaaaatattgcatgtaaatgcctagtgattcttgaatattgggtttgaagttgtatcagagtatcagactgctgcttcttgtccccttcttgcaactgcgttatcgattcttcaagctttgggtttgtttgtctttacaatgctggttcctcatgaatgcctgtgtaataaattattgctcttggagatccgtaatatttttgaaaaatgtttgtaattgattattgttatgggagattcataacatttgtgaaaaataaaataaaagcaagaatagttgcgaaaggaggaattactgttctgggagattcataacatttgtgaaaaagaaaattaaagcaagaataatagcaaaaaaggaaaaaaaatgacagctgtgggatttgaacccacgccctttcggaccagagcctaaatctggcgccttagaccactcggccaaactgtctttgctggcttactgcatataagaattattttaaatggtttataaaaaactggattgactaaagtttctgcatgacagaagaacaacaaaagatgatttttactgttaaaacacgttagaaacttgagtgttttatagccatactcctactcgtattgtgcagcctttgaatttgaagttctaattgagttttcatacgaagtgagtataattcaactgattagcttacttataatggaacctgtccaccgggatttaagtccttgaaaagaatgcttgtatttattgctgtttcttttagtgttaggtgatatacccacaaacagtgaggtatctttagtgacttcgttaatcttgacatatgttggtctagtcttttgaaagtgcccgtaggagtaaggtgtgtattcataggggtgaatatgcgtatattgtgagcgcatatatttgtgtatttctaaattaattttacatgttgtttgtttcctactccatctgccctacaatgtaagcatttttgaagtttttgatggagattaaaagagaactaaaatttatggttgtgatgataaagtaaaagaataaattaaatgtgagatttttgtgattttcaagatgattagatgagaaagtccgtggagaagttgctagacaaattctatatgctgtaagttgtattttaaggtaaatggagtttcctatttagctaaaaaataattagatgtttgaagttcaaaaaagcaaaaataaaggtaattaaagaagttgtcatattctggtacaaattttgggtgttattttggaccaaaaattgaatgttagaagtgtttgaagttcaaaaaagaggaatgtttgaagtttacttaaaaccaaataattagataactaaaaaattgatatatctaaacatcaatgttgaatttggaaaattttaaaaaagacaactatataagggcccatccgggttcgaaccggagacctattgatctgcagtcaattgctctaccactgagctatggacccaattgctgttagtactgattgtattttatttatactgtatagtgctactgagctatggacccagttcactttttttattttataaattagattagataatggtgtggtgcttagaactatttgcgtgtccagcaaagctaatgacaaaagaaaaggaaggcgttgttgctttaattgcaaataactttgcggtacctttacgtgtgtacgcagcttatttttattttcctaccaaacttgcgtgctaccgagacaacttagatagaaggaaaattgttatgcacataagtcacattgattacaagaacgattcttctttccaattggcaacgaaccaagctcattcatattcacaagttgataaactcagcacaatcacgaggaatcaatagaatacctcgtcttcttctgccaataagtttacctagcggctatcaacagttcaatgagataaaaaacgaccgaccaacctagttaaacacttaaagctcttgccagattgaggcagagaaaacaatcggttaactctacttatacccattaggtagggtaaacctactaacatcatgtccaaactccccacatattcacggcgcaggataaagaacaattggttcgtttccttacttacataaaacccagctcagcaatgtcgtccagtgggatttctaaggcgcctgaaagatcaaagtcttgtggtacatcaagatcatcagtaagccaagaactgatatcgttgccctgttcgccaagcccttctgttccagcaaatatatcaaataatccaggcaaattggtcaggggagcctccggcaatcgtgaagcagcattctcaggatggttccttggttgctgggtaatttttgcacccagaggaactgacggtcgagggggctcctgcattgccggtgttggaaccgactccacagctctatcaagaacatttccagaagtcgataatagctgtactatcttttgcttcggctttgtcttgtttttacgttcaccactcctcccactgcctgatgaatgacgccctgacttcgtaccagaacccttggcagatgcatctctgctgtgttccctttccctatcacacttgttccattttgtgccacctaaaaacggataaaggacaaattgattagtttatgaagcacgagtggacttctagtactgcaaatagcaccttgtaaattttccctcatgattcccctagggccctaacaaggagcgtaagaattaccatgatttaaagtacttctgtcttgcttttgatgcttcagtctctctacgccttaataccagaacgaaagaaggcatgaaattatatttgattgggcagaaaaaaatgcatactaatctctcttatcaaagttgcacatgtattaccttctgtagattttgtgccgctgcttggcaagggcgcagatagaacactccaaagggaaggctcactgaagcagcttttctttgtttcctcaaatttttggcaccgcaagagagtacgcttggcaaaatccaaagcaagctgttttgcagccttgctggcagacttactagcaccagccttgtgactagaaccagttcgcccaccctacaattcataaagatacagtcagtgtccaagtcaaacagttttcatctgcattaccctttctttttgctggaacaaaaatattgcaattagaaggcatcatcaacatgggttgacctcacaaggattaataaagaaataaaaaaatatctatgactcaactgattaactttgcataactattaagggaacttggattttagaagaacaagtagtccaacataacattgaaaaaccaatcatgtagagataagtttatactaccttaagttttcggtatgccctttcaaccaatttattcattgcatgttgctccaagctcctgacagaaaatcttaatgttagccagtgaagcaactcaatgcactaagcctctaagatctaatccaagaacataaaatccatacctctcctcgatactttttgtatcttgaattgctttctctaacttacttaatttacatttcttttgcttcacctgcaatggtaccattttgatatacataaataagaggtaaagtgaaaatcataaaagtattttaatcttccagaatatagtaatacatgaactgatctcaaaacaggataacaaggatcatcggccttagccagtaggttgaatctagaaggtttactggcttaaatctagaaggtttactggcttagagccagtcattggaattttttaaatgacttatttgaattattccactttgcatatataccctttcatcttatagtgatctggcagcctaccttgtcaccttgatatatactattccaatctggtcaagcggctgtgacgctaccagcattacaagcaggaattaatcaaagtacgatggcattcaaataacatctgatagttatcccagaaaataatcgatggcacattctcaatctatattttcccatgccaattgatgtcacttaatgcataattttcatggctcctatacttctagcacatgttgatacaagatgggcaagccaacttcacaaattgtccacgtgtttcaagaaatattttggaaaagaagtccttagaacaaaacaagtttcagtaatatgacaaatattttgatggtttacattttacaaggatctaacgcaatcattgtaaaataatagatgagtataagagtaataaggtaagcatccagatataattagagttgaggacataatactaggagtggttgttgatgtaacctgatcatgcagccttttcctcaactctgaaatcattttattgatgttattgtcctctccatcatctagctttggctgaaaagggtagtatttgcaagataagacaagaatcacaataggaatttactaggtaattacataaacttcaacatcctgtgaaaagattttacaaagaatgcaacagaaaatgacattagtcaccagaaataaataacacttgtgcactaaatacaatcctatagattctttttcatggataactaacagagtatagtgactgcatactgtgactaccaatgtttaggcttaactgataaagaactgaatatcattcagaaatcatcagtgttgatggctactttacaagattccttaaactatgacaaataacaaccatatagcacagcttcccactttaacctttatcttgctcatgatgagattcacactgtccgacaaaaaataattctatgcataaaccacataaggaaggatggcagggtaaatagatgcaacattaaagaaagagaaaaactataatcaccatcaaagttgctaaaattttgtcaattacaaagttgctacttttaaattttaacaagtttcctgaaattttggcatacagacttaaaagaactgcagaaagcagaactgaagtattgcgatgcagatactttccccagaaatgcagagttttaagtaaccataccactgcctccgggaaaatgccaatactttgaagctcgatgaaaatcttatcattcacagacatctgtccatattggtattcatgtggagatgaagagaagttttttcctggcttttgacgtagtgaagaagtctgcggtatcaagttatcaaaagggccattttcagggtatacgaaattgacttcatcagacaaattatcattatggactgaactttgactacttgaactgatgaaactgctggaagatgtgaacccattgctcaggctttgatgtacaaccgaagaattgtttgagttcatgaaatcaacactcaatccaaaattagatgatatggcactagcctgaagttcatttcctaagaatctgcttgcagcgcaaggaacatggctattagaaaattcaaaaagtatatccctttgtacaacattgggttccgagatgtcctcttccataactatagctgaaaggagtctgtgttccattgggaccatctcatgaaaccatttgtcagcttctatcttttgtggtacatggtgttggttttcctcactaggagaaaaacagtcaatagttccttttaatccaactccattggtttcgctttgctcaggtaagatagacgaattagatggaactagctcctgacatgaaaactcctgcagatttttgggacatgcgatgtaaggatacacactccatgagagatgaattgcatgaaaggagggaaagatttccctctcttcaaatagctaatggcacaaaaagtaacataccgtcgtttgctgcctgctgtaattggtgggtgctaaaacatattcaccatcaggcacgcaagacatgcccaaatcaagctcttcaacaatgtcaatctgtccacaaactctcaataagtgagaatccatcccaatccaacaaggaaataagtagtcaatcatcatgacacatcagaagcatactgggtaccaacctgtttttttaagaaagacaaattttcagagcttatgaaagttagcatgggttccattttcttccaaaatgggccacaatatgcaccaactgcacaaaaaaaagggaataagaaaggtataaagtgtcaatccaaagagatgctgacaaagttcatcaggcaaaaatcagataagactgtatacacaccaatagcgccgcgagcagcatttacagcagctaaaagttcttctcggtcatctgtgtgttcacctgcattgcaccactagttagtaagatatataagctaatgccaaaatttaatgtaaacggccaaagtacatagataagcgtttcagaaaatctttagatgtctagactcacaattaagagcctgagggaaacatgacaaattgttttgatcagaacctttcttcattgtgggacgccccaccttactgtacagacgtttaaagaatcaaatcagttctacatcgaaagtaaaatgcagcaagttgccaacccttaccaaaaggaagcatgagtacctttcattcttttcagatccaggtcgcccacctttgtttggctttcttgtctctgcagcatctaatttttctttcgatatggaagaggaagagtactctttaacatgcatagtacctctgccactcctcccttgacgacggacaccaccatcttgaagctcttctttcaaaggaatcgtatttttgtttgatgaaactattgatcctgctgaattacggactagatttgcagcctcgttctccacctcaccattgtttgtagctttctccttgaccttgcgttctttaacagctgatccctcactttctgacaatccaacaggagaagggatatcattcattgtgtttgccatttgtgtattgctactagttcccttttttgtaagcacaacaccgcaggactctgtagatgttggtttagcagcaatagctgtatcaagtggtgatccttcagataggacttcatcaaaatttgagaccggagaaacaacgtttgctcgtcttgtccgtgacattttctgtggacgttgaccgacccaagcaataggaggtgaagaagcatttgaatgtatggaacgtttgcggtttgtcatgcctcccaaaagtgatgctttatttgagtatggtatttcttcccattcgtcgcttcctccagttgaacgttggaaactagaagctgaacccatgccgtgtgaaccggttctcggtgccctgcatgctttagccttgggcaaaggactgatgcttccagtttgcatatcttcagaagcttgtgctctatacatgtagagttagcagatcattagaacaatgatagcattgtactgctcattcacacatatataaaaaacaataattgtaaactatgaggagaggaattctatgggtatacgccagaatgaagtaatgaactgtgcttacctgtttccttttaccataccccgctccttttcaattccaacataccgctctcttctttcatttggcagagtggcatgatccatatctgtcttgcatagaatacgggatgagttgctattctgctgagaacttccatccatcctgctacctgcatattctacggcagatgctccatgtctgcaatgtaaggataaagaagggtgagtagagacaataagctggaacagatcaaataaccacatatagttctggaagaggattaaaagtggaaacataaacagcatatattcaattgcagcttaatacaatctacatgggccaaacaaaataaacagcagatcagcccaaggtagaggtcaaaaataaaatctcaaaaccagtcttctgatgaggggcatatatatagtaatagaaccaatgtttgacttaacaatgtagtgcatgtcagccccgttccctattcaattcagtgtactaccgctcaattagtagagaactcattcacctaattatttgtgagtaatttccagactattgagcttaagtttggtattcaattagactaatcgcctgagagaaagttgaacatggctggtctgtcacaaaaaaaaaanctttgatgangtactgtacgantgacaatcaatnnnccacacttnnnnnnnnaaannnattaaattctgataaagaatatatgagacataacaactatatacgatcgtcctataattcacacagagttacatacgcacattacaatacactgtaaccagtattcgtcc

SEQ ID NO: 6092 - DNA, 56063 bp, Oryza sativa
cttaaatgatctctcaataggcctatcgatgccctttaatgtcattacaaaatctgacagatcaacacatacatgaccaaatctaaggttgccttcaccgtgaactatctgaaacatgaccttacttgacattgtgcctgatgaaaaactaactaggttaactaagttcatatcatactaaccagatctaacgccgcattcatcaatacatactacgccctatctcttcaaaaaacatactacgccttaagttaaagaccctacacataagttgtttgccctatgtctcaaattctaaaaatagggtgtgtgtgctccagatctactaaagtatatggtaataaaactaaaatgcaaaaaaaacctggaaacacatttcgaaggaatatattacctgtgatagagtcaacaaaccagcagggcttcgctgctccccttctcctcccccctcacccctccctctttctcttttttcggattttgagcgaatagaatgaaaaatcagagagggggaaggggttttatacttggaggggctaaaatcgccctccctaagggcggcaagggggccgcttgcaaaatgccaggctgcctcgccgcccttttgcaagggcctccgcacagtgttaaaccgccctccctaagggtggcaagggggccgcctgtaaaaaaagccaggccgccctcgccacccttttgcaggcggcctccgcacagtgttaaaccgccctccctaagggcgcaagggggccgcctgcaaaatggcaggcccttttgctgtccgttacttatgaggcaacagccatctgccatgtcattaaaatcgccctcccaaagggcgctgggcgactagttttgtaaatttttgaaacacaaaattagttttgtaaatattttaataaaaaattaaaaataaaaaaaattgtttcaagtctaactggcttcgccacatgctggtgaagggactttgcttcgccgcttggtagatgcttcgccgcctggtattcaccttcaccactggcaggtgcttcgccctttggtactttgcctcacaacttattgattgttttggaaggttcggttgaaggcacttgtgatatgcctataacacatataaagtttaaatctaccatggatttgagatgtggagttgtgccaaatagtaccacatacacttttcccgttgtctcttcctctcacgctgcaatgcgctcacgacacagcacccctacctagtacctttctcaaatgtcagcgagtctctccctaacacaatatgatacggagtcaacaatctttaaccataccgttattacctctagtcaacagtatatgattcaaacaagccacaaggagaaacaatatcgtaagacaatgtgagtttttaaactaagaatttgagaaattattgatggtagaaatttcaaaagtatagttaaatctagtcctaaacgtcaaatattttagaagcatacatactgttgcctaatgtgacatgaagttacgcattaacatatgacatgaagttaagcattaacatactgttgcctaatgtgacatgaagttacgcattaacatatgaaggtgatatcgtatatcataaattgctacaatgatatagttatcgcctacaaacttgctatgtaaaaactcatttctttaatactatcaataagaatctcttgatttttcaaaagagaaaatttatctcatctctgacatttggcgaagagtgtctcatcattttgttagttggcttaggaagaggatcctctaacttacttccctctgactttgagtcactgagggaagtaagttagaggatctcaatccgttgggttatcaaccatgcacaaccatgatctaaattttaaaaacttaattcaagtttattttctgttttttttcaccataattttttccatcatttaattttaagtccctaaaaatatagttataaaagtttactcataattaatacttttttattgactcatttattattttcatggtttatcattcgtagagtaaacgaccgaaagtgagaagcatacgacacacaagatttatccatgtaacaaaagagtttatcatttatttgatcgatgattctatgcccttgtttagtcctcaactttttttttcaaacttccaacttttccatcacatcaaaacttttgtttagttcccaacttttttttcaaacttccaacttttccatcacatcaaaacttttctacacatataaacttctaacttttccgttatatcgttccaatttcaatcaaactttcaattttaatgtgaagtaaacacaccctatatatcaatgtgttggattaaagctggacgaaggattgaattgtgaaatatacaaaacaaacaacttagctgcagtcaagagtgtgggggtaaaatcgagagaagccaaatttggaagaggaggaatcatcaaaggagtgtccatctcctttgcaagaagcagtgatgtgatgatggtgaaatggaagaagttggcgtttgggaaaaaaggtcgctttcgaggtcgagcagagaaaaaagggaggcctttgcgaggcgaggagagcgagacccctgtgatcccaattaaccacccgccaccgccacgccgccggcgaccccctcctcggcgagatcgagatcgagatgccgcccacgccgccgcctgagctggacctcctcgacaccgagccggagttcgccgaggttgaccccaccgcccgctacggaagggtaataatgccttcttcttcttcttcttcttcttcttcttcttcttcttcctcgattcgcttctcctcccatcctttcgactcattcggtgatgcatgccgcctcttgcagtacacggaggtcctcggcaagggcgccttcaagacggtgtatccttcttcccacgctcgatttctgggctttgacgtgcgattccgtatggttcccgggccgttgtgctgcgtctaagattcgattttggtgcagctcatggtgtttgtttcggttctggatgcatttttttcttggggaggataaataatcttcagagctttttgatgcgctgaattcacattccttcgactttttttacctctcctcttttgggatttgaatactagtattttgttttgttgatttcaatgtgtgtttggcattgcctgctatgattacttgaatcaacattgccaatttgtcatgtcaagctcccattacctctttctagactgaatggatctctttcatttctctcttcttatcgggtgcatttgattggttggctagtgttccaatcaatttacatcctcctatgatctatctcacatttgttctaattcaacaactgatttgagaaatgcacagggaagctgctgtgaatctttggttggttgttttgtcatagtgtgttttagtatgtcactcagaactgtccacgtccattaaggcattaactaccgtcaggattccaactgctcttatatgtaaaactaaactatgttgctactttacactatatatgcagaagggtaatcttcatgatgactaccagcttgatagaataatttcatattatcatcatgtatttgtagtgttatcaaggttatgtacttatgtcgttttcatgtgcacagttcatttacttatgaatgtcaaacctgatacgatagcaaaacaaacttcttcctaggtgtttgcagtattagttcttttttttttaaaagatgtttgcagtatgctcaaaacaaagcatgtatctttgtgaacttctcctgttattttctccaatttcgacatggacttgagatccttaattcaaattttactggcatagctataaggcttttgatcaactggaaggtctggaagttgcttggaaccagatcaaagtgggtgatatacttcggaataatgatgacttggagagacttagatcagaagtccggttgctgaagaccctcaagcataagaatataatcaagttctacaattcttggctcgacaagaaaaacaacaacataaatttcatcacagaagtcttcacatcagggacactgcgccagtttgttctcttgctcccatctgattataactatgctctttgaataatatgaacaaactgcactctgtcgctgacacgtcttatttaacattagttagctgtgtatgtcagtattaagtcaaagaaaatgatacattatcaatgaaagtttgtactggttctcaagttcactcttcgggtcctagcatggcttcaataaccaaaacaggcaaattttgtagagccaaccggcatgctagacacatgcaggtctataggatgcccaaattttctcactgagaattttcctatttctctgtcattgtttaggtaccgtattaagcacaagaaggtagatgttagagcattaaagaaatggtcaaggcaaatcttgagtggccttgtctacctccacagtcatgatccaccagtaattcatagagatcttaaatgtgacaacatatttgtgaacggaaaccagggtgaagtaaagattggagaccttggattagcaaccatcctagataatgcacgctcagctcacagtatcattggtatgcattttattttctttttattttactaggaattgaatttatttttcatataacctctgttttcttgtaggcacaccggaatttatggctccagaactctatgatgaagaatacaatgagcttgtagacatctatgcatttgggatgtgtttattggagcttgttacatttgagtacccatattgtgaatgttccaatgcagcgcagatatacaagaaagtatctgatgttagtctacttatcctctccattgcttttaccatttcttttctgaaaattggatttgattaggtaatgatcctgtaggcttatattgaaggtgtattttatatatatttcttttatcaaaaaggtttattcattgcttaccctataccatcctggtgtaggcagaagatgaatttccattttgagaattaaaagcatggtttaaagacagtatctaggattctttttctcaacgaggattgtgttgaaatcatggtttattgccatacaaattgcagaagtagcttcagggtttttcaggtttttattgtgtaccagaagttgacttaactgtaggttttaattgtattactttgggctgtcatagtgggtccattgataaattacaccatcatatgggtggtgtttgaatagtttttctttgtgacagttactaccttggtcacagtctcacagatacaaattaactataactttcagtagctattccttggaacaccattgtactaaatccattggcaacttaaagtttttgatgaaattactttgttttgtatgtgtcgcatatgcccaaggcaattgatttcctatttgatcaatcatcattgtagaaaatcatgttacattctttttttaaaacttgaatcatgttacaccctattactgtctcaatctcttgatgctggtacaacagggtgaaaagcctagttctctggctaagattgaagatcctgaggttagattttttatcgagaagtgcatcgctaaagcttcacaaagactatcagcacaagagctattgatggacccatttctccgagatgatggtgaaaaaatattctatccattgcagtcaaatacgaaggcatcaggtaatgactgaattggcaacactataaaattgttcccttccccatctgaccttagataaacatggcagatggtgctggcagttcaaactcaagcatgggttacaaatatgacagagatgcatcatctatggcaattcgggagcacacaggtagaagttcaatgacgtgacagtgatgtgaacactattgcattgttctgaagcttctctcctttttacatatcaatcttatgatgaaatgcaggtagttttgcagaagaacacccaagtgataggtacatacacagcaccatggatccacaagcagccgctggtcgaataattacagtcgagagtcagatgaaagatctgaatacgatatttttgaaactgagaattgctgattcaacaggttttttttattgtggattcccattttacttctcattatgttgttcggtgtttgtcctctattacacttttttgaaatgcaatatgcaggtcatgctcaaaacatccatttcccatttgacattgaagcagacacttccattagtgttgcaactgagatggtcgtgcagctagatctcactgaccaggatgttacagcgattgcagaaatgatagatgcagaaatacgggctcatattcctgattgggcattagaagaatcggttgaaaaccaaggagatgaaagagctcattctgagaccgacagttcagaagcagatgatgaaacttctgagttgcgtaatgagcctaatgctacacataatggttttgtccaagaacaccttccctccggacataagtattggtcggactcgcccagaagaaacattgaaatgtctcactccgcagtcgaaccacatattggtggtaatatgcctaatgggatattgaagaagaatgacactgatgacacagtcagcaatcttggcacttctgtggacttgccaaacccatctatgattgacaggaaatctggagtagcttctgtcagcaccagtcctcagtcttttgatgatgagcatattgaagcagatgttagcgagaggttagtgaatttgctagctcagcagcaagaggagctcaacgtgctgcgaaggaagcacaaggctgacatagaagtcatcttgaaaggtgtgcctgaagagcatcgcgaagaaaccttaactaggtgccggctgaaggcagatgagagaaacagatcagacaaaccttagctgcaacacattatcttcaccgtgtgatttttttgtaccggtgccatggagctgtttagaactattgttgtgcaaaaggtggtctcagctgttcactgttcttttttttttcatggaatggaggagctgcaagtgtttgtggaatctgtgaccaagcggtgcaatacatatacgatactgatgtagctgtctggatttttgtttttgttttttgtttcttgaaggcaagacaaaaggtttctgctcaccaaacaaaatctgcagataccattgtgttactgtattcctgaattgttcatgagaagtgcacctccttgtttttctccctctctttttttccttgtaatttgatgatttttggaactaagaattaatgttaatgatgtaatacatcagtgtttgagctgtttcatactactacttgcaatgaaaaaacataagttccaattacttccattatgtttgtgccacatgcttgcccaagtccatagagctgtactatgcactgatatctatgattgtttgtacacatacctgcatttcttattgcaagtgtgccatgcatggaggatggatggagctgtggaagtctccactccatctccagcttcatccactgatgagcagcagatctgaagtggccaatggcataaacaacaaacaatatatatgtgcaacacatgctccagtagcatctctcacatgccccagatttgtgtgtccccttgcatcacatttgctgctgctcttttgtgtgcatctatctatatctatcccattttgtgtgcatctgaatctgtgtacctgaaaacctgaggctccccaacccagggaaggtttggggatcctagctgctgcacacagaatttggatctgtgttgatgtacaaaaagtggcatgagccatccctccgatgcaatattttgggatctattgtatatcaatgaatgatgatcagttcctccatacaaggcagggagatgtggaaacttgtggaccatgaaagctgttcatatatattttttgctcatctgtctctctccatgatatttggacatgtagtgtgtacatcacatatactattgatcctgttacatgttggtgtcaaagggctatagctacatcaattcatggtagcctggctttcaaatatgcataattggctaattgcatttatatttaggcatcatctgatcaacgtaatgttatccatttcaggatcatgtgtatggcaattagaattagttcagtccatgatagcatatggatccagtgcatcaaactgagaaacatgtccaagtgcagttgaaagcaaaatgacaacaccccaatccatgcacgtcgctcttaatcagtagtctactgtttcatttttcacacagatagaaacccaaaccaattaaggagtaaaaggcacatcatcaagaacccaataaggcaataaccaaaaccacatctttgtgcagaaagaccaggtttttacccaaatacacatgcaacttgggttctatatataaaaactatactccatgaatgaatgaatccattcatggtactactacagttgctaacaaggaaaatactagctagtatagtacccaagttgcaacttgcaagcaagtccaggccaagccatgaacaaatactctatctattttttaatatacgacgttattgatttttgacgtgacgtttaaccatccattttttttaattatataaatgccatttatttaattgtgacttgttttatcatcaaagtaattataatactaacttatacttttacatattttatactaacatttttaataaaaacaattagtcaaaacttatgaaaaaaatcaacaacatcatacatcaaaagacgcaagtagtacaagctagcatgtcaatttgagtgaatgaagagataagcaatactaataattatatttatatgcataatctctctgtctcggtcattgctagctcaagtcgattgttcttgacaagttgagagctcatctcatcacccaccctatcattgtttcccatcaacctctgcaatataatgcaaccacctctctctctctctctctcttctccgtgcattggagtatatatccccctctcctctccccgccgcccccccccctctctctctcctctctcttcttcgcctccgatcatctaagctcatcgtcgtcaccagctagcgcatgacgtcatcctcgtcgtcgtcgtcgttgctccttttgtagtacgtagccatcgatcgatcacagctagctagccatgcaggaccacgtcgtcgtgcagcagaggagcggcgaccagccggcgccgtcgtgcgacatcgccgccgacgagatcccggtcaacggccacaagccggggagggccgtcacggcgtcggtctaccgcgccaagatcgccggccactcgcgcgtcctcaccgtgtcgtggtcgcgggacatgctgtcgcactccttcgccgtgtccgtcaccggcgtcgacggcgcctccgcggagtgcagggtggacctccgcccctggcagttctggcggcgcgcgggttcacgccgcgtcgagctcgccggcacggcgccggccacggtgcgcgtcatgtgggacctccgccgcgcgcggttcggcgcggggctccccgagccgaggtcgggctactacgtcgccgtggaggccgcgggcgaggtggtgctggtggtcggcgacatgcggaagtacgcgctccggcgcgcgtcgccgcgcgcggcgcccgcggcgtgcgacgccgtccccgtggcgcggcgggagcacgtgttcgggaagcggcggttcgcggccaaggcgcggttccacgaccagggcaccgtgcaagacatcgcgatcgagttcgacggcgtcggcgagggcgacaacgcgaacatgaagatgacgatcgcgatcgacggctagaagccggtgcaggtaaagcacctgcaatgcaagttcaaaggcaaccagtccgtcaccttcagccgagcaaaggtggagatctactgggacgtccatgactggctcttcagcgccggcatgcgccccgccctattcatcttccgccccatcgtcctctccagcgcctgggcgcccgccgccgccatgctcctagacggctcgccgccgccgccgccggccaccggcttctgtctctacctctacgcctggaagctcgactgatccattattgagctagctagcttctttcattggcggctggctctgataccatgttgattagatcggggattcttgatcgaaacgaaaatgcgaagttgtgagccaaaggggaggaggagtaagaatttttttcgattttgtataatttttttgaggaaggaaggaaacatatataattggatataattaattaattcttctaattaagagcccttgcatatacatacattattgctccattctcttgatcagctcaatgacaataacaagagacatgataaaatagtaatgccattgccaagaggagagcaacctagtgatctcctgttgattcatttgagatctcttgtagtagatcacagtactgggctactgtctagtcaaaactctgtttcacctctctctgatcagttagttcctgccagacaagaagttgatgttttagttatgagataaccacaccacatattcagtgatcagtaatgtacatgctagctgtgcgtataacactttataactaagctgtcttacagttaattgcatatgcaagagagagagagaaatcaaggtttgcattgcaaatgtgcaatgtgtttgttgggtgggcagcacatgggatgatgagggagagtgggttccagtgatgagcagcagcagctgtggactgactcatcagactgatgactactgatccaagaaaaaatatatatattggccaccgcaaaaggtgacagattggatccaccatcctaatcttcttcttcttggcccctcccaattgattaattcttccctataatctgccaaatattcacattattaatccagggtatcctaagtgatcgattgatgcctctcacctcttagttcctgatgatgatcaccttctgaatgtggagatctctatgcatattatccttaattaaacacagtttatgcataatttgtttacgaatggtaaaggagtttcatagaaaaaaaaagagatttttattggattctaatattaaaattcctgtttgctcacctgacatgtgggctctaccgaaaatacctactgtactgtagtttagttgcgcaaaatgaaaagtttgaatatataataattccacatgagattgtacctagacagtttgtcatgagaaattgatttgcaaggttgtatcctatttattatcttacatatgagacgtgtgtgtgttggtgagatgccaaaaggctgtaaagattccatcaagggaaaacaatggaggaaaatggggataaacaaactacatccaatttgttcccttgctagcagcttgcatctgttggaagatatagctggtgccaatcaacactttgattgatagaattaacaagattatattctgattgctgccatttgtctccaaggcatttgttcaatccccattagttaatatacaacaaaaggatatcattagtccactggtttaatgtagacaagaggaaatgttaatctttatccttccatttctgtttccagagcagtgactgtttgactgacctagagggtgagttcaatttgtatttttaatttgcagatcaacatccaactaaatctatgtcttgttcaggaatgtgacttgataggagggtacaaattgtatctaaactcctaaatgtacatttataaaatgaaaatattcacaatagctacatgtaacaaatcaaatggaaacagcacctaatctgaaccatcccctttgttttgaacctgcaaaacagttttctgacactccactggactcctgcatttgtttgatcccttttcctctgcacaagctagtttggtcaaaccagagctggttgcctgtttagtaaggttcggcctctgtaatcacaattgacttgtacaaaaaaagctactaagataattaaataattacttactgttactattgtctttctcaagaaagtattctatggagaaactactgacttgtagcagaatgggatcgagcaaaatcaacacacattgcagccgaatgtattagaagaaaaaaaagagaagaagctaattaagaatcaaagacaaatgtagtagtagctaagaaagctatgcttgtgatccaagatattattgtagctagctgcaagatcttaaatttggtgtatgtttgtggactaagtaagcagctagtactactaaaatggtgggtagctaagctagctatagcttggaattgtgtgaaactgatttatgggctagcatgcagctggagtactaatttagtttagagtccatgcgtctgtgttttgttgtgtgcccgggatcagcggacaggggtcttgcatttgaggtggcctgaagaactgaaatgtttttaatccaacaacccatttgcacatgcatttgctagctggtttgcaattgctacatgttcatcatatcaattgaatttgataacaagctcacaggtatgactgaatgcattgtagtgatgtagcagccatgtatgacaacaagctcacaggtatgactgaatgattcaacatgaaattaattattgaatttaaagaaaccttttctttcgttacaatacattctctgaatgactatgcatacatatggccatgcatgtatatcgatagatcttgcgtaggcacattagcaatttgacatgtgtggtttcaactatctccagctccaaatgctcaagtttacgcaaccaacgataactgaataaatacagcttgtgtagcttgtagcttatgcaatctagcatgcttgttgccattcaaatggaattaggtcgtcgatgaaatgcagccagacttcagttttaatctttccccttgttctagtactttaaatattaattcatatgtggctgatacagtgatatggaggaggtattaatttgatgataaaaaaaagaaaagaaaagaaagatgtggaagtgaagaactgaagtaactgaagaagggagaactgaggtagctctacatgtgcttttttcttgggatgcctttgtataaacaaagcaaaatgaaatgatccagttattggttatggggtggaccatgagtgacacgtcgccctgcctccccttttgcaagctttcagcagaaagtgtccattttttgttggccatcacccatctttctttaattcttttttacttgccattgtcaatccacagcaggcaggtaggcaccaccatatgcattttttttgttatttttttcttctcaaaaaaataaatgaatttgagattgggtagcattgagttatgtcgttcgagaaagatactactggtcatttcgtgtgccaaatttttttttaaaatacacggacacacatttaaagtattaaacgtagactaataacaaaacaaattacatattctgtctgtaaactgcgagacgaatttattaagctaattaatccgtcattagcaaatgtttactgtagcatcacattgtcaaatcatggcgtaattaggctcaaaagatccgtctcgcatttacatgcaaactgtgcaaatggggaatcgctagatccggatccagcaagaaggagtctggatctagcgtctccactcttcatcaggtcgactcctgcctccgtgagtccctacaatactgtgcatggcgagagggagaggaaaaaaaaggtggctcatggagtgtaactagagggtgcggttgcgcgtgcaaagacggagaggaggaacgatggtggctcgtgaagaaagagcggtggtgacggtgcgtggagtaacagttggtggttgttggcagtatgaggagtttgttgtcgacacaaatcgctaaccaaatttgttactccctccattccaaattgatctatatatttcataggtacaccaagaccaataaatactaataactctctcatactatatttactctagcaacaaactcaatgcatgcataatccccactatttcctagccaatagtaaatcaagatattacatgtaggttataaatacttgtctgcatagatgcatgcatcaatgtccatttactccaatacataaataacgaatagacttaataaatgaacacaaatatatagatcatttaggaataacctcaaaaaaactataggtagatcaatttgaaatggagggagtaatatttagaatgtgggccactagtcattataaagcaacagctagtcttaaagtagtaaaatattgagataaaggtgagagtacttgtatagggcttttaactttttgctatttttaaaatatggtaattaaaaatttactactcacagtccatgatacgtgagtcctcatgtgtatatgacatgtgggacctaatagcaaattcttaattcccaaccataatgtcttccccttccctttgtgtggcgtaaaagaaagaagaaaatctcccgtctctttgtctcctccgctccttgcgccgccgccaagacacaggggaggggcggcgatctccatttggcgaggagagcagagcaggggaggggaggggaggggatcctggtgagcctctttctttctttctgattcatctctctctcccccatcgggactggaatttgcttgcgttcgttcgttcgttaaccctagcttctcttcccttaatttcagagccttaaccttaatacaagtaatagtttgtttgttccccgaaaagtcccaagttggatccgcccctgattactccagtgatctggcacacattctatttgcccaaaagatttataacttccctagctaccaataagaaaccctgttcagtttgtgttacaaggagcaaacttgtgagtgtttgtttggctcattgttcttgccaaactcccttttcccgctttttagtaaccccatcacattattacgatttttacaatacaactgtgctagttgggtacattgccagttttgttgctactccactgatatggtttttctgtgtgccaaccaggtcatattttactgcccagagcacagaaaataaaagatggttaatgcaatcaagggattgttcatctcctggtaattaagctcctaacacaggttaattcgatcgatttttgtttcctttgcataagcagcttgcaatcccttctgcagtgatgtgccaatggcacagttcatcgaatgcttcaatgcccgcatcagacaagttcatcttgcacatgcttgatccaacgcacatgttcgtccagcctcacgtggcggatatgatcagaagtaagatatcagagttcagggaccagaacagctacgagaaaccatcatgaactatcaaggatcatcctgtcctcagactcccatataaacataccaccgtttgttgttaagcctgtaatgtggagtagtgataagttctgagcatcacatctcactcatgataatcaagaatgattgacattcggtatcagaatgccacttttagagtgatagataatgcaactgtgagattgtaatggaataactgtattttaatatcagaaacaagtcgagttgtgatggtggaattcggccgaataaatcttcctgactgactgtctgtctgtccatccagttcttgtggaattttcagctgatattaaatcttgatgtccttttctcttctctctcgacattatattatatcatctgaactccgaaggatgggattttgagcataattggagaagagagtctgatggcaatgctggtctgttggcagctgagaaatgcccaggggtcttccggctagctccacaaggtggtgggctagacgacctgggttcaaagcctcacccctcctaattatttgatattaggtccttccctaatattctagtttttttggtctgttggcagctgaatgcctgaatttcttcaattcgccggagcagattgggggggaaggcgacggttattgggccgggatcaaaggcggcccatattacgtggagctgaacggggattgcggcccatattaattagttgggccaaaagggggatatagattcctcgcggcccaacaatgggatggggggtcacgtgcggcccatattagttgcattaagttctgcgtacaattaacatactatttccccagtttcaaaaaaaaaaaaactatttcccctcttctcctgcctactatttccattgtctgtcggaatatttttattagtgacgaatggtaaaagataggagtatatggcatttcacgctcagttagcattcacattgttgatgtacagttgtacactagtaatttcaagtgaaaattcagaagaaagaaaaggactctctgttttttactagtaaattgtatatcaaccttaacagtgagcatacaggtcgtgaacaagctcaaaacaagaacatatttgcattgctccaattcttcagccagcgagtttatattgacttttgcatcttgtgcagaagaaaaatagtatgtcagagaatgatgtatgcacgcagatgacatggtatgatgaacttgatgcccctgttttactccaagtagaaaccatggtccaacagacaacatcctctttacgaaagagatggcattaacttaacaatggcacagagatagaaatcggtcctcactgtctactatcttcagcagatgcaggaaccactatcttgaaaagcacttactgatgcagatcgttcatccatcaggttgcagttggttccatgtacaatctttctttagttgagacttcgcatgcttgcatccattctcgattgctttctttcagccatgttgatgcgcactcagatagatctatctatctatcttctctcaagttgcagctatgtaaccaagaaaagaaaagaaaagaaagccatcttttctgcagctcgatctgcacccagcattcatgcttgaaagcaaagtctcggcctgacattcagagcaaagcttaaagccttggcatgattcggcaaacactcaaactgttctcactttcggagcctttgcttccaagcaaattaaattgcccggatcaatggctacaaataccccatgcattgcatgcatcctctcttcaattcagaaacagtttctttcgtcttcagttaaaaaaagaagaaggagaagaggaaaaattcagacagagatcgacatggagacgaaggtgaccgtgggcgtcgtcctcctgctgctgtgcctgtgcggcggcgccgcgtgcgccgccggccgcagcggcggcgagttctccattgtcgggtactcggaggaggacctggcgtcgcacgaccggctgatcgagctgttcgagaagtgggtggcaaagtaccggaaggcgtacgcgagcttcgaggagaaggtgaggaggttcgaggtgttcaaggacaacctcaaccacatcgacgacatcaacaagaaggtcaccagctactggctggggctcaacgagttcgccgacctcacccacgacgagttcaaggcgacctacctcggcctcacgccgccgccgacgaggtcgaacagcaagcactactcgtcggaggagttcaggtacgggaagatgagcaacggcgaggtgccgaaggagatggactggaggaagaagaacgcggtgacggaggtgaagaaccaggggcagtgcggcagctgctgggcgttctcgacggtggcggcggtggaggggatcaacgcgatcgtgacggggaacctgacgtcgctgtcggagcaggagctgatcgactgcagcacggacgggaacaacgggtgcaatggcggcctcatggactacgccttctcctacatcgcctccaccggcgggctgcgcacggaggaggcgtacccgtacgccatggaggagggcgactgcgacgaggggaagggcgcggcggtggtgaccatctccgggtacgaggacgtgccggccaacgacgagcaggcgctggtgaaggcgttggcgcatcagcctgtcagcgtcgccattgaagcatccggtcgccacttccagttctacagcggggtcagtattagtcctggcttagttctccaacacttttttccaaaaacatctcatcgaatctttatacacatacatagaacattaaatatagattaaaaaactaattgcacagttaagggaaaatcgtgagatgaatcttttgagcctaattaatccgtcataggctcaaaagattcgtctcgcggttttcaggcgagttatgaaattagttttttcatttgtatccaaaaaccctttccgacatccggtcaaatatccgatgcgacaccaaaaattttctttttgcaaactaaacatgcccttagtatatattattcctatcttactctctctctctctctgtaataaatatatttaaaacgtttaacataagtaaatattctgtcaaaaatttaaaattctaactatcaattttatattaaagtaaattcccatttaacaatgcctaaaatatgttatgaacatagaaaagaaaacataccaagccgcacgaggaacatgacgaacaaacaatcacatgagctgtctaaatccgcttcgttcgctatgggcatcttgaattttgcatttacaaaatacaataagtttataatattatggtagtacatttgaacacaaatgtgcgtttaccgtttgttttgtctatcacactaagcatttggaaaactgttaatgaccagaattttaaactcagactaaattttgttataaacgtcaaataattatgtttaggcggacttcttttttactatttatcatataaaaaaatatttatagcatctttagaaccacatatttgtataccattgtatgagccaaatggatgatgagcaagtgatatttattagtagaattatatgatgatcatggatggtgatatataaatgcagggtgtgtttgatggtccatgcggtgagcaactggatcacggtgtgacggccgttggatatggtacaagcaagggccaagattacatcatcgtgaagaactcatggggcccacattggggcgagaaggggtacatccgcatgaagaggggcactggcaagggtgaaggtctatgtggcatcaacaagatggcctcttaccccaccaaggacaactaaactcctactactaaataactcaattgaatcaacacatgaggatcatacatatgatggtccttcaaagtttctctcttctcctcttgttttattagcctttaattccactgttttttcttctttccaaagatttggaggagagagagagagagagagagagagagagagagagagaagcacaagctgtttgtttgtattcgattttcttttgcgcgctttgaaatcatcgatgaaataataaatgtcagaagcttctttttaagatactgtctgttccaaagtcattcataagggtgcttgtttggtcaagttttgtgtgcatttgatttttgctcctgatggtttggttttgtatgcaataacgactgaaatgtgtaggacttagtccaagtcacttagaggtacataagtacgaaaactgaaaacacatgggagacaatataggatcacgcgggagaaaaatgtcatgaaatcgacattttgtacaaagatgcgtgtaaatcttttacgtatttctaaacaatgaaatcgacattttgtaatttgctgcatacaagctatactcttactccattcgttaaaaaaaaaaagttcaattatgtgttcagattcatgtctaaaattaaatcttattttgacggaggaagtagagtcagcatcttgttttgaagacttggtgtcagcatctgagcccatcatggtcaataatccatgaaaaaaaatgcaagaattattggaggacaagtgcccatgaatgcaagtagagacactgtagcacactgcacgcactcaacttatcaattagtagtactgtttcaacatttttcatgtttaggccaagtgtgaatcattttaacttgttcatattaagggtaaaggtgataccgtgaaccgacgcccacggtcgtccacgcgcgggcgaccaggggcgaaccctactcctcggccgccgccaccctccccttctttcccccacctcaccgccgccggagcgcgccgctggaaactgcgcggctcgccgggatggcggcggcggggctaaaacccggcggtggcccgtctccaacgcgaggagatggcgcggcgtgccgggaaaccgcgcggtggcgccgcgcgtggctgggagccggtgccgccgccgccggtcccgactccacgcggttggatccggcccaccgccgttggatctggcggccgacaaggatggcggcccgggcgttggcagtggccggccgtcgggagacgtgaggaggcggcacggcgtgcagggcaacccggaatgtcggcggttggtcggcgcgggcacgcgcttgcgaatgccggggagccggcggtggcggcaacttccccgaccagatccgggctggctccggccggatctggcggggcgcccggagaccggcgacaggcaggggcggcgtcgcggtgggcgggcgtcggtttcgcggctggcaacggcggctcgctcgcgccgagctcgcgttgtcggcgtcggcgtccgtccgcggcggcgcgtgacgacggatgttgcggcggcgcggacgtcaccggcttgcgaggggcagtgtcgcggtgcgggtgatggagccagggcagccggttgcgcggggtggctgcgtgtggtggcgttgcacggctcgggtgggctccggtgagctcggcggctgcgcgacgtcgcctacgtgagctccggcggggttgcttgctggcggtgagcctcctgctcggtagggggtttcttctgccggtggcgagtctcgtgctcatgtgcggcgatgtgcggatgtggagttggtatggctgcttgtgagacgtcttggactaatctatggtcatcgatgtgggggtgcttgtgtgggtgatgtgaagatgctagtgaaagccttgccgtgcctttggccagttcgacgaccacggcgcccgcgggcgccgtttccctttttggaggcgttgtcatggcgttctttcatatccccgcaatctccaggtgtaaacctagttccgaattcggacaagcggcggcggcactacgcgtcgtgtcctccttgggggcgtcgcttcggagaagttccaacgcatcgacgactattgatagtctttttcggttcaaaagctttcataccttagttcggcgaggccttcgccttcttgggtccgtttctttcttgtggtcggtgacaagctcttcggttgtttttgctgatgaagtcgaagctgctcgctgatagggtgcggcgatgcttggcaacgatgacatgttgcagtatcttccaaggagttctggtgttggctgtgtgaaggaagtggctcctcggtggcttcgctgatgtccattgttggaggtcggagctgcttttcgctttggcaaccttcgtgccttcaatgtcgctgcggttgtgaagtcggcgctgctgggtcgcttgggcggctagctcggcaacgataacacgtcttctacgatttgggagctgttgtgtcgcttttgtgtttagcctagcagcgacgtcttgcgtttgggctccgctgtcgttgttagatctgtagcggtgggttttagccggttttcctttaattaaccgtgcaattgtacggtttttgggtccggtttttcttataaactgggtcaattctcttcttctaattagaaacgtggaacaaagttccgtcctaggtttcaaaaaaaaatattaagggtaaaagccatgtgaaatgttagaaatattagctgaaaacgtcgaccatatactcctaattgactgaggcagtagaggctagacataaacaatttgcagaggttggtttgcctttgaccacagcactcaaatccgggggcgccaccgggaaaataaaattcagccacaaatttcttctaatttttattttgaaattgtttcagttatcctctccctgtcaagattgtccagctaaccttccaaattatgatctactcactccagaagcttctgttgtcctgttaactgatagcatcttctcttctaatgttctgtggactgtgtttaatttagcactagcatttaatttggggcctacttgaatatcattatattatattgctaaaatttgatggtttgccatttaatttgtttgtaagttcactgaatcatgtgtaatctagatagtactaagttagtggtaggtgtgttagctccctccaactgaagaagatgagacatgcaaagcaccctgcgtcatgtacaacccacaaagttctaattaacgttcttaactatatataaaatatcataacaataactccttaatgtgaaaggtaaatagcctctttgagtaatccacatgaagatgtggatctgaaagacaaatgaggatgtagatctgaaaacaattgtaaataaattcataggataagaaaaagacaatgcttgatttgatactgctatggtcactagtcataagagaaaatgacttcaaagttggaatatgttttggattgtcaataggtgcttcaattggactctcagctgagccaccaaccttacaacttttgagcggctaacataatattcctttctccaaataagcaagaataaaaaccagagttcaaatacaattagaaaagattaacatttacttgctcggttttacgattccaaaaagaaaaaaaattctactatgttttctcgcatggttattacgacaacgtctaccacatcatgcatgcttttttttcattaacggtttgggtgggacaaatatactccttccgtcctcaaatataagagattttgatattttccttgtactgtttcaccattcgtcttatttaaaattttttaaaattattatttattttatttgtgacttactttattatccaaaatacttaaaccacaacttttcgttttatatttgtacaatttttttagaataagatgagtggtcaaacgttataagaaaatagtgaatattccttatattaggggacggagctagtagcatatattcgattaaggattttaagcagtgacagtgattatagaccaatccctttggaattatgataatagaaattgaattgaaaagggaaaaggtgaaggaaaagaggtgtgggtttagccgtttattgaaaggtgagatgggggtaggtaagctaatataagctctccactcctacaccaacacaacacaaactccgatcttgtttctctctctctctctcccttgtttcagtggctcagaaattttcctcttttcttattattgctttcctttatttaaggaaggagttgggctctctctctttctctgagtctgaatccccacgagacgagaaacctagcaaaaatctcgtctttcgccgcgctctccctcctctgattcctgctgttcttgatcttggatctcaattcccaaccaagaacacacagacagagaaaggaaggagaagaagatgtcgaacgacaacaagaaggtgtataccctggaggaggtcgccaagcacaactccaaggacgactgctggctcatcatcggcggaaaggtctcatcttttgtttttcttttcttttcacgcttttacttacttgtactattcgatttcatgtttcgattcgtttcgttggttcttggttccctatcctccaacaacgtcctgagacctcgatctggtcggagtccacgaccagatcttggccgcggcgcagatctggccctccagccgccggcgtggggaccttgccagatctggtcttctccgacggtggccaacttctcttgtcccttggttgcagccaccaaacctcttcctcccctcctcgatccaaccttggtcttgttcatcgactggccactaaaccccaaataagcgagatagaatttggattcgtttcgttggttattgtttctctgatgctgtgatggtggctagatcatggcagatctgcccagtaaagtcgaattttgtttgattccaccgcacctcctgaggaatcggtccaatcctgtgaattcttctcttctttcctgctgattggattgtctacatgggctttacctggaaacaggggtgagtgctagcagattcaaacatcatggactgactgctcctaaacaagttccatatgaaaacctgttctacatgctttttttcttttactcttcactcgttgtcagtcaaacactgcaaaatttgtccctgcgcctattctgcaagagcttcttgttagtacaactgaagaatcaatcctctgttccaacttggcatctggacagaataatgaatgtttcataggaaaggctcagctcaactaagtaaatcatgttgattggccttaaaacacacttcattaagagtctgttttttttatattggacatgataagaataatatggctgttttttattattaatgttttttcttggtaacagtgcttctattgatgaacctaccctgtttacctgatctcaccagtgttctgcaatactatccaggtatacaatgtgtcgaaattccttgaggaccatccaggaggtgatgatgtcttgctatcttcaactggtacgccttctcaattctcatgttctggccttctgagtagtgaccactactgatgaattaactgagtttgcaatggatggtttagcttacactttgaaatatacatggaccttctgcaggcaaggacgcgactgacgattttgaggatgtcgggcacagcacgactgctcgtgcgatgatggatgagtattacgttggcgacatcgacacatccacaatacccgcgaggacgaagtacgttcccccaaagcaaccacactacaaccaggacaagaccccggagttcatcatcaagatcctccagttcttggttcccctcgccatattgggcctggctgttgcaattaggatctacaccaagtcggagtccgcttagtgctgttctcttagtgttataagagtggaaggtaccgaataagttagcaagagttttgtgtgattcataccagtgtaacatgtcatgaattcgtcgaatgttctgaagatgctgtgggttttgtggtcctgggatgtccacttcggtaaagatcgataagattcaaagtactcgttaatcgttatacattctgatgatggatctgctcattgttattaattgttagaaacctatacatacacaaggtggtgattttattggcgggtgtttctattgaatttctgtttgttaggaatgcagatttaacaggtgttgcatttgcttgttttttgtgtcgctagcttttctataactgatcgataatgtggcttgtgtagtggatgtttactccctccgtcccataaaaaaccaatcgatgttggctaggctagtttgtttgggacgattcattgtactagaatgttggctagactggtttgtttgggacggatggagtacgtaatggctagactatccatccgtaatactggctagactagataatatagtggagtttcaccagatgaagaggggaaacctaaccaagtcaagactcaagactggctgagttgttaaccatatagtcacgccacatgaattgattttgccacaacagagattacatgtccagctttatacgtaaccatttccattatctataaaaaaatatccagctttatcagaccaagtaaccttcacaagcatatttggagtaataaaacaatggtttccgtaacacagccagttggaactacatatcatcctgattaacaacggtcaacagaagtttctccttacattggacagccatgacacgtcgagataactggacatcaccattgtcatccatcacacagcatgttattgtgctatcaagaagaactactccatcttggatgttggtggtgcaggctgcgatttctccactgaaacatccctcgacagccttgatttcaacagtagcctccactgcctctttaaccactgcatatctcaactccacggtgcctaaatccaacttactcttgtcaaaatatatcccataacaggagatgttatgctaatcatattagagacaatttcagtctctcgaactttgctatccagtatgtgagttgaataaagagttcatgattttttttttaaaaaaaaacctaaaccctaaacttaaaaaaaaaaaacctccacagtgcccagcttaccaacaaaagtgttgttttttcaccttaatttcgacaatttatattactctgaatgccatcaatcataagcaatcctttgctgtgcccttttctcttccctcttaatcggtcatccttaatactgagatcaacctcaaaatacacagcgtcttgtaccaagagtcctcgagttggtccagtcatgaatcgtcctgtgaatcaagtaacatgcatgataatgttgtgttactttgaatgcaactgtaataataaatataacaacaatttcaagtagaaacgtcatataaattataaaagctatcaccgaagatgatacaagcatgcgtgtgttcgcatatgctgattcccaacccggcggaacagtaacacggaaaacggaacagtccattagcacgtgattaattaagtatttgctattttttttacaaaaatggattaatatgattttttaagcaacttttgtgtagaaacttttttttttaaaaaatacaccgtttaatagtttaaaaagcgtgcacgcgaaaaacgaaggagatgggttgggaaaaagaggtgccgaactcacccctaggtctacatctacatcttactaatgccacgacatggtcaacggctgacatgtagaactctaacttgtttaccatataacttttcgacaccgacctcaacatcctctccaacctcccttgccggccgccggctgcgcccaacggccccagctcctcccccaccgccgccacccagttcttccctatcgcccgccggccgcaccaagctcctcccccgccggccgagcccgctacatcgtgcccagcctctccatcacgcccatcgcccgtggaaaggggaggggaaaggggaggagagagaagtagaaagaacatgctgatatgtgggacccacataggtcccatgctaagtcagctgccacgtaggataaaaccggatgcaatactgccctaggagctattgtgaccggttttgattagttaagagacgtcggatatctggttttacggtttgagaacatttttataactcgatgacgagttcaggacctgcggtgtactttttccgactttagaagggaacaagaaaaacaatttgggttacgtgatgggagataaagagaaatgaggttaaaatatttagtgtaaatttcacaaaatctactacagattttaagatattatatcacagaactataaatgtagcgctaattttataaaaaaaaactatggattttagaccaagtatcatacaactacaaatttaatatttaggttatcataaacctatgtattttagagtttaaatctctaacactaccgttatattgaagctatgaacattatacttttatgattaaattagcactaaacatgttgtgataaatttattagttaatctgtagttttgtgaaactccatcttaaatagtagttccacgataaatttgatgctgaatttgtaattttgtgattcaacattttaaatctgctgtttgttttagtttgaacaaaatatttttagttctgtgaaatttactcaaatatttattatttacaccaaccaaatattttacagatcatttaattaactattatactaccagtacttattattctaaggttgaccaaacaactttcacacgcatcttgcaaagaccacagctaatctcctcctcatcagagcctctagtgaatggactcaactccaaactgcaacccgagaagacattgtcattctgagcatgaatattcagtatcaacatttcattcactgatactaccacgacacgtcgcagtagttgaataactctgtcgtcaccaactgtggttgaacaaccaacaacatcgctgtcatacaacaatacagcatgatttgggacatttgttgtgcaagcagtaattttcccatgaaaaacttgagcatctgacaggatcttgatctcaactgtaccttccagtgctttcttaacacagttaaatacaagttccacctcactgagcctactctccaaggtttcactcacaatcttaggctgagactcaataaaatagatcttcatatcaacaagtcctttactaaattccctgtctatgcactcttcatcttccctgatcttcagatttatctcaaaaaatatttcaccccaaaaaacaattcctctacttgggcccgtcagaattagatcttcattctacaaggggattacacaacgtcagcaatgtcacgctaattttacgtacaaaagcagatgccagttattcatagaatataatcctgttactatattgaccaccttaacatctagactcagatcaggaactttcttcagattaaattgaattgctatggctgagctcatcaaatgcagtaatttggctgcaacaattataatataatgacaagactaatgaaattatgataccaaaacatgacttataatgatgatatccacaaaaatgtagtagtcacacaagacatgaatatagacaacttaaatatgataacgtcataatcatatctagctttagagtgctttcaaccatacaggactgtaaagaaataagttcgatcatcaaataaaatagggagaaatttgtagtgctaagacatattctatgaaatacctctgaccgaataacttggcaattgtccctattgcgcgggaagatggtgatgcaattaaaatctaatatgtctctgactatcacagtcccatacaaattgataggatagccaacatctgaggacaatatcttcacagagagtacatttaaggagctagtgaattgatggtcctctttgatgatggaatctgcaaagcgcattggaccatgttgtgctgagagaaatgaaaatatagtaagtatgcgcaaggggaagaatagtacgttaacggaagcaagtactgaaatttactgataatgcacaaaaatgagagaagtttgcaaaggctccaagtgtgggttcggtcaaaacagtaggtttctatatactcctttaaaagacctcaatgggggtggtggagaatctgccaccatcacctatccactgatgtaggttcatgctgtcagtgtaaccacggttgtgcttgaaattcacatgagtgaatccatcatctaccactctacatcaaaaggtgagccatatgaaccagcatcatccattcacatcgaattccaaagaaaatatgttttttttcaattaacattggaaaaagtaatgacataatttatttttaatttcgttgcaatgcagggcatttagctagtagtatttaattttgttaagcctttgtaaaatttaatcacaagatgcagaaaactgatgaaacaatcatcacaaaacaaaggaaaacagaataataataagagtaaatttcactttgggccagttttaatagccaaagtttcactatggaccaggcctaggcccatatttttacataacaccaggtaatatgaccttccattgcactttggaccaggctgcattgatttgggccgccacgtcgtcttcagcccaatccacgtgagcagcagctggtggactcagttcacggaagaatcatacggagcagccgagacacgacgcgtataaaactagcgccagcctcatccgctcgagagaaaactagcgcagcagaaaggctgggcgccccaccgccgccgcagctgccaccgccacgagccccgccgccgtcgtcgccgcggccgtcgcgtccgccaccatcgccatcgccgccgtcgtcgtcgcgtccgccaccatcgccgtctttgccgcggccgccaccgtctccatcaccaccgccgaggggactacacaagctcgcacgatgggagcactactcagcagccaccaggtgatccaatttaccacccttgatccatctctaatgtcaactttagtgattcccggtgaattgacacctcaagcaggttacagtagcagtggaatcgagcaactcgaattggtcgaatcgaggggtgaatgttgaatcgccgataatctcgtgtgcatcaagcatgtccttgtctgtttcgtgtacagacaatgtgccaatcgattctatgattaggaagatgcaggatacaagggtaagttagggttagggatttaattgggggttgtttaattaggataaacttgagtacgttttggttgaaatagattgatttgtgtgtatttggacggctaagcaatggaattttgtccatattgagtgcaggagtatgaagtcgaccagttgccaaagtacaaacatgaccccaattatcatggcaaagaacatgatacagatttaagatgcttgtgtcaaagaaggccagcccgtcgagttgcgagttcaagagttaacacagagagacgatttctaggctgcccccaaaaggtagtactgtgccattcgaagcatgtgcctttattttccatagcttgtcatattgacgcaaaagtcaattaatgcatatcatagaggaagctttcagtaatgtccttcatttatctattatttgaacaaaacaggtgaaataatctttacttatgccaaaatgttgatccatttgtactttatttaagtcatctacctagatatctaaatattgtgtgcaaaactgattttatcagcatgtgttttatgcagtgggttaagtgccattttgttaaatgggtggatcctgaataggatgagctggccgcaaaaacaattttatcacttagtgagagaaacattgtgcttgagaagtcgctcgatgatgtgaacaaaagctggatgtctttgtacgcgaggaagctgtgcgaggatgacatctggagacgcaagttagccgatgcaaggatcaatcatgtcgatgacctagataagatcaagtcaattggtgatgacctagtcaagatcaagttaattggtcttgttgtgatggtgaccctttttgtaagtgctgttgctaagttgtttgtgactctgtagtctgaaggacatcacgtagagtagttgtttgtgatatggtcctttggtaatgtggttcttttatagtacgatcagtatgctggtgaacttttagtttgtaagtatgaagggatggtgaccttgtagtttgtaagtatcaaggacatcccatggccagttgtgatctgatcgttttggtaatgtgttcttttgtagcccagccttgatagataggagctgcttggaaatgtaatgataatactatggtcaggatattattatctcttgaatataatgtgaacagtatgaagttgactgtgttgtcctcagactaaaccatctttttttttagaacttaacaactttattaagctagaagcaaagtacatggtttaggtaacatctccaaagggattggagaataacatctccattgtaggacaagacgttgaaattttctgaagattatgatctacatgagttactgacagaaggtgagacaaaatgtcttgaatagctgaaaaggaactgattgatccatagtcaaaattaagatctgaaagaaaccaggttagtttggcaaattgacattgaaagaacagatggatatcattctctggtagactacaattggagcatttattctcaatccctgtaatacgaaagttaagagcagctgcagttactgaaccgtgaaggaaaaaaaatcaaccactgagaacctttaatatatgagcaacttaacatgtacacaatagtagcatccaaatttgtaggtgcaagggtgtgcctctaatggtttagatgacacagggagtactcaaattgacatcaaggattcatgactaaagctatataactacaagtccacaaaagtgtactgcattacagatgttgagcaaaatagaaggagcaaacccgcatgaagcactccatcctattttaacagtttaaggttgacaatacaatatagcagagtactattacaatatattagaagtctatagttatataactactaggattttagtttatcattgtaactataaaccaaaaggcctatacaagtactacagcctgcactatcttatgtactccaaaacaaaggccactttctttgctcctagacttctgttgagacaaaataaattgcgacatcactgtgttgagaaccaggtgttcaatctgcctctgcccctccctcttgcacttggtcggccccttgcactacccctaccaccaatcatgccaagagaaggagcctcgtttgagttttcatgggacgaagatgcaaccccacgttttcttgcctatacaacagaaaagattagttgtttatataaaaattggccgtaaaattgataaagtcaaactaaccttaatgtttgagcatgtgtgtccatcccttctacagtttgagcatgtacttgtagtcttcctcgctggtccttgcaccctaggaccctcatctggtcctctacgtcgacttttctttggccttccaacatgtttgtcaaactttggtggatcaatataaggtgaatctgtttttgtccatctatgctcatcagggactggatagataactgcagtatatgttctcatataagcatccttcctaaaataatcagcgacataatcttcaggtgtatgccctgccttgtataaagcacaaacatcatgtttgcaaggaattcctgttagttgccatttgtgacatgcacatgtccttgcacttatgtccactgcgaaagatctatctaagcaatgaacttcccaagtagttaagttagactgataacaccagcaatatcttgcatgattcttctccatctctagttttcctgccacaattggtgtaatctcccactgtgcagcatcccctccttgcctctttaaagataaccttaccattacttttctccttatgtgttcgaccatagtgacaatgggtttgtcccttgcatctagaatatatttattgaacacctcactcaaattattgacaactaggtctgactttgctttaggtgagaaagcatgcctactgaagtgttccttgccaattgcaataagccattcccaagctttcaagttcaatttttttaagtcttccatagctttatcatagtcccacacggttgtggcataaattgcagcatcaacaaaacccttgtatttctcacctctccaacctttgttgcccatattttgcaacaaatgcattttacaatatctatgctcgctgtcaggaaaaacaattgggattgcattcataagaccctacaaagtaataagatcatttttattgaaagaatatcattacttaacgagaaatgattttaatctagacatgtaatgtaccttctgcctatctgacatgaaggtccaaccaccatgttcttctccagatccaattgcacacttcaacatttctaagaaccatgtccagttgtctgtgtcctcttttccgacaactgcaaatgcaattgggaacatgttgttattctcatcccttgctgaagctgccaacacctgtgcaccatttgttagcttcacaaaacaaccatcaatacctgaaatttacagtcatatatatattagtacagaaagacatcatacaaaggtaggtcatcaattacttacaaatactattaactcacttatgaaaggcctgcaaccatttataaagccttctttctgagcactgaaacatatgaatagtccactaaatcttggtgctaatcctaaaacatctctattgatggttgtcaccactgctgtagtgcctgggttggtatcaattaatgtttgcaaatagtctctaatcctcttgtattgcttttctttattgcccaggaccttctctgtagcctttctccttgctctataagccttactttttgatatgtatgtgcctgtttccctcagacatctggccataaaagcttcaaccttccaatttggatcactccaaaagtcatcctcatatctttcgcttagccatgtgctgtcaactcgggtgcagtttctatgacttggacatgtgtggggagcaatcatctctctaaccatgaaggttttctcgctcccaacttgtgatgctctaatgaagaaatcacacttaaccttatcttgactacacttcacttttatcctatcagctttattcctggtgtacttataatccctcccttttacaatgtggtacgacttcaaagcctttctaaattgtcctgcgtcggtgaaacacatgcccttgcacaattggcttgtgtccatcatattgctctcgtcaaaataaatcctctgaacttgaattccttttcctctcctccttttccctggtggtggtttgttctcttcgtctgtctcacattcaagtgtgctcaatccaccatcctcactaggtggatcagacagctcacatgacatatcgtctatgtctgcaacacccaaatctacatcagcgtcctcaggggtatacaaatcatcaatatcagtgtcaccttcacaatgggtcattggatcttccctctgcctcttcatctcatttagtttctcaacataatcgaccttttcttgttcatgatccgtgtcaccacttgaaatgctatgttggtcgtctgccacgcctatcagttcagggttgtaatcaatgttatcttcctgctgagatgaccctgcaatgacctcaacattatcaatttttagaggagaaaagggtgttctctgtattgccttgaacaagtgtaaatcagccatcttgctcttgtcattctccatgatcatgtccttcacatgtgtttcaccttcaatcttggtcaaagtgccacaatagtatgtatcgctacttgtgaaaaataactcatcacttgcttcataaccctctgtttccaatagcctgatcaagttggagtagcatatattatttctctctatctttttctccaaaatatcagtgtttggtccacgatcatgtttgaaaaccctgagtgtccaatactcaccagccatcctatatcagcaacatatgtatatatataaatgttatttgcaataattgtttaaataaatcataggagaagctaacatatataatacaacttcatttaaaccaatataacatcggaaactatgttataggaaaaaatgtttaaatgattagttattttaatttataagtagtttactagccaattaagataccagtcacttaagttgttttattttgtaggtaagtaccactaaagacaagaagtcaatgcaaggggaaattgtcccaagtacaatctttgctatgttgtggcaataattcagtgtacaaggcctcatctcatctctccatcaggtatatgcacatataccttccctcctttgtttgttttcagtggcaaaactgacagctacatcttactacatagttggttgcaaccttacttgtgcaaatgcacacacattcagaaactaaactaattcattcagtacacaattgcagaacctctgttattagtgcatctatatagtgtgtgcaatttatgtaataatcctaattagtattgcatcgcatacaaagtgcactgattgaactttgaaagatgctccttctgggaccaacacacaggagagaagaagattaaagtagattacctttacaatccgtgcaagaatcaagaatgatggagccactgctgcttgatggctacaacagatgaccaaatcctgattagaggagagcagccgagcggccacagcacactgagcagcgctggcgaaatcctgattaggccgaccaaatccaaatcagggcagtactgcagcctgggggagggagggctgccgtatgctgagtgggtggcgacgctgccggcggtgcggcgctggaaccctcgctgcgtcggtggcgcggcgctggaaccctcgcggcttcagcttcgcgccctaccgcgtgacttcccgcgcggttcctttcgccataaccagagtttttcaggccatctgttttacagagttttccacgcatcgtgtctcggcggctccgcataattcttccgtgaatcgagtccaccacccgctgctcatgtggattgggttgaagacgacgtggcggcccaaatcagtgtaacccggtccaaagtgcaatggaaggtaatattacccggtgttatgtgaaaacatgggcctaggcctggtccatattgaaactttggctattaaacctggcccaaagtgaaatttactctaataataataatacttcagatgtcacgcacatttactgtatatcgctatgggtgaaatattggatatagttaagttcagttcataactatgcttttttttgtgtgtgcttattttctaggtgacgtatattttgcccctatcaactatagccaagtcgaaatcaacccttcactatgaaatcagatattctacaaccctcagctaactgcaatcccacctgtttaatggtgattttcatgatttcgacaaataagtgctaatccgatgtaccttgtacctcatgctaatctggtcgagcaaactcactctctttgtcgaggtcgaaggtggtgaggtcgaggaaccatgcgcgggtgtagaagctggttcctgtcttgggatcatactcgaacaacttggacgacaattcttttctcctcgcccacctctccttcgcctccgtcgacgtcatttgcctctcccgctggggctttaggctttcctcccgccgcttctgcttcgccgcttccacctccgcctcctcctcctccatgaaaaacggaagatcaaagccttcctcctccacctgctgctgctcaggcttcgccatggagattccttcgcggacaccctaatccataaataaaattaaaattgaaaccctaatccataaaattgaaacagatcggactgaaccaggttggaagctagaaagggcaaaatcctcctacctcctcttctccgccgccgccgccgcactcgccctcgtggagaagagggaggttggattgggcttttagttttaggattgggaggtagaggtaaaatggcctttacgaaccaggcccaatttatcgtttccgtaaggaataagttcactttggctcccttaaaaagtctaatatgtgaacctgaaccgcaaccctatcttgacccctactctgttaaaaccagtggttttggagagcagtttcactgacgtgcgtctacgtgaaagtgttgacctgatctgccattgacgtggcgcataggtggcatttgaattgaaaacatacacgtgggacccattcgtcattcacacgaaagaaaatatatatatggggcccactgacatgtggggccaacatgtcaatctatcccgtctttctcctccctctctcttccttatctcactcccccttcggtgagcaggggccagtgatggcggcgcgggggccggagtggcggcggcggagacatgggacctacgcgttggcccgcctaacgagtgcgaggccagcaccttcgcctcctccgaccaaatccaccgacgagcccacctgttacgtatgtcgccgccttatcctcctccttcggttggctcatcccctcctgtgagccgcggcaacggagacagcagtgcggtgctggcctggatgtgagccgccagcccgccaatgccgctattatcgattggggtggggacaagattgggaatcagcgggaagagatggaggggtggtgagagagagaggcggtggcgggacggagctcggtgccggagctcgagggtggtggggacgatggtgacgggagcaaataatctcacggacacggatatgggtaggcactacccgtgcccgtcgcgcccgattgccatccctagggacagcggtgacgggagcaggctggggcacctactgctcaccaaggcggcgtcggcgtcaacctctccgcgacatcgctgtctcaggctcctctctcatcgaccgaagtggggcggagcggcgaacaaggaggatgccgcctcctgctccgggctctccttcctcctcccaactcaccagccacgaagcttgccgcccgcggcctcctcaacgccgctcccccatcatcatcccgctggtgccacagcaggatggcgcaactccgcgctcgtgtaatatgtttatcaaggaaataaaaattcctagatttctcaaatatagatatcagaaataccatcgccaattaccgtcacttgattcatttttattccaactcgtagatacttaaaaagtactccctcggtcccataatttaagggattttgagtttttgcttgcactgtttgaccactcgtcttattcaaaaaaatttggaattattatttatttttttgtgacttactttattattcaaagtactttaagcacaacttttcatttttttttaatatttgcacaaattttttaaataagacgagtggtcaaacaatacaaacaaaaactcaaaatcccttatattatgggacatataatatttatgagggctgctatataccggtataccgttcggacagtataggcctacaagcagtttagccggacgattccttccgttcaattagtatgtcatgtgtattgtcatcgtgtctcaaaaggtgtgtcgtgtcaccccatcaacccatcatttgtcattttgtccacgcgcatacgcaaaaaaatttttcatgtgatagctaagctagttcggtatagcaagtagtagcctacctagctaccaggtgtcaaatctgatactaggtaggtatcacatctgataccgtcggatgagcatcaagtctattatcaggtatcatgtctggtaccgagtgggtgccatgcctcataacaggcatcgtgtgtgataccggttggtatcaagtaccagataaccggatggccaggtatcatatttgatacatggtgggtatcggtcttgataaacgatacctgctggttatcaatcccagtatcatagctgctatataccggaattccattcaaaaacgatatgataccggttagtatcatgcgtttttgccacatatcaggtgatacttacgaggtatcagatgatgcctatcaggtatcaagcgattcttaccacgtggtgagtgatgcttgcgatgtatcaggtcctgatacctagccggtatcgggtgatagctatcaggtatcatgcgattctaccacgtatcaggtgatacttgtgacgtatcagatgatacctatcaggtatcatgcgattcttaccacatggtgggtgatgcttgcgatgtatcaggtcctgatacctatcaggtatcatgcgattctaccacgtatcaggtgatacttgcgaagtattagatgatacctcatgcgattcttaccacgtggtgggtgatgcttgcgatgtatcaggtcctgatacctaaccggtatcgagtgatacctatcaggtatcgagatgatacttatcaggtatcatacgattcttacaacatagaagaggtatcatgcaattcttacacgtagaagataattctaccacactccatagccaaccatgaccaggtcaacaagctctttgcaccccgtcttgtctctttgctcccctgaagcagcagatagataggatgaaggcccggactcgcagcgggatcgacggccggcgacgaaggcggcgactggagagggctcgcgacggagttggggcgctggcgaagggtgcatcggccggccacgcagatggagctggaggtgagtgttaacagcggccccgtggatggtgggcggcggtgctggagctgcaggcagcaatccgacgaccacgtcactgtcggccgcatcctccgccgtcgctccccacgccgggctcgtcgccgcggccacgtcctccgccgtccgtgcctaacgccatgctgaagctcgtcaccggagtccgcgatgccgggggctcatgggggcggccgcgtcggagctcatcgccagcgaccgcgtcctccgtcatgcacacccatgccacgcggctcgtcgccgcggccacgtcctccgccgcccgtgcctcacaccacgctgaagctcgttgccggtgtccgtgatgccgggggctcgtcgggggcggtcgcgtcggagctcatcgctggcgaccgcgtcctccgtcatccacacccatgccacgccggagctcatcgttgacttagttgcagcagcacgcgtgagagagatgttgtagaaagaatagctaggtagaagaagagtggattggttggtgtatatgctatcccgtcgggacggtataccggtatttagcatttccgaatatttatatatacattctgaataaataaattataatatcacgccaaccattttctagttggggggatccaaagtgaacttattccttctcctgtgctagaattgggtctacttcgtgaagggctcaacccatctacagcccatacatccagcctctccctctcgtttcctctctggatcggtcgatctccacggtggagatggtgagggcttcggcggcggcggaggaggagaggaggtgggaggctcttgctatttgccaccatggcggacgtgtttgatcttccattgttcgtggaggacgacgacgaggatgcggcagcggcggcgaagcagaggcggcgggaggagagccagaagccccggcggccgcggcctcgggagccgtggtttctggacacgccggagatgagggagaagtcggcgaggcatagtgctttggcggccaagtattgggagcacgaccccaagatgggaatcagctactacacccgcgccgttttctgcaacctcaccaccttcgaccttgacaaggagagtatgtactctacacctcaactagtatgttgttattatcatcgcatcacactgcaagattactgggatgatgttgttcctataattattcgaattgtatctatctatctattatattattaaaacagttttgaaaggagacaccacgttcgctctgtggaggctagaaattcccacattaatcgtagaaaaagaaaaatatttaaaccgttagatcatagtagatctagattacaacggttgagattgattgtatatatatgtaagtcctattcagattttagaaagatatagcacgaacaatataaatcatgtttggactcctgttcatagtcggattcccagccggacaaagcagaaaggttcttttgagctgattacaacaagctcttaatgactagcacatgctaattttaaaaatatacttgcaagttatatgggttctcttttgctttcaagtttctaatcttaaattctaccaagcaccttttagatattcaaacaaataagaactaagatgtacacgacaaattaaatttctacagacaaatcatccctgcatttttatatgagcatcattaaaaaaatactcccttcgtttcatatgataaatcattttgactttggtcaaaatcaaactgcttaaagtttgaccaagtttgtagaaataataataacattttcaaccaaagacaaatatattatgaaaatatactcaattatcaatttaatgaaactaatttggtgttttaaatattattatatttgtctacaaacatagtaaaacttaaattagtttgactttgaccaaagtcacaacaacctataagctgaaacggaggaagtacattattaagataagtttaaaattagacatcacgttcgccctataggtctataaattattttcacgaaaataagagagaaatacaaagtctacatcattagattataatagatctagactgtaagagttgagatttaatcgaaatatgtgtaaaggcttgactatgtatttatgaaagagcgtggaaatagaatttgacgtgtgctctacgcaataccctttgaaatcaaaatcagattagcaaacttaatttactgacacgagacaatcacgtcctgtacgcataaataaattagaaattgtatatacgcacaattgacacgtcatgtacaaaatcatgtgcatggaaggcaaaccagctggacagccaaactccttcaaccatattcaagttttgcactatcccgtgatctctagagagtagagacattatgttttcttctttaaattttcttagtaacgagcttccctaatagttttctctatatttaggatccatatggcaaagttcttactctgaggatggggcagagctgaaaagcggtaaaaattaccatattaatagtaaaagagtgaaatatttacaggatctagattttaatatgatgcatattgatcgatatagttttatacagataaattatatctatctattatattattaaaacagttttaaaagaagacatcacgttcgctgtagggctagaaatttccacattaatcaaaaaaaagaaaaatagagtccatgtagaaatacaattcagaaatatctaaaattcggaattaaaaataatcaacattgatataataaccaaatacaagattaattaaaatttgaaataaaaaataaaataaaatccaaaattaaaaaaaagaaaataagatttcaagtggaaatacaacttaaaaataacttcggaattaaaataagaaatattaaaagaatagtccatagagaacacaatacgagattaattaaaatttagaataaaaaaataaaataaaatccgaaattagaaaaataaaaataagagttcaactaggaatacaatttataaataacttaaattcgtaataaaaaaataaagactattgaaagaggagacaatgtagaacacatgaagagattaattaaaattccgaataaaaataaaagaaattccgaaaatagaaaaataattataagatttcacgtaggaatatgatttataaaaaaatattggaatgaaaagtatgaaattttcaaacaaaaatttcatctagaacacggatgacaaatgacaataaatattagagaagcaacatatctgtaaatgagtagagttgagatggttgatgggacatccaaaaactattaacaaaaccccaaatacaatcccaataatgattaaaaggagagatgacagatatgtcgttaagcaatacagtcacagtggttggcaagacttctaaaaagtaaaaagtaaacctcaataataattatgtttgattaaatctcaatgacattaaagatgggaggtagcgagcgagccgtagatgtgtccagtagcaaaaccgttgatggtttggtgggacttctagaaagtaaaaaatgaacccaaatgataattatgtttgatttttaaaatatcagtgaggaagcagccgagccgtacatgactatagtggcgcgtttgacgagacttctaaaaattataaaaatgaaacccaacgaggcaataaactctaaaaactataaggtccaatttttaaaggttcgggacttctaaaaagtaataaaaataaaccccaacgataatcatgttcgattttaaaatctgaatgacaataaagaggggaggcagcgggtgagctgtagaagagtacaggcagtgggcgagccgtagaagagtacagtggcaaagccgttaacggtttggcgagacttttagaaaataaaaaatgaaccctaacaataattatgttcaatttttaaaatcgcaatgacaataaagagaggaggcagcaggtgggctatagaggagtatagtggcagcatttgacgagacttctaaaaattataaaaataaaacccatcgagacaataaactataaaaactataaggtccattttaaaaggtttgatacttctaaaaattaaaaataaataaaccccaatgttaatcatgttcgattttaaaatctcattgataataaagagaggaggtagcgggtgagccgcagaagagtacaatggcaagccactctgtttggcgggacttctagaaagtaaaaaatgatcccaaataataattatgtttgattattaaaatcccaatgacaaaaaagagatgggacaacggacggatcgtagaggagtatagtggcagcgtttgatgggacttctaaaaattataaaatcgaaacccaataagacaataaactctagaaatcataagatccaattttcaaaggttccaagcagaatgaatagaaacaatggtagattgagccaacaaaaaaataatggatgacttttaaaaactataaaatttaaaacacggggatgataaggtttggtccttcaaaatcttaatataacgagatgactatttaataaattttaagtaaaatcatattaaaagtagataaatttatatagatgctagccgcgcaattgcgcgggccacccagctagttgtaataataataaaggtagtatgtggccgtctactaatctctagccatatatattccataaagcaatgcctactacgcaggatcaaattgttgacacctctcaaccaggaaatccgattgaactcacacacagcgaatggcaggtcaataattttcaactacatatggacaggaaacaacgcaataagcaccagaaaaaaattaatacagttcattaaatgataaacattttgttcacattctatcaaaaatagattagacaaatatattcttaccattccaaccctaccatggtccatgtatctgcttgggagctgttgttagtgaagaaaactgtttccttaagattcactatctaggtgggatcctcactaactggggaaaattgattattcctttcttcacatgatcattcccccctccttatgttgcaattgatcacttgaaggcagttgactatttgccacttctggtatgaaatggtcgtctgtcccaattccttcctcacctcccatgcagcatcaaactgcgatggtgactgagaagaaggaatttggttcggtggcacaatttcaccatcttgcccttgatagtcagtgttaggaccaccagctgccatgggccaatccacatgctcattgctaggggccttgtttctgcagtgattgtgaattagcggtgagttgtatttcttcttggagaccttgcactggagggcctagacgctggccatgagctctagatgcgggtgtagaggcataaaatgtttgactgcttaatccagggtggagggtgaggagggaaatcacggtgctgttgtctgcccacgcatgctacgtctaggaacgctatgtcagggatgaagtggaataccaggcggagatgttctagtttgcctcaggtcaaagtcaaacacagataagctgttatatatatgatgaattagacagctcatactggctttgctaagataagcagggattggcaatccaatcataccccttggtggtaaaataccagaatttaacttgcatgcagtatgctattgaagctcatagatctatttgagcaaacggacaggtgcatggtaggaactttctcaaccatggtagattaaaaatggctgaaatactgtcccaactgcaataatttgattcctgaaacagctaaaataattttaacaacagctcaaaacaaaggataaactctatttaccctatgcagacctatgtcctctagagacttttgtactccagagacattatctcgtgtatacttcagttaaattcttccctgttgcaaactaactacattttcatttttctcagcgcaatatggtccaatgcgctttacagattcaattatcagagaagaccacaggttgactggctcgttaaatgtactttcgctgaaggtgaaatcgtcagatgttggttaccctatcaatctatatgggactgtgatagtcagagatggattagattttaactgcaacttcatcttccggcgcaataggaacaattgccaagttatccagtcagaggtgtttcaaagaatatctcttaacacttccaattttccctatttcacatgatacattgaactaatttctttacagttctgtacagttaaggcatactgaagctagctacttttatgctgtctatatgcatccaccgtacccctagtttcatatgaaataccaatacttatttctttttcgtggatttgaatattaagtaacattattgtattatactttcgttagtcatgtcatttaaataataacaatattatattctatggataattctataatttatttttatataaagcattagtatgacatattgctaatgtcttatgtaatttttcttgcagaatgaaaatataattctcacgggcccaactagaggaattgttttccatgatatcttttttgagataaatttgaagattaaggaatatgaagagtgcaatgacaaggaatttagtaaagggttgcttgagatgaagtttcacactcgtaagtctaagattgtgagtgaaacctttgagagtaggctcagtgaggtggaactagtatctgcttgtgttaaggaagccctggagggcactgttgagatcacgattctgtcaggacctaaagtttttcatggaaaaattagtgcttgcacaacagatgtttcgaattatattgtactgtatgatagcaatgtttgtggtgcaacctcagttggggatgacagagttatgcaactgctgcgacgtgttgtagcagtatcagcaaatgagatattgatactgaatattcatgcccataatattcatcagaatgataacgtatccagtcgcactttgaggttcactccacttgctagaggggcagatgaggaggtgatcaattgcgatctttacaagatgcaggtgaaagttgtttggtcagtcttcaagggttagaatagaatatactcccttcatccaaaagtctaagacctattttatttttttgtttttaagtctaagtcatatttatagttactatgtgctatattaaaataattaaatgctagtcgaggtggaaggtggtgaggtcgcacaagctatctactccctccatctcataatataagcgattattttaaggatggaaaaaaactgcaatacccatattaaatgtgattttggttgtggtgagtgggtagttgggggttaaaataggttttgaattggagttgatgaatatgacacaatcttttatactgtagaagtagaagggataatgggtgtgtttggttgcaagtcacattttgccacagtttgccacgcctaaggttaggcaattttgacaggtgtttggttgtagccacagttgtggcaagattcccctccaacaaattgggtcccacgtgtcaatggctcaaaaaagtgtggcaagattcccttaggcttagtaagttgtggctaacaatttgatcacctcaccttaggcaaggtgtggcaacttttgttggcaagtaatggtaaagtgtggctggaaaccaaacagccccaatatctcttatattactagacaaaggggtaggggtagacgtcttgggatgtgttgttgctgcttcctcctcgtcttgctgctccggctccatatgctttctctgatgccgggtggttctgtcatggtgggcaggatatgggccttcaggtggcaggcccaatcctccttttttttttgtgacacctataactcacgtaatctgcacagaaaacagtaatgcatgttcaagcacaaaataaaaaacaaaagtacatatataacactttccatcatcagatcagagacaagtaaaagaaagaaacttacttgcaccgaattaacagtgcatcaacatcatcctggattacattacattacaccatagtacagtacacatgactggattaacaacacacaatgacacggcagacacaacaaattaacaaacagttcagcaaagctgatactaataacttcagcttaaactgtaaaaactaaaaacaaggcttagggcttaggctagttttgtgccctgagtagtactctagttatgttacagcatcaacaacaacccatcactcactcatattgacagctaacagcttcctctctcttttcttttcatctctctagtgctaaataaaatttgtacagcagagtacgtatactcatcttcttcttcctcctcatctttacaacttcttccttccatattggattagcacttgcacacatcactcactcaatccatcatccatccctgctgcctgcggcgtgctcctcaactacataatatacactctccagtgcaagcgattttaagatgcgtatttttattatttctcaaataggccatactggcctacgtttttagttgcaaaaaacgaaaacgtgagtgcaaaccaaacctagccactgttagctgtacagcattgcttgcccttcaggcggcactggtgcatgctggttgaagccctagtcgcttctctgcatttgcgtcgcaacaacgaatattaaacattgttagtccctatggcagcaagaaacaatggctgaatgacaataagacagtacaatcatacctccagcagcaacaagcttctctacgcgtgctactatgtgcttcccataggtatacttcttcagcgtgttcagatgtgcttttatccttgtaaggatcgcctccctctgctgatcatcacaagtctctagcaccttctgcaccacatagtttgcaaactgatctttcatcattacctgcaacaggtgcagcgcagttaacttccatcaggtctctaaaatcagctttccatcttacaagatttagcaaacttgtagctggacaaatcttaagccaaatttggtttgtataagttttaagaatgcaaacctcaaggtgttcactctcattagtggatccaagcatttcactgatcaaaatctgtcgttctacaggattcccaaaggctaagcacttctcaatgacatttgaggcaaacttttgctggctcatttgaactatttgtccaattaacttctcgataatagcagatctctcatgtggttttccgtgctccagtacatgctgtaaagtagtgtgttcaatgttaaaacaaaaaaagagtgaaaataaaataccttcaaactaacataggatgccaagattctaagaactaagactgaaaagtgaagcagaattcaacattagcacactttttttttagataatggaatgcattctggtctttacttcagagaagctacaaccaattcttacagagtttacagggtgaataaccgtggattacaaaattatggcttaattaaaaactagaaaaactactaggaatatcataattgttgtttcaacaacagcagatagttagcagtaaccatccattcatttacatattactgtgacaggacgggtacgatactggaagatcaggaaaaaaacaacctaaagatgctactgcaaaatcagaaaatggtctacctcacttcactgcaagtcaccattaagaaagcataagactagaaatatctaaatcttaagaaagcatcaaacaactagaacacacatagtaattgcgaagcagtaaaatcattttgaagtaattacgttacactatgtaaatggtaaaacaatctagaagtttggttaggttcaaaaggtatatgatacaaatcatacaatttgcaacaatgtcatggggcagacctgaacaacgtagttgccgtattgatcttgagccagcaagcaaacggactggagaatctcatccatcattatttgctgtgttgtaggatcatcacaatgctccagcaccctctgggagtttcacatgaaggatgacaagtgagtttgcatattaacatctgtaaacctcaacataaactgattacacgcatattatatgcatacctgtataacccgacaaccatatggatgagtggataacatcacaacttgaccatagaatgttgagacaatgaactggatagcatgttgagggatgcattctatgcatttctgtattacatggttcccattttgatcacgtacacagcgcatgacgtgtccatccagctcagcaaccattttagtctgctgatctaaaccaacaacctctatagcctgcatatatatcatccatgacatcagattttgccttccttgatatccttcaatcatttatgcattcatacacttaacaaagggtctgtactttgtatagataagagcaagtcatgactacatcaatgcctataaaaatatttcctgaaagtgttccatagtttggtactgttgttattggatgacagagaatacatctgaggtgtcttacatcagaagtgaggaattgtaccattcactgataaaaatacacacaacctcaatcagtcacgacaattttgttttgctctgctcttccaatggttggttctgaccatttatgtatttgtataagtaagcaaaaggagttgtttatggtccttgggaagtattgagaggtagaacaagttttcagtgcattaaatagtaaatgcaactaggacccattcaaaagggcaataacacagattaatcagataaaaaattccaaaaaagcaagaactcttaataacttccaaggttaaagaaaagatccagtaataaccaccttctgtataacccggcatccatacatctgaagactgagagcaagaacacgtccaataagctggtcggccaattcctttatctgggtagggcttccgtgctcaaagaactagtcaaatgacaaactataagaatatttatcacaaagtaacacttgaagagattatgtttttccccttaacccctttaccttctgaacaacataatttccaaatacatcggtcatcaacgtgagagcttgaggcatgatttctgaaaagaccatgtccttctcttcagtactggccgtttctagcttttgctgtatgaatcggcttccatattgatcagcactataagtttgtcaattattagtagataaaccatgtaacatcaataaggacaaaagcgttgtcacaatcatagttaacaagagacagatcagatggaaacagtcacatgtcttgatgtcttgtactaatgtttttacatactgtagcacatgtcaaagcatatctctaacattttcttccccggaaatagatagaaacatgttgtaagaaataaatggagaacaaactagattaaaccaaatcataaatctacccatattattattcatgtcaagccttttttggttgatcattaaaaaaaaactagtcaaaagcattagtagccgcgctgtacttgagtactgcaattcagcaggctatagaagctacaaggttatgaaattgacaagtgtacctgaactcaacaacatgaccagcaatttttgagagctcataagatttgcttttgttgctcttgaattcctccaggagtgaaggcatcatatcgatgttcatctttccacctaggtcaggattccatgaaccaaaggagccaccaaagtttcttatacctgattgcatgcgcatgcggcgttcaccatgcctaagtggactaccaggtgcagcaggggaagagggaagaacaggactcatcaaaggacttccagaataaccaaggccaaatccaaggtttccatagtagccacagttcttctgtgactgaagcaatggactagcataagctttctgaggaccaagtaaatccatataagaacttcccagatggccactggccatgagaggatcatcacagctagctgcgagttgggcagcaatctcagctgcctgaaggtactgaatatatgacggatcaatggctgtttgaagagaagttgctgcatttggacttccaattccattgtaattcagaaagttagatccaccaaccaaattctgccttgaagataaagtcccacctggggacctagaaccgatcctaggagaagcaaagcctgatccagcagacagattgtcaaacgatgtgaaactagcagcattaatttgatttcttatcatagaagaattaggcgagtttgcagagtaaccatcaggtgccttaaaatgtccttgttcgggatgtttcatataggagtgttgctggttgccatttgattgatcaccctgacgatcaaatagaaacttacggacattatcaacatcctggtagagctcagactgggtcacagtttgctgtccactagctgctccagatgatgataaattcatcccagataaagcagctatcagattatcagattcaccaatagcagacgaacttcgacggaaggaagatgaaccaccattgttcttcttatcatcagcactgactttcacaccaattggagggaggcaaggactggggaccctcctaacaagctcaggatctggagatgcgcttctagaaagagatgatcctaaaagagaggcatatgtatgtgctgatgaatcattgttctgaacttcagccaagctttgtatattgctgtcactctgcagaccacccatagctctactagtctcacgatgcagagcatactgtggccgagaagaatccagaaagtcactaatgttgcggtcggcgccctgcttacccatgtccagctgatacgagctctcctgcatagtatgcaacaagttgtacagctctgatcaattaccttggattggataagatgaaactgaataataggaaaccaacagttcacaaaggcgtactaaaatgcttatgatcagcaaaccaagccaaaaaaaacatagaagttgtgaccatcaataagaacaattaagcttattaagtggttgaaccatattgggtaaggtggactagtgagacagcgaggggaaatggtagttgaacacaaaaacattactacatgtagcaataaagtcaacaaatgcacacagctgcaaggtcaagaatatcatctcccatagcatacagtactgaatcaagatggacatatactactgaaaaagtaagtaaaaaaagaagaagaagatgatgagatctttaattcatcaaaagggcgagcaaacaacctggaagatactggagaagctcccctgccgatcgaggtcgatcccgggcaaccccacgagcccatccccttgcgccgccgcggccggttgcctccagccgtcgccgatcccgccgaggacggaggagcgaagacggtgctgcgccgagcgccagtcctccttggagagcagcggcggcgggaggcgcgggttgaggtgcgcattggagtagtagtagctctggtacaccgggtcggcccggagctcatcgtccaggaacacgtcgccggcggccgcggcggcgctggccatcgcgccctccaccgtcggcggcgcggacccgctccggaagagctccatgtcccggtccgccgccgccgccgccgccgcctccccgcgcgtcgccatctccgtcaccatccgaaaaacccaaatcaaaaaagacgacgagatctacagtgtctcaccaagctaaaacccccgccattacagtcgcaagaaagatggccaagatttccacccccaagaaaccaaaaacaaaaacagaacaaaaaatgggcagcagaaacggatcccggttgctcagagcgggcgaatcggagaagaaaggtccatgtgcgggtcgagcaggtgtacggattgcgcgtaatggtgcggatttgggagggattcaagctcccattttagtttatttattcttcttttttttagctaagctaagctagtgagagagtgtgggggaagagaagagaagagaagaggcgagaagaagaagaagagaggaggaagctgggctgcggctcagttaagtacaacggccggagtgatttgggccgtcggatttctggctggatgttccagatcttctggagggtttgggccctagggttttgaggttgccacccttgccattgctgagagagaaagagagaatgtgtgtgcacgaatggtggtagcaagctaggtcaaggcttggttgatttagaaaatggagatttggttgagcagcgctcatgctcttcaacgacatgcttccaagaaaatgctacaacttctttactccgattcaagtacaactcgtgtactgtgtaaatttacgagtaaatttttcataaaataataatatagtggacaaataagtagatttttttctaacttattcaatgttttctttccaaattttataaatcaattaaaaaataaacttttatatacggcaaaaaagattacccacttatattcttttcgttgtttgaatactagaattaaacttcccatgatatattgaacatacatattctatgcaaaagtttatttggctgagtgaaaagatataggttataaccactaacccaatttaaaacttgctttttttaatgataatgtgaaaatcggaataaattgttttttatgaaaagaagagggttgactgggagacaaaagaaatcgcggacaagggaagaggaaaaaaaaggaaaacggtagcacttacttcttctagtactctattagtagtgcctgtttattttgatgtcattttcaactataccattttttcttgataaagttgtcaaaattttagctatatttagtttgttgctaaattttaataagtacatatgaaatcttggcaaaattttgacaaccttactaaattttggcaatgccaaaacttggtaaggttccaaatggtaacaaagtgaacaagcccgtagagtagaggcgatatatagccattatattcgtaaaataaacatttactagttattatattttaagatgaagatattggtatatataatactatagttagagcaggtacaatagcaagctataaatcagctataaccacgtatcgagaagaaaagagaagagagagaagaaagtgggctgcagatttgtagccagctgcaacacggactccaagatgttatgtgtgtatgagaggtgggacagagtattaatggtgtagtatatttttatagttaactattgtatgaattgactattagattagctatagataatttggatcaatagttggctatactattaaacttgctcttattatactccctccgtttcgaaatgtttgataccattgacttttttagcacatgtttaaccgttcgtcttattcaaatttttttatgagatatgtaaaattatatgcctacataaaaatatatttaacaatgaatcaaatgataggaaaagaactaataattatttaaatttttttaataagacgaatggttaaatatgtgataaaaagtcaacggcgtcaaacatttcgaaacggatggagtagttatttagttattggtggtgttcttgttgcacgagtcagcctaagtggccgtggcatcccaaacggatgggatggcacgtgactccatcatctcctccagagacttctttcctttgtgtacctctttgctcaagtgctcatctctctctctctctctctctctctctttctcttactaccatccattccaggccttgggctatcatctgcatctactgcacatcctgtccggcccggcccactagataaattgacagctgggccttattacactgcagtaaagctgttgccgtcaccttgttattttttttccttgtaataatggtgtggccaaatgttgtttgtcgcaaaacatgctagggaggatgagtgtagaggaacaaaaataccattgaggattaatttaccgaggcaaatgtagggaagaggaaaataaagataatcatccaaatatactacctcctcctgcaaatagtttagctcaattttgagctatacaatgtc

SEQ ID NO: 6093 - DNA, 5243 bp, Oryza sativa
  unsure (1)..(5243): unsure at all n locations
gttaggtcaatagaagcttctagaccagatcgcctctatgtgaaactatggtgaatttggtttacttttgctaatacattgcataaggattatcatgcaagtgctgtgtaaatacattacattctattccattatctaaaagaatgcatcgcatttcttttcttcttcgtacttcacacgaaaacaaggattcttggatgaaatattctggttgctctcgaagttactcgccgtcataggctccagcttataaatttatggattattcctgccacaaactttaaattatgatttttctatatatattctgcattaatataatattgcttagataacttgttctaaaatacttttatgtttataatatgtaatatttaattaatccttataagcattaattatccatatatccaatcatttataaagaacaaaaaccataatcaaatgctgagagatatatatcatatttttcgtataaaacttattacctctagataagtacctcgagattctaaaatttgtgtgtaaaattttagtacctacaaatattttctcaaacgtaaaatttgtcattttctaaacattataattcagaactatttgactacatatatgcaccaagaggtttcttattccaagtatatacatgttgaattgtgcgtgtgcatataaaagtttgtgtacattcttgaccatatgaatacttcttacctttcaaatcaatatattgaacgcaaaaacggaaaaacctaacaattttatttcctaaaaaatacagtagtcaagcagctgctatagtcagcaaatatagttagctactttcatcgctcacataactcatcaatagattatacacaaagttatctcctcaatagaccgaggatatagatcatactgttgtcagttgacaaggttggcagccactcttttctcatttaggagtatatgtaagattagtcttgcctaacattctccagtcatacgcattccaattaatattgtgtcttactccctccgttccgtaaaaacaaatatagtacgtgatatataactttgtagtattacgaaatattaggagcaatcgtttctattttggcttgtaattagagggcgtttaattagctactcaaaaaaaatactccatttgttttaaaaaaacaaatatagtagcttgatttataatttacaaggatcgaaattaaggagcaatggtttctattttgacttgtaaccaaaggacgtttaattggtcataaaaaatactcgagatataacctattttattaccgtgaatttagacagagatagaaaaaccattgctccttcttatccttgtaataaatcaaactataaatgaacccaatcccttaacaacatgtagtaccatcataaatatatcattataatcatggaatgacggaatatgttagtacataatcttaatagccaacatttactgagccatctttatgtcatatagtacactaatcatctactaaagaaaagaagaacaataattattgctattttaattccttacaatatttttggccaccgattgaaagtgtgtttatttgacccattttgtcatcctaaattagtttggtagtcacagtcttcaatcaacccgagttataattccttgtcctctcctccaccgtaacccgaacagctcttcttgtcaaggttaacaaaaccgtatgattatcgtacgttatagtggttatcacgtacggtaatcttttcaactttttaaaaatacggtataccacgctgtaagcctgtaacgtcgtcccaaacaatttggcgaagctaggtgaggtgacgctaaaccccgcttcttgccgacctgagagtcggagagtctcggcacgacacgacgagaacgatctgataaacactcgaccgcaacgtccccacacgaaaaacgtccagggtcgggtggggtgaaccgtgtccacccaccaaactccaccagtccacccccatccatccctgactgtccgactccgagcccatcgcttgcggtcgccatcccaccaaccacccccctcgccccacgcggcccccacccgtcgccttctccaacgaacgacgccacacggggtggaagaaaacccgaaaaataggaggaaaccgacgggggaaagccgcaaaaaaaaaaaagtagagagaaaaccagagtgagctgcgcagctcatgacacatgatggtgagctacgcctacgcgagctcggagctcagctctaaccccccggggcccccccccccccccccgggccccaaaccggggggcccccccgcgacgnccgtagnctataaaagccgctccacccccaacgagcccaccagctgctctccaccaagagctgctccgcccccctaccccgcaacccgttgctttgttccgcgcctcgctttggtcttcatccgcctcagatctgattcgttctaggttggtctggtgagtggtgcttggcgtttttgttttttgttttttttttgttttcgtgtgtgaggggattgggatgctcacgaggtgtttggtggtatgcgtgggcggcggcggcggcggtggcaggggaagatggcgatcacggtgaggcggtcgacgatggtgcggccggcgtgggagacgccgcgggtgcggctgtggaactcgaacctcgacctcgtggtgccgcggttccacaccccaagcgtctacttctaccgccggggccccgagggagggggcgcgccggaggggttcttcgacggggagcggatgcggcgcgcgctggcggaggcgctcgtgccgttctacccgatggccgggcggctcgcgcgcgacgaggacgggagggtcgagatcgactgcaacggggaaggggtgctcttcgtcgaggccgacgcgcccgacgcctccgtcgatgactacggcgacttcgcgcccaccatggagctcaagcgcctcatccctgccgttgattacaccgacgacatctcctccttctcgctcctcgtgctccaggtgagctccaaatttctagtagcaagtacagttagatccaagcacaaaatcaaacgaggttagagatagctttctggaagtggagcgcaaacaatgctttgcaactgcagctgacaactaagtttggcagtaagccattaattataacattttggggctgattgtatagctaggtcccatgttggctgttgcactaaatgtttggggctgagcttagcgggtcacctactctttggttggctttaattagctgcatcagatgtacggttccatccaggcagttgatgtctttctgttgtgggcggggtctatttttggtttgatgtttatgcttattgtgatagtttagtaggggttgtgtaggaattatagaattttaaaacaccataattcaatgccaataatcagtatccactaaaaaaatgaagtatatgcttcaccttgactgtgtcaaagcctagacaattttgatttgtccagagtgattgtatcatatagatttgaaatgtgtttttcacgttggactccacattgtcttctatgttataccatctaaaagtggcagcagcgtgcatcaatttgtgcattaagagtaacagacaacaaaagccaccggtcgtgcgggtacatccctgccaagcttgagaaactaatactagaggactactttattaagtagccctttaatttgctccggtatatccctatatcctgtcctgaactactacacttatggattcatgacctacagatatttgaaccgagaagcttatcccatttggagctttttaacattggatttgcacgtttaaccctgaagcctttgttgaatacttaaaactttgtggcgatgactatatatattgctttgatcacttaagcataagtgccgatcattccatgtcattccatgttactgctgatatttaagtgttttgatgccagaagtaatggttagattgcattaaaacttgttattagatgggaacaattttagtaggcactaatgtttttttttcttctagggcctctatagctcccatatatggttgattggtcaatctcattgttccaaaatgtcaaccatttgccccatgatgtagacaggaggggacttaattgggtgtgatattaacattttgtgatagttagtctttgactgacaatagctttcttttgcctgttcgataactggagcccttgtcctgtagagcctcatgagctgtttatcctttgatggatacatcattcaggttgcacgttcaattttgtcctaaatgaaacatgtctgatctgctcaccttctggttatccatcatcagctgccctttcatgctggaattcttgtacaataaatcaattaggttgaatgaatcattagtcttacgtgagacatacttgactttgaaataatatggtacagtgtacaacacaacgtgttaatggaaagaatttatttgcttgtaagtctagtagaccttaggagctaaaattttatttagaaaattgttctaataattgaggcacatgctaatactttttccttgcaactgaaaatttgtgcatgcactttccataacataaaactgggccaaaatttacaaggttacaaaccatagtttcattcaatttttttactcgctgatatgtcagcaaccatgactctgagtagtcttggtgcactgcatgttggttggtatggatctgagtgttaactggagcatgttccatctgacaagtttttgcttataataagttaatagatagtactgttttgcgccatattgttccaattttagaagttatttaaaccttgatttcctctcttttatcaactctagttgttgctaacttgttgtaacacctgtttagatggcaagctgacttcaattgtggtgtgcatgcatcaaccttcttttttttgtgggttgggttgaccatggaatgttgcatcctgagctagacaagccatttgcatgtagtccttctctgttagttgccaataaaatgtcttgcagctgtggcaaaggtacttttgcattgcttggtagagtgcttgtcaattgttggatcctaacaccttgttaatgtggatctgaggcctgcgaatatcatgcatcccaaccccaaaaaattgtagagaaaattatgttactctttatctagtgcacaattggagcatctcttgtcatctgtagttgattccttctatgttcatcagaaacttggt

SEQ ID NO: 6094 - DNA, 15739 bp, Oryza sativa
agagcaagtagggcaccagtaccacactaccactgaggaatacaccaacgcatacggctaaaacacatgcaagtacttccccgagaaaacaacactgatccagtacgtttgtcttacagagcaacagtgtcacaacaacaaaagatgcgtgtgccaaatgtacgaggctaccttatcggcagcgacgtatgcttgaaaagtataagctctcccatttgcagccgatgcaactccatcacgatatgatctacaggtatctttcattgaaacaaggagggaaaatgtatgtacaattgcgtgctggcaaagctgaaagacgataaatttccagtgcagcgtctgcacgctgcagtagaaaactgaaaaaaagggggggggggggggggaggaacagggaaatccattttacaaggggaaaaaccttctcttcttgaagtaccagatgaagcagcagaatatgactaagccgcatacgcctgtaatgacaagcgtccattcgaacgcatgtggtacattaaacaagtccacctcaaagttcatgccaaaaactcccgagacaactccgaagatggccaccacgaatgtagccgtggtcagcagcagttcaaattggatcagttggtttcggacgttgtcctgtaagaacaacatttgtgatgatcatgtgagcatattttcttgtccagatagagagtgaccaaacaggctaaaagaaatgaaaaacaactttcatttctcttacatactgaacctaatagcagttgcacactgctaatatcagcaatatgaaagtctgtgaaatcatatctctagccgagctactaaaccttgcagaaatatatgatagacatgatatctggggtaaatacatggtggaaacccatatctgtaatgatgttagtctaagataggaccttcggtttattcttaccaacaggccctttgtgcaaaagaaataccaccacagcagaatacgattgtgcatcctataataccaaccagaatattggtgaataaggggcatatgcaaacatgcatgttgtacagaaactgaccactggctgtcctctgtaatagggaaaaaatctggcctacagacatttgaagttatagtgaacagatgtagtgatacagaagatctttttgttgacattgaaaataagctaaccacatgctccaacagcctgtcaactgttgtaatcttctgacatctgacccaacttacaatctgtctactgtctcaccccagtcccaactttaagttaatctcagttagcatgttaatagattttcattagcttaaatggaactaatgttattgtgagcggattatactttatatttactaacttagtcttactgtattatcatgcatcctccaaaatgctagggagtaatcagcagtaacgttgtccaatattttttctttagtacaatctatcattcccatttggagacacctttttagataatatttggagacacttgtgaatgtatcttagtttgtcttgtgcctttttctagtcaactgtaacaactaaatgacgggttaaaagaagctatatatatgtcaaagtaaacatagtatgatggtcagataattgtactcctgattccaacaattatgcatttgccatatcagtttcaagaatacacaaggcaagaggcatacggtttactttgagtatagagaaattaaatagcagtttcagatgagaagcaagcactcgcagtattggataagaaacaagccaattctgttgtgagattggaaattgatctgctaccaaattaactatcaagtatgaagaagatatttggggactataccagttgtatgttgatgaaatcctctgtatcatcaatatactccttcagctgttggaatatatatatatatatatatatatatatatatatataaaacataaaatttattagcccatgtagttgtaaaaaataaacagaagggcataaaaagcgaggcttcgtaccgaagttaacttgctgagggtgtaatcaatgaccacgaaataagcctctaacaacatttcaagttcttctatgctgtactgactactgtctgcactcttgaagctgtcatgcctacttctggcaaaactcaattccttctcaagccttcgagaagcagggggtgaggaaactggcgaaactggagcagagaaagatgaaccaaatccactattgcccatcccctgaaacgcctgctcctctagcaatgatgcttccatcctcctcttcttctctgtgaggtacatttcagccatatcaccatcgtcgtccatcagctgctctatctcatctctgaccttaatgggggaaatagaccaattattgaaaaccaatttaatgtttgccaaaaacaaaactacattgacacagtccatttaccttttggacccttctagtcaatgcaaccagcttactctttaggcgccgcacacgttccaagttaagggtactgattttcgttgtcaattcatccagtaaaggataagcgtcagcctccaattcgacagcctgacaaatatgcaaatgtttttggttctccagttagataccgtatcattatgcacaaaagaacactattaaaagagcgtagcacaagacgatcactgcaggatttgccaattgatcagcaaatctgtgatgcattacttcattttgttcacattcaggttataggcaatcactcttgaaggcaaaggaacaactaagtatgagatcctgaaaaattagtagttgctacattcctgaacttttatcattggggtcagacactaccgtttagttgtatgcaacaatgtaagatcatatgaatacttagtatcgacataatgaacgttgtggacagtgatcttgcccactgcctgattcacatgtcaccttcctaccgctgtttaaacagagaatagctaaaataaaagctattgtttacatcatacagtgtcctggtaagtaaaaaaagatatcgtttagtggaatctactggtctaatagacattgcagatgcaaatgcttcactttatattaaatcataattgctagagcagtgcaattgttaatgaagtagtagtagcagacgccacgcaagtcaatacttctcaattgttaatgaaatcaataattcgcaagcaaaggtttccagataatacgcagtggcacctgtgcgtcgaggaacgagcaggcagcttcgagcgcgacctccagggcgatgaactcgaacggcagatcgtaggcgcggtccacgaggcggcgctgcagctcagagacgtacctacgcacggactactccgtctcagctactcctaaccccacgtcggggtcgcgcaggatgagcgcctcgtcggcggtgatgatgcaccgtatccgctcgaggttgcagacgacggcgcgctcgcgcccgaggatcgcggaggggtagacgaagagcgggtcgaggaggcggaggtcgcgcgcgggcaggtcgagccgccgcatgagcgccggcttggcgacctccaccgcctcagacgcccccgtcgccgcgtccacgcgcacccacgaccgccgcccgccgccgcgctttttcagcccgtggacgtcgatggccacgccgcccccgcgccgccccccgggggcgcggcgcggcggtggggcccattggccgccgccgccgccgcggcgcggggcggcaggaggagccgctccttgggatcgtggtccatggccgtcgaggtctgtggtggggcccggctgtcagcgtcggaaaggcggcgtgtaaagtgaggtgaggtgagtgcgcgtgcgaggaaaagggatctccgcgaacaatgccacgctgggaagtagcgtggtgcgtgggggtgacgtggcgaaccggatcggggtgaatcattgtgggatggattatttttttagtttacacctttttgaaagtttgtttacgaatagatccctaaaaaatattctagaatggatcttttcgcagctccaacttcattggcgctagtgttgttagcaaaaagaacctatttgaaaatattttataattaaaaataagtctttaaacacataagttctcagcagcaagccatccctttatgtaaatgatttagcttccacgagaaaattaaggggacactatcaatgtctgataccgtcatgttggacaacaatatcattaacgttgggaccgtggaaaaggtctattctcgaaataatttttttaatctatttataaaataagttttcagaagaaaagaaagggtgaacaatccagccggggagggcctagtggcgatttggggagttcgctgccgttggtaggccgaggcttcaggcccatcaagagagtattgggccacgagagaacttactaatggaaaaagtacaccgaaggtcccacaatttgtcatcgggatattaaaaacatcctcaaaccacaaacccagatatgcggggtcccttaaatatacaaaaccggtcacccgagatccttcagcggctttgaccccggttttggtctacggctgagttagcatgggacccacatgccagcgtgccacgccaacttttccctttcttttttttttctcttctttttttagttctctttgccgtgacggagtagcaacggacggcggcgagcggggctaagcggcggccggcggaggcagcgtgcaagcgcacggcgaccagcgaagcggcggtggtggcaggaggacgcgcgcacggcgccggcggatggggagcggcagcgtcctccatgtcgcgtgggcgagcggaccggcgacggcggcgagcgggagacggagccccgaaggcgcctcgccgccggtgagcctagccagccccagcacgtcctcgatgtcctccatctccatctccagctgcggtggcgcgtccaggccagttgtgggctggtggctagtagggttttttcgcttgcaactcctgcggctcgaacatcgcgcctactggagaagctagctcgaacatggcgcgccggagcgacggcatcagctcgccggctcgcaagccgtcgttgccacggtcgcgcatgtcgcgtgcacgctaatttgccttgctgctgctgctactagggcggcggcgagcggtgccaagcaagttggcatctccgtcgcgccggtgccgaaccgctggtggaaggcctcaacgcggcgctcgtcctcggcatacgaagacgagggcgaggacgccttcgcacgctgcggtccgccggccaccgcccgggcgtttgctccctacccgtcggccggcatgcgactgcgagagaagagtgtgagagagagagaggggggagaaagggagagaagaggggggaaaggagttacgtggcacgatgacatgtgggtcccacgcgccacgtaggccaatactgggttaaaaccaccaaaaaaaaaaaaaaagatctcgggtggccggttttgtatagttaaggcaccccgtatatttggttttgtggttcgaggatgcttttgtatcccgatgacaagttgagggacctttggtgtacttttttcccttactaatccatcatgagatgatgggccgacgcagcctctcgccgcggtggctccggcccagcccgcctgaaccctagaggggagcagctcagctcgcgtccgtcttataagtcgccgccccgcgaggccgctagggttttctcctcagccgtcgtctccctcctcgcttcgcgtccgccgccgccgtcccggagaggtaaggtaagcgtcccccgccgcaactaccaccacctccgcccccgccgtcctcgtgctcgtgttcgtcttagtcaagcgcatttctgtgctctgtagccgcgcgggatggagctcgcgtctctcccttaatctgagggcgaggctggatccgctacttgcgcgcgcttttcgtcgatttcttgtagtggatttcaggtcgttgctcatccagtagttggtgcttttcttctggagattcaatttaggatggcgtgttacacagtctagtacggtgaatctttagaactgtgggtgatgtttagggatgctggcgatattagtgtgctcgttatggttgatttgaacttgatgtagttgtttgttgactattaaggtggttttttttttgtgtgagttctgaatctgttgtcttggttagcttttggtggttgattggtttcacatcagaaattaccctgtttggattataatacaggatacattttgattaccacataggatgtatcgttgctgttagcctgttactagtactcttatacttactgaaatggtagggccgaacttttgcctgattgcttatttagatttacttggctaatgtgaaatgtgtgagcaagataccttttcctcctgaagtgtataacgactctactgtgaagcagttctatgcttagttaggtggctttctctttctatattagtaatgtattatgaaatagctgaattcgcaatggtgtattgtttagtttttctgtttcatacttctgatatcactgttctctttgtgtgcagttcaagaggcagccctgtgaagctccaatggctcctaaaggtacacagatgatattgctggatcatgtttacatgttcttttgatttcagaccatgtgcaaattgcttcatattggttgtttttaactatttctagttttgtacatcatattattatgtagtctcgcttgcactatataaggtcttagtactgaataagttcttttatgcatatttgtttaaaataagtattgaattgctaagcattgatgaatatggtccattggaaatgagtgtattcctgtagtcgggttgtataattagtctatgaatccatttctgcctggcttttttaacctcagcttggtgcttaattaagatgcatgaactgattgttttattttgtgtctagctgctcctgccaagaagggtgatgccaaggcccaagccttgaaggcagccaaggctgttaagtctgggacagccaagaagacgaccaagaagatccgcacatccgtgacatttcaccgccccaagaccttgaagaagtctagggaccccaagtacccaagagtcagtacccctgggaggaacaagcttgatcagtaccagatccttaagtatccccttaccactgaatccgcaatgaagaagatcgaagacaacaacactctggtcttcattgttgaccttaaggctgacaagaagaagatcaaggctgctgtcaagaagatgtacgacatccaggcaaagaaagtgaacactctgatcaggttagcactttccttcatacttcattttatcgcttgatttgctaggtagtgtagttaactgaccctacttgtcttccaggcctgatgggaagaagaaggcttacgtgaagctgacaccagactacgatgctctcgacgtggccaacaagattggcatcatctaagttagggtgctgcagtagtcttttgtgtcctggtctctatgtgattggagttttgtagctattacttagcgaatgcctcagtggctaagttatcactattttgctgcacacttccatgaatttgatataatgcaagtgacttatcgtgagctattatatgctttgcagttgatcacttgattgtaccgttgattgctttacgagccagctagtattttctttgcatgcccaaaattttgctttactatcccagtttttcaagttagtactataatgatctgatcaagcattcttacattatgatctggtaccttagcttggtttccatgttgctgtttgtgttaagagatcaattgttgacctcactatgtaactgacatgattcttgatttgttggtgaagctagaactacatctgtcaaggctttataatacagccacctgaaattacttgcacgtttgcgtggcggggccacaacgttgagattcgaaatggattgaggtgtcacggcagaaatgggagatgctactcctatctttcctttggcgttcggttcggccacacaacgccgacgtcctcgccggagtggccgcaccactcaccctaagccgccgcgcgctgagcggggaggacacgaatgaaacgcgatccgattcagagctagtctgttaaaccaagtagccattgatgagaaaatcgaaaatttctccttgccatgaactgaacagatcgttcagagtctaatttgcaaaattccggaccgctacccttgacagcggcatgctctgtaggggtcaattatgaatactttccccatcttttcagtcttccagtttgttcccttctctcccctgccccaactcaggacggccgcggagctccggcgatcccgcggcggcgaccggggatacagtcatacaggtagtaacaagtaacagaaacgagtcctcgccgacgatcctgaggagggccgtcacccgccagttcgccactgccggcaatacgagtcctggccctctctgcacgcagcggatagaacggagacaatagccggtcacgccactagttgcagcaacaatcaatctcctccaaaacaatctcctgatgacagagctagcagcactcggttcagaggatcccagaaatccaggttgcttccacaaggaccacaactaacatcatgcatggccgagattgaaacacgaaccaaaatctccctgctattctgaatgcagagcaactgagaatgcctacttgcacagcacagtgtattcaaagtgaacaaaatagcatggcatgcgttcatgtaggcttcatcagggaattcagatcaaagcatgaagagagatcataaaaagcagaagagatcataaaaggcagaatgaactactagtctgtaaaggcagcttggcattttaccaaaagagtaccactagtcaattaaagcattttcttccacgagactaaacaggatcagaaaggaatgtgcaacgaattcaagcgacccctcctccaggccaaatctccgtcgtcaatgcaccaagtacgacaagactagtcatcaatggaaagcaatcctacgaaggagtaaatccaaggttcacccccatctccgcatgagaaggatcgagatcaaagcgatatgcttttgctgtggcggctggggacggtgccggtactggtgctggaagtagccgccctcgcccccctgttgccctctgggtgcaggaaccgaaccagtatgacgctcatgttgtccgtcgatggtgggtctcgtgtaatggcctcctgaagaaggctctcgcagattaccgacagctccaccccctgtgttggtcacatcatacatatatgtcaaggcaaaaggaataacaacatataactgtaaatggacaaggtgcaaaacatggtgcacacgcttccatttttagactatacaaacggcaatccgacagaaaattatttaactaggccaggcaccatcccatttagaggatagtctgtgctaaatgtcagagctacattcagggcaagatatgctggacaaaattataattctcagtatgaagacatttctacaggcataatctgcacacggataaattttcctcatctggtagcaaggttactgttacagtgtatcactggagagggggcggggaatgtcactcacattgtttaagtgaaggcgtacaaaatcaaccacagcctggtttgccaagacatccctacaaaaccaaaaaaaatatgtaaatatagagcaaacagctgcaagttacattaattgtgtcaaagagtaatggtcaggcagggtgaaattcctatcaccactccatcaggtttcataaataatttcctcatccaggaacttcaagtttagtccttatgatataaattagatatattcgatggtcatttccatcgaactgaacaggtgaaactgaaattcatgccaccaagttaatagtcatctggacacaataaagcatccgaacccatatatagggaggtgcagacatttgacctctccaatgctatcatcacactaaactaacgaaaggaattagacccaccggttcaacaactgtacaaaatgactttatgtacatggtggtaaagtagcctagtcagtaaatcaaactgagctgaacaaaatctgcaaattttgtcggtaaatattttgaacaaacaaataagcgtacgagagagaattgtcatttggagttcctatattctgcaagaaatcatgaacatgggagaaaaatataagaactgtttctgatacttttagctgaggacttaccagactccatcacatgctataacaagaaactcggtatcatcagttaattggtcctgccagagacaaaaggggatcattttgcatcagctcatatccagtgggacaaacttaacttcaataacacaacgtagttatccttacagctcgaatttcaggagaacaagtcagcaattgttgttcaggacgcaactttttgttgttcttgtaagataaatcccctgtataaagaagaagaataccagttacaacacattaaattgtttgtgtatgacctcacaccgccaacaaacatataagctataccgattgctcttgatactgcaattccattattaacacggtgggaacccctagaaaaagatacggaacctcctgcagctactattctctgagtttcctccggaaaatttggtttgtgatcattggataaagcgattgccttcgaatacaacagaaataaacagaatagttaggtgacattagagtgcatcatccattatgaaaaaggaaataccagctaggcatttgaaaacaaaagtagtcactgcacctgaccattccttgagattacacaacgagcatcaccagcatttccaacaacgatctgcgtatttctaatgagaaccacacatgctgtacatccttctgctaatggtccacaatagacaggtccctggaaaacaaaaaccaacttgaagtaaataacaaaaatataaaaaccttagattctcgatctacagaacaattgagatattaccagcacacaaggagcacatctgagccaagaccgcccagctgttctccaatactcgttgccactaccatactcagttaattccttgcttgccgcctgatttctcaacatctcatccattctgcaacaattaaggaggaaaaaggattacatattttatatttggatgcacaacaggtgcaataatgaacaccaatgtggcgatggttgtttcttacattcttataaaaagaactcatgtggcatcaaaatatagagttaatggattaactagctgtaaaaacaacctgaaaaaggattgcctcaatgcattagcaaggttactgctaaaatcttcttgctccaaaaccttattgtgcaagtgatttgcgcaataccttgctacagcagaacctgaaatagaagttaaataattgagatactcatcttacataaccattgcgcaacattactcttgagtgcaatgaaggttgcatgtacatggatattataaattttactagcctagtcctccccccacattatgtactatgtagggtgagcatacttttcaagaagtcaaactttgtaggttttgaccaacaattagtcaaagtgctttctcgtcatattggttttgtagctatgaacaatatattatgtgagacatcaaagttgaaagtgtagctttaaagaagaatgagcatgcctaaagaaaatatgccctatacaatgagaagggagtatcccctcaatcagtacaataaatttgaattttgctgtttatatggggatgagattgaagatcaaacctccatggccatcataaacaccaaagaatgacgtgttagtgagagcatcaagattttcaatagtcgcatgctggagaatagaagagtacacaaattagcctttagaatttcaccaaaattagttgcaagccaaccccccatttctcctacaaaagactggaaggttactcacggcatcttccatggtgctacggtatccttgcatagctgatgaagcataagcaagtacagtgttccctccagaatgagtagactttgttatgtcaggaacttggaggggacgttgaggttgagccatagcggagtctgcttcgctgaaacataataataggaataaaatatccttaaattccatactaagatcaggttacagatcacctaaatactagaagtaacggtgaaaatacgaataggaattattggggcagaatgaatagaaaggttaactagcttgaatttgaactgcattttgcagaaacaaaaaatagatacgcggtatgccactgtttgcaaagctcaaagcataactccaatattttggacacatattgttgatgagcgagcaagcaaagatgactcatgactctaaagcagtccatacaaagcaattttttggtagacacaggtcccacggatgcattccaggatttttttttcttctttttatatcttgcatttataatcttcaagatacacaaatgccatcattttgaacccaagatctagcatgaaagttagacctaaggtgaactatgatgatacagtaaaaaatacatagaaatttagcacagcataatagtaaattttatcagtgcattccaacagagggaagtgaaaacaaacacaactgcatcatacaaaaagtagacaagattacaatcatcttgcaagaataaaccagacaatctgaagaatgaagaaattcactcgaggaagtataatcaaaacatatggtaacgactaatttagggaattgattaaaaggaagtataatcatagattctcgaatctagcattcaagaacaagaataaacgagggggagaaaactctgcggtcccaaatttcagttctactatggtctaaggatggatagatgtttaccaaaaacgaactgccgaacaatgtaacactgcagtagtgcacaacccccggaaactggcaacaaaatggaaaagtgttaatacgcttaataaacagaacgcgtcgatcttgcaggaaaaaaaataactcggtcagcaagaagggaatcctaatgaagatttggcatataaaaagcagaaaattaaaccaaataacaggtaaaaagcacgggcagagacatccagtttccgctcgcccaacaagaccagcaatcgcagcagaagcccaacgataggaaaggatgttacaagcctacacgttctaaaaccctaaacccacatgaagaaatggcgatctcgaacattccggaacagaaaatagtttcaaatggaaacaagcgagagatcgagacgaagcagccaccctcgtgttgccattgcgcatctgtgtagcaccgtaaaaaaaaaagaaaaaaagaaagagatgcatccaggaacagatggtgggaagaacaaaaaatcaccgagttaattccgagaagactcggatgcagcctcctccaagaaaaccaccgatcacgactgaaacagcagccaaaaaagcaacgataatgaacacgcgaacaccagaagatctaagaagggtaaaaatctcacgaactttttggagactgaagggcctaaaaaagagagacgaagctcttgcaccgtacaccgaagggatctagtagacgagaacgacaagaggacgcttcgatccgacggtggaacgagcaaaacccgtgggagttgcaaacacggaggcgaacggagatcaccatggaatcgcggtgctcgtccgcctccggcaacttcagttcatcccatccacgaaaaccaccaccagtagcagcaaaaccaacggcaccaaaacccgagaagaaaaccatcgtcagcatcagcaacagaaaggtcagaagcacgcaagaacacacacgacgacaagaacggagcgggcttaccaaaccagtagcacgcacgcacgcaccccccaccgcacgatgacgagaaacaccagcagcgagcgagcgagcgatcgacgttaccaacaccagtagaacacagacgcgcggccgcaagagcgagcgagagagcgagatcaagcacagcgaaatcgaagcacgaagagaggcgatagatcgagaattcacaggttcccccgcgaggaagagaggcttctgatcggtggaagcaaacgaacaaaaattcagaggagagggagagatgggaggagagagagagagagagggagagggagagatctcctcacctttggccttagcgcaagcggtcgccttccatgcaactgagggggccttcacttatactacccgggcgtcaccaccaacaccaaccaccccccacgcctcgctcggctcggctcggctcggctcggaccagcaacggcttcggctccggctcggctcgcgcgcgtccggacaagccccccgcccgcgcctttcgcgaggggtttaacctgaccacattaggaagtttgttactggtaactacagaatccaatgcagcagtgcacgaacaaaatctcaagaaacaagaaggattcgtagggggttaagagcgaggtcaatatatagccaactactggctccaaaatatctatagccaatctaatagtctatttatacaatagttaactataaaaatatactgcaccattaatacacggtcccacctctcatacacacataacatcttaaagtccgtgttgcagccggctacaaatctgtagctcgcttttttatctctcttcttttttcttctcgatatatggttacagccggcttatagcatgctattgtacatactcttagaaagaatatgtgcatattcggtggtaggcgcaattaatagctaaaccccctggttaattgctaaaccccctggttagtctttcggtggtaggcgcaattaatagcttgatgacgtaactaagcatagaaagaataggagcatattcagatgggctttgtcacgttggcttgatgcacgtacgcatatctaagttcactgtagcctgcactgcacaacctagccttctttttcactgtgctagctgtacctcattccccatccaaggttaattttctccgtattttttaatttatttctggaggaatactctagaagcacgagaaaatatctcgagtttgtttttttctaagattattatttttggtgttaaatagactttcagcattttcacatttgagttgaataaatgagcaattatggcgattgatctcacttgaatctactagtagcaataacactaggaaacgtctagcaagaaggggtggcacacgcaaatgtatctgcaaaaattcccatcgagaagccggcgtaatcaggcaacgaatttaaataatgttgaaattttcctctcgagttcatctgaaatgcgatttggggagttatgatgtgctcaccgatttcacacttgaagcagcgcacgagggccgcagcacacgggtgcgtcggaggagcgcggggtatcagggagagcctccgaggccgcggccgcgggaggccagcgcgcaacggcgccgcccacgggggcccagcaccggcaatccgcagggttgaccgttgaggcagcatcccacgtccgccgccccgtcggcggcgcaccggacgaggaacgtttgaaatcgcggagagcggggcgcggacggcatggcggcggcggtggcgatgagaagccactaggctacgcggggtaaggaaggaggggacggcgtgtcgcctgatcgtgtatcgagagggggagtggggggagaggcggtgagtgagggaggt

SEQ ID NO: 6095 - DNA, 1117 bp, Oryza sativa
cgtgtatttggccacctttccggccagagccaactcggcctgctgtttgttgccccagaggaggacaacatggagacgatcgtcgcgcaggatgcgcttgtaatcacgtggaactcgtcgccagacaccgcagatcttgcccgtggcattctgatagacactgagagtgcccgccaaggtggtctccagttgatgctcctccaggattacacccgcatcatcaacgaattgaatggcacgcggacgaccgattcgcgatgaggtgtagaaggagtagtatagattcttcttgtggaacaggaaacgggcggtggccaccacattctgcggattgtaggtggtgtacatggacttcatttcctcacccttgaggaaataggaggtgcggcccgttagcaacgcagcgtaatctataaatagggatcaaatgaaaggtggagataatccaggtgttagataaatacaatagttctcttgttaattaaatgtaggagctggtgaatgggattacaatttcccgcaggatttggcggattctattgggatctgggtgggtgtccggtacttttgtacttacgtttcatgttgcgctcttcctcttcattgggcacgggcacatccaaggctacatccgtatctgaaagatggagggaatacaaatagagaataagatgatgctgggcgataaggtacgaccttaaatggaatttagatagcaacaaatgcttcaaagcaaccgaaccgccgccagccattcaccatccatccagccagccatccagccagccatccagccagccaaccaactatccatccacaatttgtggacacaattccggcattcaaccaaaattccagttgaatgggtgaatggtgaatggctgaatggacgaatgccaggggatcatcatgaatggcaatgcaactatcaggtagagatcccacctccgaactaagaccttccatttccacctctcgcttccacccaggtggcattcattaatcgtgcataaattgagggcaggtagaaggtagagtttctcgaacgggaagtctaacctacatctaactagggaagtgctttgtatttgaggatgtgcggactctggggttctga

SEQ ID NO: 6096 - DNA, 41620 bp, Oryza sativa
cgcgtacgtgttcccgctctactcgcacgccatcaaggaggcgctggggtacaaccagaaggcgctcaccatgctcggcgtcgccaacgacgtcggcgagaacgtggggctcgtccccggggtgctcgccaaccgcctcccgccgtggctcatcctccttatcggctccgcctgcgccctgctcgggttcggcacgctctggctcgccgtcaccaagaccctcgtcatgccgtactgggtggtacgtagcctcccgccctcgccctttcagtgattgtgtgctcgtcttggcttttgcttgtttgcgtggggatttcttgctgtttttgcctgatttgagctcctcatcggggaggagattgagggatgatgatgaacagttttttattgagggacctaaaattttagcacatacgaagtagctctcaaattcccaattttatctttttttaaaaaaaaagcgattattgtccttttggagcgtaatttctggatatggcttggttgactgaacgaatgtcgaaggtgatgatcgactagcggcatctgtagaatgttgaaagatgtgcgagttttttaactgtatgattgacaacaacgccggtagatattttcctagaataagcgtgaaaccaaatgtggcatatgtagttctttacttcctgccattcggtagaacatgtcagactttggtccattctttaggtgaataattgttgactatttaaacaatcatgcttgcaaatggggcacaattggttccggtactgagagccacagcaaacctagaactttaatttcgcaaatctgccaactcgagctggtgacctggtgtattcgcatccctacaacttcttatatagttttaagtgttggtgacagattttggcaagttaatgccctaaagttattttcaagaagcagtaaggctgactttaatcagttcaaaattctggttttagtaaattgcataaaaatatcacatgtaaagacatttactgttcagttttacatgagttttctgttgcagcagcaacagaaaactatattatctgtgtgtgccacatatataaagattatgccataaatgaggaggtcaaaatataagtagtaaggcatgcttagtagtgctatctaggttgtctcttatgattgccatgttatatatattaaaaaaaaagtaggtggcagagaaagggggtgaagtgagagaacgtgtcatctcttatacaagagacgatatgagagaggacaccgacacacaagactgagagttctgaggtgagtatgcgattaaaagaaggggaattataatggcatttatgatagagacaaactgttagagatcatataggttgtacgtgaggttattcttgaatcttgatgagtcagatttgtaggagattacattaggggtctctttattttacatggtctaagttcgtattacttgattgaagcattggctgacacccaaatacccaatacaacatgattgagattcctgaatgtgatggttgctcaacttttggtgattttcaactttgaatagccatctgacctgcaacgcctggggatgtcattcattggtgtttgtgaccactggaaggttattgctgaagttggtatgaacacaatttttgttgggactttttccattacaaaatacattgacaatgtaaaagcaagccaaagaaaaacagtgaagttcatgcatccttagctttatacacttactggtaaacatgttctggtcttgtgttgtgtagctgtttattattattatatttgcttgtgtgttgcttttttgtgaccctgaatgtctaaactctaaaatgccagcccattctgtatatattaatgttttcacaatttagagacatacattagacctactgtattgcttttttgcattcgtatcgtattgttttagggaaaaaatgtttgttgttttgagccaagatttaatcaatccaacaagatattggtattacactgtaactttttaatcactgtaaataattttttgccaaaatgatatggaattcctagtcgacatttgatactttttttaagttcagagctcactagaatttccatagaaacaccagtcactttacaatcagtgtcttcatcttcaaaatctcagccgctgaatgaacttcttggacaaaattagtccctttttagtttcatgatcgtcctgatatgttcaacatactcaattcatgaatcaagatactccattaaccgcatagtttttccaacaaagtagaattgtctcacaaagaagccactattaaggcacttattttctttgaatgttgcaagaatttcctgtaattgtaaatgttctgaatctccaaagatccaaaaaaatcgatcatcatgtctcttttccctttttatgtactagtaaatgtaaatcaggcgagcagtacacgtgcatgctatccttatggagagatctgataaagaaaataaattatgcacacgcttagaaggcaattggttgtttaccataaatattttatctgtaatgttggcaagtacgaaaatgctgactagtgttacgtgcatagaacttttatatctgtaatgttggcaagtacgaaaatgctgactaatgttggcaagtacgaaaatgctgactagtgttaaatgctgactagcttcctaaatcatggaaccgcatcttggtaaaattctgtctcaaatgcctgatgagttgtccatatctgatatttcttgctcatgttgtagctcatactttcaagcgagtctttttatatttagcatattttgttggatgcctcttgcagttgtgcatagccttatgtattggcacaaacagcagcgcatggttgggcaccgctgcacttgtgaccaatatgaggaactttcctctcagccggggaactgttgctggtctgatcaagggctatgttgctgtgagtgctgctgtctacacagaaacatttaatggaatgcttcagaactctcccacaaaccttttgctgttgcttgctttggggatccccaccgcatgtgttctggtgatgtattttgttaggccttgcactccatcactggatgaggacaacgcagcagagcacagtcatttcatgttcacacagatctctagtgtggttctcggtgtatatcttatggtagctacaattctcggtgatactttaaaactaagtgacgctattacctaccttttgtttggtataatgatacttttgctcctttctccactggcaataccaataaaaatgactatttatccaaacaaaccaaaaagggaaaagactagcacccttgcactgtcttattcgactgatagtttgtctggtccggatcaagagaattcagaaccacttcttggtggcacttcaacatttgtcactggagccaacgattctgatgaggctactgatgtggatcttcttttggccgagggtgagggagccgtgaatttgaaaaagaaaagagggcctagaaggggggacgatttcacattccgagaagcattggttaaggcagacttttggctactatttattgtgtacttttgtggagttggaactggtgtcactgttctgaacaacctagctcaggttgggatggctgttggtgctgatgatactactatcttgttgtgcctcttcggcttctgcaactttgttggccgtatccttggtgggtctgtctctgaatatttcgtaaggtcagctccctttaaccactttgcaattactttattcattcaatttctatcattgcatagctgacatatatagcaactaacataagccaaagacataacattttctgttcttgcctactgtgatgtactgatattactccatatgaccatatgaggccaaaagccactatcacctcagcacttcctgtgaaatcctggcagactactcagatgagctggccgctgatatttatctcctgcagactggcaatcactttgcatattcctagtcatccacaatcctatgattttttctttactcttgttgttaagctacatgcttgataactattagttgctgcttctgtaaaatgattcgagtaaaacctgattgcaggtcaagaatgcttcctcgccctttctggatgatgtgcacacaaataatcatggtgataaccttcctccttttcgcaactggccttcatagcttgatttatgtgtcaacaacatttctgggcatatgttacggtgtccaatttgctgtcatgatcccgacagtctcagaactttttgggttgaaggactttgggttgatgtacaacttcatgttgttagtgaatcccctaggtgcattcttcttctcagctcttctcgctggttatatctatgacaaggaagcggcgaagcagcagccaggcgtgttggaaccttcaacctgccttgggcctgactgtttcaggcttaccttctacgtttgtgccatcgtttgttgctgtggaaccctagtgagtgtggttttcatagcgaggataaagccagtttatcagatgctctatgcaagcggatcgttcagacatcctcggagtcaacaactccattgatggcacgcgcatgaacacagactattttggagagaattatcagctcggtgtgtatagttggctttcttatcacttcatatcccagtgctgtattgtcctactgttgcttggtccgtccccgttggatcggagagttattttgatttcatctgtacctgttctgtaaagcttgtgatcagtagcagactagcagttaccagcatacagccggctgtcgaagggatgaaacttgggggcgcgtatacatggtggggccgttcttgtgcttgtacatcaagtttgagaatgttgtacaatatcttcttcatcccactgacgctgttaataccatgagtgcaatgagcctggttatgtgtcttcttttttttttcccatggaaactgattatgtgtatgtgtcttgttttctatggtctgaacatctgaatttcagtagatgtgtcccaagccaactcccaacttgcaattactcctaaaaacgatacatcaaaagttcttacaaatacctatgaatgtaaactaacacaacgtgatgagcataacatggagcgacacttccgtcccttaatataagggattttaacattttgcttgcactgtttgaccattcatcttattcaaaaaaaaaataatagaattattatttattttatttatggcttactttattacctaaagtactttaagcacaacttttcgttttttatatttgcacaaattttttgaataagacgagtggtcaaacagtgtaagcaaaatatcaaaatcccttatattaggggacggatggagcatatgatttcttcgattttctgcctggaatatgggtctctccgagtctgtgtctaaattaggaaaaaagagcacctaagttatgatattatcgtaaaggcacatgtagtaagtggtaaggccgcaaactaggccatatcaaataacctgaacatgagggtacatgaaatccaacttcctactccgtcagtcaaaaaaaaaaaaaagacaaaaaagacaagggactatctacagcagaatttttttgtgaaaccgatctccagcagaattttcatccactgaaatgcgcaagtaacagccaaagcactcaagtggtgccaccgtgatgagctgatttgcaacttgcaagttggcgtactttgctccgtcctcctcgtggatgacttgattgccatgttgatgacagtgttgggagggagaccagatccaacgcaatttatcttaagcaggaaccaccgtgcaggcgtgcactccgtgcagggttcaggctcgctcgactggacgttgcgatgggcgtccagttggttggatccgagtggccacggaaccaaatcgcacctgaaattggctgcatcttccagaaccgtgggccgttttgcggtggttgcagcgctccggtgggcgccccgcgtcccccctcccgggcaaaaccaccggcgccgcggcgcccggcgacgttgacgctgttacaggtgggccccgggtgccatgttgtgaagcgttgggacctaccgacagagacgggatcagaattcaatttcttccgtaggacgcgggaaccgtcaacgctggccggtggcacctggaccctgaggccagtttctcccaattcccaagatttaatcttgcacgcaaatcattggcccctcagggagacttgtggaacgcaaaaaagaaaaaaaaaacggtggtaacggcctacggtcaatgcaattgggtcccgccctactccctccgttctggacaagagctgattttttactactgtattgtactaggagaagtagcatctccatcttttttttaaaaacggagtaaacatgaatttatcggagagaagatgaatatgtagtcagggcaagtaaaataagaaaatcattaacacatacattaattgatttctaattattacaaactcaaaatttgatttatttgatattttaaatcaacttctatatagaaagtttttgcataaagcataccatattgaaaaacgtgctaacgtaattcaatgaaaaatctgcatcttgagaagaaaagaccaccactgtgttttttatgtaatccctctgtcaaaaggtaaaattaaaggagaggacaacaatcaaaatattcctcattaatagcagtgaactactccctttctcacaatttgatcatcatttgaggtttctgaggtcttcccaaaatgatcatcttataataagtgctctttgtttatttgtaaagagtaaatatgtatcattaaatatgctacatgtaaccaaccatgattaatttttattggtgccactccatgcaatattttaaacatgatgcaatccacggggcatgaagtgtcacaatagtttaaccgatgatgattaatttcatacggatgaaggaggtttttattgtctttagtctctgcgctccttacttgtcccttctatcccaatataattcaagctaggataggatgtaatatatgatagtacgatgaatttagacatgcatttattcagatttgttgtattagaatatatcacaacatattctttataggttaagttattttaagacagagtgagtaggtaactattaaattgggatagatagagtagtactattggtagtaggtaggtaggcgacattaaagaaataaaaaaaattttgatttgtaaatcaagtgtagataaaaatgtagaagttaatttattttaagataaaatttgaacatcaaagagttgatttatttttgaataaagggtatattccactccatgctaacaccgtgagtagctgtatctcccaacattattgcttgtctatgttgatcattaactatcccaacttattgagggaacacatcgccatctatctctaagagctaaactctagctactacagcttattttaaaattagaatctccccaaacattttagcttttggtttagattctaagggcctgtttagatccatttggaatggcaaatggcaaatggtaaaagttttggtggcaaaagtactagttagtgtttagatgcatgttaaagttttgccattctagcactaaagtgaaagagagaaagagatggggagtggtcccaaagcactttttggcacaatttgctactatggactttttggcacaatttgctactatggactagcaaatgccaaatgtcaaattgccaacttttgctactagtgtttagatctaaaatgacaaaaagtgctacaaaatgacaaaacttttgccattttggaggatctaaacagggcctaagaagctgtacttgtagaagccattaactgggaacccaattttttaaaattctcagaaaccgcctataaactaggttggatatgtaacacatgctaatacaaggaatctggaaagacttcttgtctagattcgttgtaataggatatgtcacatccaactaaaatcccttatatttagggacggatagagtattttttaaaattttaagctcacaaacaatcctttctgaatgtaagcacctttctgacgtatatataccatataaactttccgtataaaccagaccgctgactaaaaaattgcaacgactccaatccgtgtgcagaccattgtattgatgtatactaggagaagctttttcagaaagtacagtagtaccaagtgcaaagcgagatgcttcttcgtgtgcacagcataacagcttttccgctgtggacgtagcaaaaaaaaaaaaaagaaagaaaaaccgcaaagtcaagtaaacttcatcaccacaacaaaaacgaggcccacccgcacccactcgcccccgacccgcattttattttctcctcgtctcctctcctctcctcctatcctccgccggacgcgcacgcacacgcacacctacgcatcgccgcctcctcctcttcctcccactccgcggaagcgcgtaaccaccacctcgttcgttcttatctccaaagccgaagacccaccgagccgatcccgacgcttcccccatggctcctccgctcctcccccgcggcgcggccctcctcctcctcctccgctccgccgcccgacggccggcggcggcgtcctcccgcggcttcctgtcgagcgctgcggcgggaggccgcgagggggcgctggccgccgccgcggtggcggtggtggggtccggcctgggtctgtggctggtgcccccctcgctcgcggactccggcgaggcggtggccgacgccccggcggtacagatctcggtaggctccggctccggcgcggtaggcgccgtggaggagcgaggccggaagaggaggttcctcctcggaggtgagcttcgcttttgcttcttatcccccctccgcgatttgcttcccgcttcacgattgatctcgcgattgttctcatggagtgcgtccgatcggtttgcgcgtcgccgccgccgccgccgttgtcccgtgatgcttgtttcctttacttctctactaagctttacggacgctttgtcatgttctctgatttctctcccgtaaacagtttgcgtccgtagcgtcgctgctacttttccgatcgtctttttagcactttaattgctgggatgagctggtggtgatctgcgatccgtacgacgatttctttgctgcgctgatctatctgcagataagcgataagtgacaaacatccgaagagaaaatccaaactagatgatgcggccgtttgtagtgttaggaaagtctttggcgctttctgcttctgtctgagtgcgttaatgcttctcactaccattatatttgcgcgttgaactcaactgctcagtgaagttgtagaatggtttaatgattttaattgcttttcttccacagactcgttccgcagaagggtgttcttcaattacgagaaacggatacggctgctcagccctcctgaaaaggtaattaatttggttcattaagtgtaaaacccgcttaatttgtgttggtcggcttgtggtatcctaattcaggtgtttctgcgagtagatctttgaatatttcgcgtctgtgcggaacccggaaggggaagtattcatgttgcctgctgacttgatgagagcagtagttcctgttttccctccatcggagtcgaacatagttcgggagggaagattaaggggggaacgcaatcctggagagttgcactgtgctccatcggagttcttcatgctgtttgacacaaacggtgataggctcatctcctttgccgagtaagtgtattttatccacactaggtgtaatacttaaatcacttgagtgttttcagaatgtttcaattaaagggttttaactttttcctaaatactgccgctgggatctttgcatgattccctttgagacttatagatgaagatcccttgggtcaatatcataaatatttgcaccctattttatcattggcttaggttcaatttctaagtaggcttgatgctgattatgcttatggtggttttctaggtacatcttttttgtgacattgctcagcatccctgagtcaagtttcagtgcggccttcaaaatgtttgacgttgaccacagcgggtgagttctatttctactatcgcacttgttctagcaacatgtcttgctgtcagaatgatatgcatctgctcggtacctcatattgccctgtttctagtattactagtcttggtctagtaatatgaccctgctgctagaatgatgatatgcatctgccatataactgttctttaattaataaacctgatatgtttgcatgtttaacaacatcaccacatctgttagttaatggtaaaaacaataggttactgtatataccatttttggtggtttagttcagcattccttttcttttcatgtgtacaccttttattactgaagctgctaaaggtatgtttccttttgtgctcttggatttgtgcataaacaaggacacgtttaaatattgcctttgtttgtgctatattgttgtttacctgtgaccattcgcatgcagttaatttctcttctcgtccagaaaagaccagctctttatgagcatctgacttgttagttgatggtaaaagaagggtatgaacaaattttggccagcttattctctgttattttgttgtccttatctgttacttgtcattttcagggagatagacaaagaagagttcaagaaagtaatggcactgatgcgatcctataacagacaaggagccaaccatagagatggcttacgtactggactaaaagttggtcagcctgtggaaaatggtggagtggttgaatacttctttggtaatgatgggaacgaacctctacactatgacaagtttacaaattttttgaaaggattgcatgacgaggtgattcatttcttctgttcttcaatttctgtaagaatttagtccaatgacttgtcatgaatacccattctaataactgtcttacgactcaattaaactgagagtctgagaccgtatttgcattgtgaaatgtataacacacatctccatatgttttacatgtttctgaactaaaaacacctaactttatcatatatgaccaaaggttccaacgtagcatattgtgtctgcgtgccctcatcgtctctatacttgctgaaactttgtatcctcattccttttggtaggaatatatcactatatcagtaagctagctagtggtacatactacatactgatgttattgatcaacgtacataaaagaacaaaagaatctgtacaattatttgttagtagatgtttcctatgcgcaattctgaatctctcttaatccattcacctgcagatcattcgtctggaattcagtcactatgacgtcaagtcatctaatactatcccagcaaaggatttcgcattatccatggttgcttctgctgacatgaatcacatcaacaagctacttgatagagttgataatttaggcaatgatcctgatctcaaaggagtgcgcatcaccttcgaggtttgacttttgcatgatcccaagctgtacttttctttaaaattctttttccttgtttgatccttagttcattgctgatattccttggggtctttaggagtttaaatcctttgctgatttgcgacgaagattggagccactggcgatggctatctttacttatgggaaagtaaatgggctgttgacaaagcaggatctcaagcgtgcagcgcaccatgtaagtttggctactaagttcatcgtacttaaattcgatatctccaagcaaaagaattgattttgaggcttttcttgatcaaataaatggtctccatggtttttttgttatcttaatgctcacttactaaactgataactcctgctgctcaatacttgattactatcaccattgtgcatccactaagcgattccattccctttttggtttgtgatgtaggtttgtggtgttgacttaactgacagagtagttgacatcattttccatgtgtttgatacaaatcatgatgggaacttgagctcggaggaatttgtgagagcattacaaagacgagaaactgatgttcgtcagccagcgacaccaggctctatggggctgttgtcttactggctaaacttcaacaagtgttcttcgcttacacagatgctgctcaagtagattgttttgatccttgctagattcttcttggttggatttccgtcacggtaagcacatcaaatttacctaccgttaacttcttccgtctgaacatgctatccgtttctgacgctgttcccattgatttcaggagatgccgaagcgattttgctgtaaatatcgtgtgggttgtcaaagggtgccctgtcacatagcagctgtaaatattttatagcgcctttcttgcaggggtagattaatcattcttgtaaattaaggcctatgcaaaatgtaactgatactctgataagacttttgaaaggttaaaaccaactttatcgccgtggttcgtattatgtgtttatactgtgattttttttgaacgatcagcagcaccagaccgagcgatgattcgttgaatagagtaggaaaaaattacaaaggtgctgtgtgctatctgtaggttttaaacctcaaactaggaacaggacggtcaacggcaacaatgcgcatcacaaactctatgcgactatgcaagatatagctgtacgcaggagacgcgccatagttcagggcaaaagttgggggaagacaagatcacaagagaggcagcaacatgtaaggttgggcctgcagtttggccatcatttcctggcgcagcgtatgcatgctgcacaaatcgctgtggagtataaattggctttgcattgcgcggccactctgcccatgtccaatgatagagctggctctccatctactagcttgtaccacctgactgcctgccgcctgcctgccggattgttctgctataaggccaacggatggaatgcttggctggtgactgggatccaattcttgcctcagcgagactatgcaatccttgcccagctaagcctcagccggagaaccacacaggcccgcagttacccaacgatcggcgcctagctgcaattccatatagttgcaagcaaaggggtcagcagtttcagaagatgatagtgcgaagtataacataagtaacggtagggctgtcaaaaaaactcgaagctcgcaagctgcttgagcttgattcgttataggcttgattcgagctcggctcgaatactagacaagccaagctcaagcctaggctaaggctcgcaagcctagtaagctcgagctcgaatagctcggcatggcttgattagcataagatacattgcatgtaggaagatgttcttaatgggtcaatgtatacttatcatcgtgcttgacctgctcaagtctcaagacctcatcaatgcttcttaataaagcaattatccggttgctagtaatagtactactattcctattagatgtagtagctagcttttgttaattgcaatgtttcaaatccatgaattcatgagaaaagctgcagaggcttcattcaagacaagtagcactcattaattttgactaccgataatttgcattaatatctcttatacaagagtaaattctttggagtttcaccaagtcaagctgtcaagctcgagtaggcacgaagctcgcttgagctcgaactcgagctcactcccaagctcgatcaatatccaggctcggctcgagctcggctcgagttcatgtcaagctcaagcctacatagccaaactcgctcgagctcggctcgttgacagccctaagtaacggcgctccgtcactccgtcccaggggcgacgcgggcggcgaaaacgccgccgcctctctcttcccctcctctctcccaccttgcagccgccggcaaagccaggcggctgcaaagacggctgcggcggggctcctcttctccctcgccctggtgcaacggttggggcaccgcgagaccggatgacgggagcacggcgccggcgtcgacgcccagatccagcgccggcgagccgggattcgaccctcccttggccggatctgggctgggacggcgacgacgacacgagggcagcgcaacggcggcggcaacttcggagcgagggccgcgcggccggtcagacggtggcgcgactccccgacggcggctggaggcgcgggctgccgggccggcggcgactgcggctgaaggtggcgcggctgcggtgcgtcggctgcagctgaggctgcacggcgtcggcgtcgacgacactggaagcggtggcgccggtgccggatgcggtgcagcggccgggatgctggacacatttgccggaggcgtagaggcggctggaggcgtgaccgaagacactgggcggcccgggtggccgttggtgggcggtgaggtggcggcggagtagtggcttcggtgaggccgctattgggcttggcggcggggtagaggacgctgacgacaaggtcatcttccttgtggttggccacgcgttcactgtgtttggggagctcctccccttctttgtggggagcttttaggcacggtggaggtgttggctggcatacagggaagactcaggttgctaaggcgaggttgttcctggtccggtcccataggtcggattcgacgtagaggccgacgagcgacgtggaggcggcctgggtcagcgtgctagggagtggcggcagggtagaaggcgctggcggcagggttgtcttccatgccgtcggccaggctaaccctgtttggggagctcctccccttctctgtgggaagcttcttggcaggctagaggcggtggtcagtccataaggaaaactcaggttgctgaggcaatgttgttccctacccagactcccttaggtcggattcgacagggaagccggcgggcggcgcggtggaggcggcctaggtcagcgcgctggcaaaggtgatgggtgttgtggaagtcttgtcgttggcaggactggaagccggctgacggaggggcgtcgatcgagtgtggcagaagccatgtgtcgccgatgtttagttgctggtttcgaattgggcgacgaaccatagcgatagggattctgagcgaaagcttagcccaatctttgggccaacagtgactacattttcaggcgtggtaaccctcctaagggaattgttgagcagttgaggtacccctcctccctccgcaaggagctctgggtgaaaaccttgtccctttttgggacggatgatgatggcgtctcgcgttgcaaccctcgcgagggcgtcgttttagagtctttgcgccgaggtggtgttgttggcccgatggcgatcggtctcgcatagcgacggccggttcggtgctcggcttccctctctgtatcgtgtgtttgggcggttggcacatggttcgaggtgtgtgctttggtgcactttcttcctcgacagtaaacaactcatagggcacaattaagcctgcaggtaaatatcacacagttgatgaatgcaaggacgcacagaaatcaactccgcacatggaaatcgaccaaaaatgagaactgcaataactcggattcatctgatcacatttatctacatatcaaaatcctgtggggctacttcagagcacaaattcaggaatgaccactgtaaatgttccttctcctcacaggacaacagattatgatggcatatatatatattcatccttattattgccggagaaaactaccaactcaagaggaggcacctactactaagctagtactagtaactagtagtaatacatgcatcaagaggggtaattaaggacataaaaatgaagacaaggaccaacagtgacccctccttccctgtgctgtgcacactgcacagagaaaaattaaagatcgatccatccatctctaatagtctccactaattttaatttaattcttcttctttgagaaccaagggaggaggaaatccaggtgacagatcaacggggagaaagaacaaatcaagaaaccagtgaaaaaaagaacacttgaagctgttgctgcatccgtgtcctcctgcttctccttgcgacagcagtagagcttcaacggcgccatggtgagggggtgtgatgcggtggcgtcccccaccacgcctgcaactgccgtgcaccattgccaccaccaccgcagtagtgcgcgttcaagaaaccctaactttggaagaaaagggagagtggaaggggaggaactcaccggggagaaggtggccaccggagaagacagctacccacggagagcgtgtgttgttgccgctgcgtccgggttgcgccgcgccgcgccgcgccacgccatccccgccgcagcagcgccccctctcgttgtgccgccgctgcgttgcacgccctcgagagggttttttcctcgccaccagagaagctgaatatttcccggcctattacacggggaaaacaccccgtgggccgggataaaatctcgcatgggcttaaccgaacgcctattcttgcgtgggccggtattcttcccacgccgggttgatccacggggatcgggccctgatcccggccgttcccggcccaaccgaacatggcctaaagaagaaaaaaatcatcacactccaaatttgatctcctgaatgtttagattccttcatcaagttcatcttcgcctataaaaatgaaatgaaatcagtattgtttaaaacatgcccaaaagcatcccctaacactgaagtaactgttcagattatgctcatatggtattcaccgctttatgcttcatttgtatatggagtaatagaagaaaacaatattcaagacatgttagctatgtgaccttgttaaggcgatacatatgattggaacaatagatttctgatctaaaataggtaagtgggatttacgtcagaaaagaaaaaagctagattatgcactttgagaaatgcatatagctttttgcacaataaatacatatatttaacatgatagcaaatcagcatgtcccagactaactttctttgccggcaaggttttctgccaggaacttgatccgttttggatcaatcaggtggagaactggtgtgctctcaataacactaagcacaacttccttaacatcaataacattatagcgatcctctttgcagagaaactcaagagcaacctggaagccattcagaaagaaaaatccttcactttctctcacctctccaagatcagcagcattataggctttggatctatcttcactaacttcagcctgacagagttccggagaatatgaagtgaatcatgaatgtctttgtacagctaagagtcacccaaagaaaaacaagagtcccacatttgctatcattttgtagaactttcaacgtagaatggactttggcagccatgtgatcatttctattttgcagattaatgttaaagccaagtgatggtccatgccagtctggctattaaatctttattctttgatcttgcaatatggtagttagtaatggaattaaagatttggaatatagctggcagcttagtgatgcccgcattgcaataaaatcatattatcagccttgtaaagctctcaaagttgacatgtaccaaaagttaacttattttactatcggaaggatccaaaaagaagaatgacaatatagcatggcatgcaaagggattatagtgaaggccaatcagcaatattgattaacatgatatgatagcaaatatcatagcagcaatatggaagcataagggtagatgaagcactcactcttaaatccaactttttaacttgttcattgcagaattgtttgagccaagtgataacactgggatctagagcttgattaatagcaactccactttcacagatccaaggatgtcctgatatatatatatgtatatatatatatatatatatgtatatatatatatatacatatatatatgtatatatatatacatatacatatatacctacatatacatatacatatatatgtatatgtagagcttgattaatagcaactccactttcacagatccaaggatgtcctgatatatatatatatatatatatatatatatgtatatatatatatatatatcacatatatatatatatatatgtgtgtgtgtgtgtgtgtgtgtgtgtgtatgtatgtatatatgtatgcatacatatatgtatatatatatgtatatatatatatatgtatatatatatatatatgtatatatatatacatacatatatatatacatacatatatacatacatatatatatatatacatatatacatatatacatacatatatatatcagtcaacaaatcaaaaggtttgtggctcttaaataattagtgaaaattaaaattatgtatcaaaatatgttatgaacaatgtatagctactcagcaatatggacaggcaatgaaacaaaagggcaactaatttaggtgaagaaataggtcaattatacttacttagcagttagcacttcatggcccttcaaagttcaaatgctctgaagaatattgagagagcattttccctatatgatacttctcattgtcagatatctttagaactgattgaaaatcaatgagacccttcagaactgcatcaaatattttccttgttgtgtctctggaaaaaggataggatgtgatcactttagcaattccagaatatattagattcaaatttacaacacataaggttttagataactcacctgcccaaaatggtggcactccactcatcaaaacgttaagtaccactgtagctgaccacacatcagattttggtccataagtgcagtacctaagattctggtctataacatatctgtgcagtacctcgggagcaacataatatggactcccaatcaactcggtgaaacctgacctgcaaattgtaaaatggaaaatttaagataaaagttaaaaactaatttatatatccacaacacttcacacatgagctgacacatacagtgccagaactgtcaaggaagatggataaacaacagaatatagttaggatgctcttgattatgttggcgtgcaaatactatccacacatatacagcaaagcagacaaatactctctaaaattattctgtggagtacatattatgttgatctgttactctctaaaattaaaaataaaccactacacatgcattaaaatgtagcataagaacaccacctggtttgaagaacacggatgtctatcgccttaattgacagaccatcgtctttaatctctgcagcctacggatgtctatcgccttaattgacagaccatcgtctttaatctctgcagcctttcgctcgttataatgcccctcctcctgaatcttgtccaagagctcaccaacaatgaagagctccatcacaatgtgcaccgctcggccatcctcacatacatccttgattgcaacaatattgaagggaggaggagagcgcctcgccgttgtcggagctcgtagctgccgcccagctcctacccacctgcgcgccaccatcgacctcctcacccccatccagcgacaaggagaagggggcatcggttggccgaacctgcgctgccgctgcagccagctcgaggagttctgtcgccgtgccgccaccaagcttaaggggaggggcgacgccggcggcggagctcgtcgctgccggagagctgctccccaatctccgcacgcggtcaccgtgttcctcgccccgtcatcgagatcctcggccccatccagcgacgacgaggaggagatggcggctcgccggcgcgtggaaggagagggttcgcggtgatctcactggggtcatggagggaggcgtgccaaagtggtgcagatggagaggagcggcaccagcggggacatggaaaaggaggcggaggcggcggccatggcggggtggaagagaaggcggcgccgcggcggcgtcgttgggagcgcgagagaagagagatggacatatagggattgaacgtttttgccaaaaagacgctaagctcccgtatattacacaagtccaccacatcgattactcatcgtagattatcgatccgtttccgttgccgaatcggaacaaaagacttacttccctcgctgaatcgtaacagaagatcacgccagccctcttatacaaaagggccggcctcgacgggggaggacgtacagaacccatcattaatctcatcgatcctctagttagctttgtaaatatctatggtctcctttggtgacgagggagcaacacgcttgtttccaaagccttctcctccggtgaggaggagaataatacggttgtttccatagcgtacgacgaggggactatagcctcctcctccggtgacgagggaagcaacacgcatgtttccaaagccttttcctctggtgacgaggggagtaacatggttgtttcatgacctgcaacacgcatgtttccaaagccttctcctccggtgacaaggggagtaacatggttgttttcatggcctgtgacgaggggagaaaccaagctggtggtggtcttccccacggcgggactactgcatcggaaacgccggatctgggcactcctcctgactccaacaacgagactagtggtatgtaggaaactgcggcggctgcaagcaaagacgtacccaccatccactttgtgcacgcgagctccggcgacatggatcaccattgttcatcgttgttttcccctcccgcttactgcaattcctactatcccccgttgccgccgcagcccgggagcctggcgaccaaccagatagtggcgaggttgatggctcagatgaactacgaggagggcaccggcctcggcaagtacggccacgggattatcgatcccatcaacccgaccaaaaagtacgggaaaggaggcgttggcaaattcgagtcgtcgtacgatagcgattcagattacaacacagggccgcctgtagagcccaagctcgagcggggcaccggcaaagcagagccgaaggctgttgtcaatgccgaggaggtccgcgccatggacacgctgcagagagaacgcaaagcctatgccgccgcgcgggcgcgggagcggcgccacgagaaggttcgggcctataacatgcgctggcaacgcccaccgaaacatgacgccgccgccgacgacgactgggaagtgtaacatcccggcctagggcttaataggattaatagaatactcatatcaacaaagttgcaacttcttttccagaagccaatctccaaagaactctagggttaagcgtgcttggcctggagcaagttgggatgggtgaccgaccgggaaattcttcccgggtgcacacgagtgaggacaaagtgtgcagaaaagatatgtgttggtctgtgagggcagtctatgacctatgaaagctatcagatgtaagcgggggcgagggcagtttatgacctatgaaagctatcagatgtaagcgggggcctgggggaaggcgggacgttacaggaggggataacctccgggtatacggccatggcagtctatgacctatgaaagctatcagatgtaagcgggcccggcctaggggaaggcgggacgtgataacctccgggtacacggccatcaagcgcgtcttgaaggtggtcctggagcagagcgagtcggggaagctcacattgggcggccatggcagtctatgacctatgaaagctatcagatgtaagcgggcccggcctgggggaaggcgggacgttacaggaggggataacctccgggtacacctccgggtacacggccatcaagcgcgccttgaaggtggtcctggagcagagcgagtcggggaagctcacattgggcggccatggcagtctatgacctatgaaagctatcagatgtaagcaggcccggcctgggggaaggcgggacgttacaggaggggataacctccgggtacacggccatcaagcgcgccttgaaggtggtccgggagcagagcgagtcggggaagctcacattgggcggcctgatccatgagttcgcgggagtgaaggcgaagttcccggaggagtacaggacgaacagtatgccgtacaaggcgatcagcttcgcggcgccgctgctccactcgcagctgagccggcagtacagcgcaggtgagtatggaggcacggagccgttgctgaaccgtacacttgtcatggtagaagcgctcaaggacacgctgggagcggacgcatcagcggcgtaccctcgcctgatccacgacctcgtgatggcacctcccttggatgcgtggtggtggagcgctgcctccttctgcaagctaccatggattccatcctggatgaggtcatcttgcccacgctggtagccgcggcggacgtgtttaggctgacgacgtggtcgagtaagccgagcgtttgcgtgggcatgtggattcctcatctcggccacgcccgcctacgaatagtgtacatcattataagcaggcggctcagagatcacctgtgcggcgggatctctgactatgactacaagcttgcattgccatggaaaaaggtgttcgatccagcaagctaggacgaacacattgagcggcacgtgctgcctcttctgaggaaggctctccatgatcttgagatctcagtaagaatgacttggctacaaaataaaaacttcttccctcttgtaatgaggtgggcatccatcgtgccggtgaagtacatggtgccgcttttgatacaagggttctttaagaaatggatgtactccaactatcggtatctaatgggagagaggccccggctggatgaggcgatggcttggtatgaagtgtggaaaggacttttcacaccggaattgctcgcggagaagtgtgtggtcgtgtagctcgaggctggcctcgacatgatcaaccgtgcgatgcaaggactagagataagcgtgtcagaacattagtaacataaactgctgaggcctatgcgagttcgagatgctgagcccctactagtaagaagcttgtatgtgttatagatattgtgtttaccgaggccaattcatgtatgccatctactatcatgtaatcgtgatatgaagcttaagttcagtttttgcctctttgcttgttatatctatactatgtctatgaatgccatttttactggcttttgatttgaaaatgaatatgaaatgatttttaggagacgttttgccagaaactaatcgtaaaattctgaaatagtacgtagttagcaatcaggaaagcatgcaagttgtacttgtagatagagcagcatataacatttgacaacagagttgtttaattttggtttctaatgaaaatcaatcaagacggcatttgatattcccttttctaatggttcctttttggaacctcaaaatgtgaaaccgtctagggtggagaactgaagaaatttggaaagatttcaaacagtacgtcatcacacgtcgccaacgtctatattccctcttcctcgctcgcattatcttcttcccaccagcctgggttatcctgtacgcttttgaatggcttcctgtttcggtgtttctttccaaatcagctgcttgttagggttgccagtttgccacacagccacagctgtggcgttggcgccgccccattgacctgagccagcttaattacatttcgggatgtaagacttttcttgtaaccttttcttccaatcttaattacattgaatgacctcttagcaagcaaaggcaaatgtaaaatacatctagatctcatggttcataagcttaactctctttactgtatgtaaacaaggacgagcttataatataatcgcgtaacctgagcaaagataccaggtacataagcagaacataactgtatgtcagagtcacagtgcggagggacgcttcctcgcgcaaagcggcgtaaagtaccacctgtgctgggagatcggcttctcgcaagcccgcaattgcacgaatcagagtaccaggtagcagctggcgttcgcttaaaccggcttaaaattcagttgacgaaaggagtatggactatgataccatcagccatcaggggaaaaggtcaagcaacaataccagttcattaacacgataacacgaaacattacataacatcgaaaatgcagaggaagcacgccatatttacagttgttccttcccatcagcaccgctacatatttacacggcctaaatacgtgccagcccttcaccactaggccatccatcagacccttcagcaccagggcgaccagacacaccgatacaagcaggactgacgtacagatcactcgagcttgttcttgtgggaatatgtacatttgtcctgctctaagcaggtggatatttacatgtggacacatgtgcagctaccagattactcgggccgcacactgacgagattgggcagggcagccaactggagcttcttgatctcaatcgcggtcaccttgcaggactccagagacaaggacctcaggttctggagtggcttcagatggtggagcccagaattcgacacccgagagttcgacacgttcagggagaccaaggcagtgaggcctgtacacatggaagatatgcaaataaatagataaattgtgtgttgaatgctttcattcctgacgagcgcaaaagacatacgggaaatcagctctaaggatttgtcagtgaggttgccattttgagataggttaagcagcgtcagagctttgaggtctttgatattcttcactccagcatctgtaattaacccaccgcagacctcaagggactgtagattcttgaaatctgaagaatgcattagcaaacagatttaagtgctacgtgatattttgatgcataaaaataacgagaatcccccaaatttccaagggaataataatttcccagtaaaatatgcaccaagatgctgtcatattcaatgctaataatagcaggggttgagaaaaaaaaagttccacagaatgctaggttaataggatttgctttatgtgtgcacaatgataagctcggtgctacacaagtgcaaaaaggcccaacgtgccattatcttaactcttatagtaaactagcttgttccgataatccaaaatcaccagactagtaaacagaaccttagcatggaccaactttttatgtgcacacttacatttcaagcagtttgtcccagcatcagttatacgagctccaaatagatcaaggtgtgtcaacccagtgagacctgcattaaacaaatgtcacttcaaggcaaaatacaaccaaaggactacacaacgatacagaactggagaattcagacgataaccttgtagccaaattcttactcctactacaatgcacaacaatcaccatttgattaaagcgaaacatcaaaccttgagaggaaaggaacaccatcctaaacagacataaaaaagaccaacactctacatgccccaaaaaataacgtagcacccaatcatgccatatccaattaaattgctaaaatgggtaagataccatgtctaatgcataacaggaaacccaatcatgcacgccagtattaaacaatgtaattttaccaaaaatgaggacatacatgtaagagctgccaaaccattatctgtgatttggcgattatcaagattaagggatctgagtgaattcaggccagaaattttcttcaagccaatgtccgtaaccaatgtaaaagagagattgatgctctgcaaattccgtaggcctgaggagatatattagttgaagaactgttgtgagtaataactaaaaactgaaaccgcttgaactattcaaacatcatatattttttttaaaaaaaataaagtcaatggcactagcatttgtgcagaagattaaacaaaccagagagatgacgaagtccattgctcccaacttctgtgtctgaaagttccaagcttcttagtttcagaagtcctacagcacagagagatgtacaccaatgatttgagaccccaaaaaaaaagaatgtaaccagtaatacaaacaattaaaccaattaagaattccataaggaacaaagtatacttagtcaatgctaaactgacaattgcggactagtctggtacaaagcactaatactatatgccattaaacaaaagtaaactacgacttactgcatgaggcttattgtgtgattctccgccttcagtgttttatgaaatactagcaaaatgccagtattttaaagcccataaaaagttattcctattgtctaatatattgtcatcatgcaacttatgttgtcactttctagctttgtgcctgataagctagctgtagaaataggcaaagtcttatttcactgttggtgggtcccacactaccatctttcgtataagtatagacaagataacaggaaaaacaaagaaaagacatgacaactaagaaactcacctttcaaatgtgctagcccctcgtcaccaatcttgcatgagtccaagttcaaacactccaaattgatcagttctacaagaacagaagaacatcaggaaagctccccacttcatgtgttaattagcatatatagtatataatgatgtcagacttctgacatgtttccagaaaaatcaatacaatcaagtgggtacaccttccacttggtgcggcgtaaacatatatattgaacaaaaacaacatggcaaaagtgaaacaaaagcgtattctggtatgcatctagtctcatatcatcggcaattttaatgacagaaacaagagaatactggtatattaagaaaatataagtgttatttcttgagtaatagtgatcaaattctatggattttcacagcagtgctttaccaaatttcaggactcacttgtcacttagatcacagcgcttcaaatttggatgctagaatgctaatttttaaacattattctacattgatgtcaaatatcatatgaagataaataatgaagagtctatttaccttttagatgaaccaagcaggcatctgtaatatagttgaaccctaaattgagaaccttcaacttgacaagacctgcaaggcaagaccaccgacaacgctaagaagaagtgcaaccatgtatgatgaagaaacagaacttaatatggacagcttacacaacgagacataaagtggcatatgttcctatttgtagatcacaaaacatcttaactattgttgaaaaaaaatggtaggtgaactgactagacgtacactgagaattaaccaatttataactacttagtttgtcatctgcatacaaagggcataatttcctatttgtagacaaaaaacaatgcgctctgcaaataatagagaattgtgttcgccaaaaagtcaacgaccagaggttataatattaccttccaaatgctcacagccttcgtcatatactccacatctactaagattcaacaataccaatgaagccaatcctgtaataacatcactattaatgaaaacttttttgagaatacgcacaaaagccttgtgcatcttttgtattaagagaaagggagtttttaaaactttacaatcttccgctgaaaggaaaacaagcaaatgagaaagaaagaaaacacaaaaggcgtggggctatatctcgcaacaagtttggcaaccgtttagtgagcggtggctcagatgggcaggccagccacacgccagaccgctgcttcttcctccatggccgcgcttattaccccccccccccccccccccgcccgatttcctctcgttgttgaacaccttattgtttctattaatgaaaatatgatctcaccaaacagggagcttgttaagtgttcatgtaatcatgaaatagattacatcaaagagcagtacaccagagttgtcaaacatactgtacgctgagtacagagaaatatcttaggcaactaaagagttctataaaccagcattctaatcgctagctgcgcaacagtaatatggtaagcttacgcttcacagagaaatataggactgaaaaaagaagaagaaaatgtgcctcaagtcaacaatgaatttcctttgaaaataataaaatgaaattccattaccatctataagcaccaaaagtaataaaaaaatctctcatttacaagaagcagcataatagtcctatagtacttcctccgtttcacaatgtaagtcattctagcatttcccacattcatgttgatgttaatgaatctagataaatatatatgtctagattcattaacattaatatgaatatgggaaatgctaaaatgacttacattgtgaaacggagggagtagaagcaagacactctcaagttacctagccactttgtcattctcattcaacttgcaaagggaatttctaaaactttcatgtcaaatccaccagaagagatttctctggggataaatccatgaggtagttgactatatatagaatgagaaccaaaagaaatgtgtgaaatttcatgacatgcacttcttcaggtccctaaatatccatttttggtaatgaatttaatggattattctacatgagttctggcagatgtggcaccctttcaacagtcaaattaaattaccccaaggacttccctagaataaatgtaagacattttcatggaagcgtgaactgataacatagcactcgtatggaaaagatgcaaaacctgaaataacctccaaacaagcagcagttactgcacagccctccaggtttaggtgagctagcttcgatagacctgtaaagaacaaatacaaaatatgaaacagaggctaactttagatgaaacttcatgtcattatattaatagaaacaacgaattaatcagaatattacagatacaaatggatgtagctttaggtagataaggttccactggaaaaggaagaaatttatttctgggatacctcttagataagaaacaccaagatcacttattttgcagcaagaaagttgaagctctctcaaatttgtaagatctacaaggaaaagggtatttattagacgtgcagatcagtatgtgtgataacatacactgcttgacactagatggtcaacataaaggtgttacctgataaatgtttcatatcagaatctgtgatgccattacaatacctcaaatttagcttttccagttttctcaagcctgaaaaagaaagttattattggatctgacagaagtataattaaaatgtattcacgattgagtagcgtttgaacaaataggtagcatgccagtcttccctgtatttattacaaagaaagatatataaaagctctggatgataaatatatctctgtttcattggggtgtagggtgcggggaacacatggtaaatgataaaattagatcatgcatttataataaataagttggctgtggttacattgtgatgatatattaatgaaatagcaggaaaccttttaaatgaacaagtccaccatgaatcttcggacatcgctcaaggtccaagctacccaaattaaccatgtttgcaaaggctttagctccttcagcagtaacagcagaacattttttaaagctcagggatgtcacatttgagaggcctgcagaattaaaaagcaataccataaatgacaggaacagaatatctagtgatcaggaacattgacaccactcttatcatagagatggaagaaaactcaactctcaggctatcagaaaatcactaacctgacaatgttttaagtccatgctccgatatctgatcacagtaattgcatgacaaactttgcaagttgatgcaatccttgagttgattcagtccaccatcagtcacatcagagcaagagatatcaacagataacaatgattgcccttgagaagccgctacttccatccaagcatccctcaccccagggtagtctgccaaacagatgtcctgagaccaagtagaagaatagcataggaggtcaatatctagtctcagagtaacttatcccagaaacaagaaatactccaaatttggtcctttctttatgtggcacacaagtaaagcgattgcttggcttgcttgtagcaggaagatagaagcatcatctgagttacacagaataagatagcagctgtgcacgtgagctcaactggtctattagtatcagtacccagtggaggcttccttgagtggattttcctcaattgcttacaggataaattttaccaacacattttagtttactttcctgagttagcttataaaaataagctataaaatcgtttacaacatagtaagaattgttccaacaagatgcctttattcgttccctgatactacattgaaagttagaaactgctacaagggaatgtcaggattgcattccatagagtttgcaataattccatattgattttccttgtttagaattgagtcatttttttcgcgaacgtgtttagagctcagtcataattacgtgccaaacaagatcaagcacttcacctgcaatgcacaatcacgaaaagctccaagcaactcttcagtgagaatgttccactccaccagttcattaaatacctgctgactaagatctctaggcagcagcgagaaatcagaatacttcccaatatcctgaaatcacccctcatcaagtcaggcaacaatacacacagaaaactcaatcatccaaggccacaagcactacctcgcggactttggccacacagagctccattagcgatgggcaccgcacaggcactggtccctgcaccttcctgtgtacatcagagccgctgcggggcaaggtgtgcagtagccacttgaagctgctgctcttggagaaccttgcactgtagagatcttcctcatcaacaagcagctggcctcttttcctagagcaagcactttccatggcgacgatgcgagcaccgatcacaaaccaatcacttttcttgatggactaaaaagcgcatatcattctagctcgtgactgtgtgattctttgtcatccattcccagcacgattacgacttggcatagacttcgctctctttggccccattctgcacatcaaacaatcgtgtaaattgacttaaaattatcagattatatacagatactgccaaacaatactaaaccccacgagtcctcagtttttggtgggtgtgttcatctttcacgcaacctaggctcttacaataattacggattgctgccaatcctaagtgcaatccaggaaaactaacagatgacactagctcaagaaaaatgaaccatgtcttacgaatcaaagcatcaaccctatctacgtattatcaaatcccccaaacccctaatagttcagtcactgtaccctactttcgattgttccacaccctgttctgcaaatcactccatcaagggagaagaaaccgtaaaattaaaaaaaatgcccaaaattccaacccagaataacacataagcatcgagagagtacgagttgggcagatcaacacgacaaccaaccaacccacccacccaataaaatcgcaacagaattacacagaatacggtggtggagaattacccgattggatatggaaattctcacagggacgcaaatccaccaaaccctaggccaagcaaactcccggattagagttaaaccaatctatcgcgattaaattacctctaatcacacagccaatcctcgccgagaaagagagaggggggaggagagggactcgagaaggggaaggaaaggtggagaagaaatggtttatagcgagagatggagcaacgtgggagctccacgtgtcgccccggaggcccgagctggtacgcctgccccgcagactctgtcactgacatgtggggtaggggtaaaggtggccaacgttgtcagtgggtggagtgggtaagaaggttggtggcgctgtgggggttggggggatgggggccacaggggagtggaagggataaggcaaaagagtaccgggcgggcgctcggcatcccccggattgtgctgccggttttgtgggcccgcgactgttggtccgttctgcggcctacacgtgggccccgcggttttacttctactggtggttgattaataagtggttgttactccggtttaagggcggttcagattgacgttattttcgatcatattatttttttaaagttgctaaaaaaatatcttagtttgtgctaaacttggtaaatatataagaaattttgctaaaattttagcaatattactaatttgccataaattagtaaggtttatttttgcaacaatttgaacaggctttagctgggaaggagtggtcttgtaatacaagttaagagttgttactatgggctggtttggtttgtggtctaaattggccttaccaatttttatcaatgtcaaattttgtcaacttttggcatggctaattttggcaaaggtaaaattgtgtttggattgaaaccaaaatagcctaaattaactgttgaaatggcctattttcttaggcatgccaaaatttggctccaaaccaaatagacaataaacactattgaaattgacaaatattggtaaggccaatttaggcctcaaaccaagccagctctatattaggagagattatattagaagaggtcgcatacccatctagattgaggtcgtgtttagttcaccctcaactaccccaaactttcaactttacatcacatccaaaactttcttacacacataaactttcaacttttttttttccaaacgttcaactttccccaaactttcaacttttttcaggaactaaacaaagcctgagtaattttgggatggagggagtatgtctgaaaataactttattcttattttcctttttaccactggtttgtatttttctattactttagtgctctttaccaatcccttgcctcttacctattcaccattaatcctatcattttattaatatatgcttgcttcgttcataaagaactaagtataatatgtgacgcatcctattaattaagaaagggagactaccttatcgaggacggtattgtttctcggagtaaaagaaagctagtctcggggaaggtatggttgcttggagtaaaagaaatatagtagcaaaggatagttggttttgtgcgaagaaatagtgttttctattttcaagtgagagaaggactaccttaccttggatatgttaggatttctcttagggtgtgtttagttcacgttaaaattagaaatttaattgaaattggaacgatgtgacggaaaagttggaagtttatgtgtgtacgaaagttttcatgtaatagaaaagttggaagtttgaagaaaaaattgggaactaaaccaggcctgagtaaaaaaaaaaaagcacggtgctacgaggagtggccttgtttagttcccaaaaactttttcccaaaaatatcacatcgaatatttggacacatgcatagagtattaaatatagataaaatgaaaaactgattgtatagtttatatggaaatcgcgagacgaatcttttgaacctaattagtccatgattagccacaagtgctacggtaacccacatgtgctaatgatggattaattaggcttaataaattcgtctcgcagtttctagacgagttatgaaattagttttttcattcgtgtccggaaaccctttccgatatccggtcaaacgttcgatgtgacactcaaaaattttcttttcgcgaactaaacaaggccttagagtcacacccaaaatcgaaatgaagctattttgggatagagggagtaaataaactccatagatgttgcctcttatttcggggtattttggtttagggtagtgctaaaacttttggtagttttccggacgtgtttatagagaatgagcgtgtgcttataaaggtgagtgagagcatgtgtgtgtatgactatttgtacttatactatgttttgaaaagaaaaacagtggtgttaaatcttaaataagtttttgcattatcaatatttttggtatggtggagtagctttactcgaattgattgacaacttttgatatcatgcttgtttactttattgccaacaaagtaaaactgatcatttgtgagtaagacgtaagccaaagattggtaatgctattgttaaggacgtatctacaacgagaccgttctctatatagtcataaccaactaactcaatctcatatctaattgctactagtatactcaaaagtgcatgtatttttttttcttatgaaattttctcttagattagtcatccgatttacgatccaattacaccattatgttcataacaattaaatctttataacaagatctcacatgactatatttttatgaaaaaatacaaattacttttataatatatgtaaattacttttagattacattaaattacttcttagtcataaaagtaatttacctatatatagaagtaacttaaaaaaagtaaagtaacttgttacgacattaaaagaaatatatacattcataatgttattcataatattgtgagttgtttgttttacaatcatttttagtcagtgacgtaatttgtgccggttaaatttaatttctatatagactcatgtttttacctccataacggatttaattttgatgtcgtgataaagttactttctttctgttttaagttacttttataatttatgtaaattacttttagactttactaaatttactataatatgtctaagtagtaatttaatgaaatccaaaagtaatttagatatattataaaagtaatttataatttttcatcaaaatataatcatgtgagatcttgttataaagatttaattattacgaacacaatcacgtaatcggatcatagatcggataagttatttaagagaaaatttaatttgaagtataagtggttcctatttgcttgaaacataggggataaactactctctctctctctagcgtagtagagtgcgtcacatgctttccgatttggtctgttctggccttcttggcaatatcggcatgtggaacagatcagacgactacaccagcgtgtgggatcggacggtcctagatgcgtcgcgtgataagaccagatcgagaggcctctcgacttagattttatgtattgttaagttccgacaaggttaaaaaagtaaattaaaggtggtgttgagtcttatatcttattaaattttggtgtagtttcgagagtaaaaagggtatggaattaccaaattttgattgaggttaataacgttgcaatagtaaaatctcttgggtgtgttctcaacttcttctctctcgttttcacacatagcttcctaaactgctaaatgacgtgttttatttaaaaaaatatattaattcatttttatatacaagagagaagttcgtaactttgtatcccgaacacaattagacaatggagcgaacaagcacatcaatccaaaatgtagaccattctattaatgctattatattttaggaatgttggattcaaaccaaatagccttcaccgttgacccagtcgggaacccaatagcacacaaccaccatcaacgtatatacggtatattcgacccgtcatcatgataaaagagatcattagtctggcatttacgtaagtattttttattagaggaagtaacatacattggtggagaaaccatctttggtcggtcaaccaaaattcataatagtcccggttccactaaaaactgaaactaaagatgatctttagtcccggttccactaaaaaccgggactaaagatcgtatgttgtcaggggctgtcaggccctcccgtgatctttactcccgattggtaacggtgatctttactcccggttggtgttaccaactgggactaaagttaggatttttagtcccggttaccaccggtaaaacaaaacctctatccacgcgcacatgcaaagtctcctattaattccatcattatctctcctctcccatccagccatctccatcttatcttcttctctcttcctctcctcctatccttctcttccttcttttctcaccccatctcctcctcccctctctcctccccctcctcccctccggcgggcggtgggatggaggccgccgccggcggcccgacgcagggcggcgagatggaggcggcggcggccggcgccggtcgggaagcggcggctggctgcgtcgggcgcgagacggcgagatggggccggttgagagggcggcggccggctgcgttgggggtggccggcgccggtcgggagggcggcggtcggcgctggtcgggatggcggcggccgacgctggtcaggaggcggcggcaggagaacttttttttctcttctctgtgctatctgatgaatgctgaagatattgtagatgtgaactttctttttcctttctttgttctctgtgatgaatgctctctgtgatgagatgttgtagatctgaacaagtgtaaacaatatggatgctttgttgtttgattttattcattcgatctatgatttaggctttgtcgttgattttattcattcgatccacgagcgaaagctaaagaacaataaaaaaggaaaaaggccaatcggatgaaaggaaaaggaaaaaaaaaaaccaaaactttttagtcccggttggtaacaacaaccgggaccatatttttagtcctggttggtagactaaaaatcaatctttagtctcggttatttgaaccgggactaaagatcgcacactaaccgggactaaaaatcaatctttagtctcggttatttgaaccgggactaaagattgcgatctttagtcccggattcgtagtcccggttgaaaaatcgggactacaaatgattaccaatcgggacaacaaagcgtttctccaccagtgatagaccatgcttacatttgtcatacgttccatcataatctactaacgaattaacggagaaaacacaactatcagtaaaccaatttatagtgttttggcacaatttgattttcttctcgatgcaagggttagatacagatttgaatcaatatttatatattactaactttttaaataacgttttaccatttatcttatttaaaaaattagtgtaaatttgctaaactataagtagtacttaaattttctataatgataaaagatatcacaacaaaataagtaatattatataaaatattttaataaaatgaatgataaataaagttaacgatattatctattaaaaatggtaggagcagtacttgggccctgatcttttctaaccctaaacttcaatttcctcccttttgtttttcatgtttcttaaacggtttaattgatgtgtttttaaaaatattatatagaagttgtttaaaaaattaaattaatttattttaaaatttataatagttaatacttaaggtttacgcatgtagaaaattttccttatatttaaagcaacgaacggggcttaagaagacaagaacctccatgccattatttgttgaagaatttcccaataactttcagaggaaaacaaaaacgatgaaatttcccatttttcacgcttttctaggtgatgactgatgagtagtgcagagcacctgaacggaaatctcccccatatggtccggtcccgatcatctttctgaagactgtaggcgctgccgctgacccggacggcgcggtctccggcggtcgattcgccgccacgcaacgcaaccctccctccctccctccgccgccggtcaaacctccgccccgccgccccccacccgagcagcggctcacgcacacacatcctcctcaccaacccacccgcaccgccgctgacgcgtgggcccccgagcccacctgccagcagaggccggtggcgccaacgatatactagtataaaatatattcagctcgtcggcgtcgtcgtttaccagtcgcctcgcctctcggcgtcccggtcgtcggtctccgctgcctctctctcttctctcttgccctactctactactactaccagcagcacacggtttccgtgaccggagcgcgcagcagccgcccacctaaaggctaaagatccgatcaaatcgaagagacttaatataccttctttttttttcttgagaggaatatttttttttcgctttaccatttcttcgtccctgggggattttcggggggattctgaggagcaagaagcattcggccgcggcgggggtccggcgctaagctcgagagattcttctccggtgagtccttttgctttcttggagctctatcctgacgcgtggtgtttctgtggtggtttggtgtaatcgttattgcttgtttacgcggttagattgcttcatctaaaacaaggatggttttcttgcttgatggtgtggatggcaaaccgtaggaggtttgtcgcatcaccgatcgcagatgattctaccgttgtgttcttgggacatcgccatgggagcctctgtggtagtactagctttcttgatggttaccctgtgccgtcttgtatgcatttttctataatggacagtcacctcgcgttaagattgcgtgttagactttctgaagctctaattttgctataatagcgaggggaagaggggaatacctcgtttggtgctgttctccatttgcgggatagctcaaagtcaactctcagtcaactcatttctttgcctgctttctgtacacatgtgttcgtctatgttataatgatttggttgttcaacaagttcattaattgggaccttatcggtggtgatgtgtgtagtaggagtgctatgcgtactacatagcacgattttgcttttgtaatctgcattcttgttgcatgcattgctcagttgctcaacaagatactcgctataaatatgtagaggtcaaagactggcacttaaaatgcattgtgcaaggcatacgccaaaaggaagtctacctatggtttgggagataattcattcatacaaagtgtaactaatattgcaaaatagcatggatgtctagaaccgaattattcttctactagatggtaaattgttgttccactcattatgaatcttctgattacacgtggagaagctgagagttctcctttcttgattgatcggtgcatattttggtgacaaatatgtctatttctgctattcattttgtactaatgtactacccgggactcatgttatcgctcctcgtatatcttttagtggcattctttccaaaatgctaaactgaatgcttcgatctttttgcagtttggattgcacttgtcagagtaaaagggcttaggacactatgctaatttaagacatctcatccaaatgaggcgcaccacacttctttgttggcaaactgaaatcagatagcattctggtagccactaaacctacagggatgtttcttgtgtgttttgaagccatgtgcccctgttttggttcaagaaggaaggatgggagcgaagaccctgttcttggaagggatggaaattcctgtaagttaaatagcaagctttcatctattggtgatctaatctgttaacacaatgaaacaatgtagatgtcacgtttggaagtataaatgaccatcatgaattgtgacacattccttcatccttgtttttccagtgaattcttctgagctgaggtcaatgtctgatagagttcctccaagccctcttcgagtacctgcaagtccatctagattttcattgtcttcatcaccaagtagaaatgagccattgaacctgagtcttgaacaagttattaaactgacacataactttgcaccagacctgatgattggtgaaggttattttggaaaggtctacagagcacagctgcgagatggccacattgtggcaattaaaagggcaaaaatggtaggttttattttttatttttatttttttaataaaaagcagtgttggcgcaatgatagtggctgtcaacaagcagctatactagagatttctctatttagaatgactgaggtgttttttttcaagtagtctcgctggttgatccatttttgtgtagatcagtacggtaatgaaacagtaatgcactggtaaagcatgtactcacattgcattctttgcaccagtagttgtggatagttattataatttggtgtttttcaccgcttgatcttgttggtcactagtcaaatttcttttgcaatttatatttattcaaaaggtcctgataaagtattaaagttgctgatagaaactctgcttcctacatgtgatttttcttacaagtgaatcgcagttttcatccggtttctttatgcaggaacattttgcctctttacgggccgaattcagtaatgaaattgcattactaaaaaaaattgaacacaggaatttggtccaattacttggttatatcgacaaaagaaatgaacgaatcgtcataactgagtatgttccaaacggcactcttagggagcatctagatggtaaactgcatactaagattctcttttgttgaattccatatagaacaatcagtaattttcaaattatctttcaggtcaacgtgggcttgttttaagctttaatcagcggcttgaaatagctatagatgttgctcatgggttaacttatctgcatctatatgcaggtatgctttgtcacatgtttctgttgctgagcataaaaacagtttaaaaaaacaactgactgttatttttatttttattttcataccaagtcatgcatcggggtattgtcactaagtaatgcaagaactgtaaaccagtattttaactatattttccccctctaaaggttggtccattggctcataatctgctaataaatgctagtatcagatatcctgactgtaatgttctgtagttcggaaattgtttgtggctgtgcatcaataaaggttgtgaaatgagcctaacaaccaagttgaataaaccatgaaaattagccatgtaatcagatgtgtatctgattttaattctttgatcttcaagctttaaagtagcttacagagattctagtttgactattcctattggcaatttgcatatgtattttatttatttgttctgtacttttatgcttttagagaagcccataatacacagggatgtgaagtcatcaaacattctactaaatgaaggcttcagggccaaagtggccgactttggatttgcaaggactggtcctacagagccagaccagtcacagattcagactgatgtgagaggaacagctggctatgtagatccagagtatctcaggacaaaccatctgacagtcaagagtgatgtattctcttatggagttttgctcctggaaattctttctggtcgtcgtcctattgaggtcaggagagctgcaagagaaaggatcaccgtgagatgggtatgtcttcacttccctactttgtgtttacattggtttagacttttgtttctttccattgttttttctagataactatttaggagcaatttacctttgttctggttattttcttgcccccctgacccctcttgcccctgcatacgctcttgcttttctttctcgagcagttatctgcacatgaattcattttctttgtcgacaatttgcaatcccatcacaagttaaaccatacaacatgtaaacttccagtg

SEQ ID NO: 6097 - DNA, 191969 bp, Oryza sativa
  unsure (1)..(191969): unsure at all n locations
gataatgcagtttagagtactatagtaaatacagtagccttactttaggcggctaatcccgtcaaacctgaccaaacccgtgcaacgaattcctccgggctttgtatctgtattcttggctgttcatcgcaaatctgctcgttcaaacttcaaaaggccagccagcaagcagtagccagtgtacataaaagcacagtgattttcttagtgcatctctggatggacatggcccgttaaggagatcagctctaagcgtggtcatttgtggaaacaacacctagcacagggcagtagtgtagtacaagggtatttttggcaaaaaatattgtggcattcttgtaattcaacactaatatagggtgtaatccgtaattgcacacgtcagcaaaggccgtgggagtcgaccagatcgttattttttttaatcttcgaccagatcgctactgattaattaccagcgttcgtgtgaacaataatttcatggattagttagctcctggacattgctgaactacaaacagtgttgagatcaacagtgtgaacaataatttcatggattagttagctcctggacattgctgaactacaaacaatgttgagatcaacagagcattagttccaggccgtatcattgtttcttgccgcggtttttttcttctcttaatttcgcatgaagatgtgcatttcccagtttcatgaaacagacaaacaaaagttaaaagtttacagttttattcccagtccatctgaaatgaatggccaaagctcctgccatccgtttcggtaaaaaaaaatgtcagcgcaaaagttagtgaaatgcatattagattctgtttttagaagagaattcagagcactgaaattcaatttccatgggttttgaaaatacagggcaatgaactgaagggggaaaaattataagctagcagtgcaatatccagtactgtcagaattgtgatcttattacatttaaactaccttacccttttatttcttctacggttaaatttgagggtacaaaaatctcaaggtgtaatcatgaagaacaaaatatgagccaccaatgcaattttcagtacgactactttcatgcacttccatgccttctgtaatactgaaaatctgaatcacagaaactgcaacgaattcgaaaccaaagcaaaacacttcatttcttctcctcgcagagattctcaacatcaactgatctcctggcgacaatgaattcagagatggcaatatcaactgttcgtctgctgcaacataggaaatatatgatgcagttagactgtgtaataattttcagaaaacattgaatttaacatccatcatatgttaattatagagtaaattgcaccaacggtacaacaacttggtagatgggtgcgatatagtgcaagaacttgagaattgaacgttcgagtgtaacaacttgacaagtgggtatgttctagtataagaacttgacaatttagtattttggtgcatcaacttagctaagaatatgctaggtgagtttttttcacgatgtcaatatgccattacatagcaatcctagggatattaccttataatattgaatttaatctttaagaattatactgtacatccaattaccttaaagaatttttgttttcttcatcttccctaatcttaaccgaaatataataatttctacatccagtttaattgactttcagttattagttattaggataaaaatataaatatgcttatgtacacatccatgccagtatattgtcaaaataattacttaaaaattgaatatgtataaatagtgctccaaataattaagttgtcatataacttcttaacttattgtatcaaaatcatacatatcttgcaagtcgttgcatttaagcgatcacttatgaaattcttatactaaattgtacttagctgccaagttattacactagaacgctcatttctcaagttcttgtaccaaattgcacccacctgctaagttgatgcaccgtgtgtgcaatttactcttaattatataagcccaagttgaaaaacagtgcatggggaacttacacagtaattacaaaatcacaagaagtctcacctttttgtaactctaaagatacatctagttttcaagaatatatcaacaaagggaaaatcattatagaacttatatccttctgcctcgcttctaaactccttggttatcacactttcattgtttgcaacctcctccaaactaatgtgattgtcagccattccaaatttctgcaattcatatttccaaagttcaactgttagtcaaaccacaaaatttaatacaaccaaaatgtacttatatgggcaaatgatgaatcttaaaaattccacatttagagtcatctagtatactaagcttatacggctgttatgtgtacagtgatggcagaagtatacagtaaatcacagtttaagggctacatatatgcacctgatcaggtaagttcagggttaatttcctataaccaattatacccatatatagatttataacacaactacattcccaataattgaatgattacactccattgtgaatctgacaatttctgttttcataaataacattaagttataagtttactgctaataaatccaatctaatagcatatatagcatcaaatttaatctagcacagttcacaccattcaaacattattgtatttatgtaatcgcaggaaagatcaaacaccattcaaacaatcctgtattcctctaatcaatagcaaatacttcagacctgtctttctctattctatggcagctagcaaatcctgaagaccttaaactacgacggtaattaatcgattagggaaatggataatcttgctcaaaaagaagccttcctaaagttttttgctgagcagctgctgcattacctgaataaaaatagagaggtggcaatgactccgattccaaatcagacgagggtcggcgactccatgcaaaacgagggcaggcggccgttggggagatcatcgagaatcccggcgtgggtcagcgaggtgtccggcgggggaaagcgaagggaccggcgaggggcaatgaagcgccaggggccgcgtggtttgtcggcgccggaccttgatgactaaggtggacggcagtggagggggacgacgagggcttttcggcgctccggtggagggacggcgtggcagcggcaccggcggagcgctcgggctctggtggaggggcggcgcggcggcgcgctcggtttggtggatgagggcgatggaggcggcgaacagaatcaacagatggtgggggatcgggagaaacgatgaggaatactgtgcgaacgcgaaattaccgaaatatccttccaccgaaataaacataaagactaaaatgcccatgacaattaacggtcagatataatcttactacactactacacgtataagtgggggcactgtaaaacgtccccgcaggcaggaaaggcaaacagctggggcctccagaaggaagaaataaacacaggagaggacaaggagatgcacagccattagcagagaaaaaaaagggaaggagtaaggacaataatcataacacgcataaaattgtactactacacctagctagctgcgcggaggaacaagacaaagggcaagtggtgaaaggaatcatggaccagaaggatgatcattgccatacggttgaaaaacgccggagatatatatatcgtcagattatctatccacccccatccatattctttgggtttttaaattacacggcctcggagaaagaaattaaggtccgaagttaaaaaagagtgagaaaaaaaaggatcgcattttcttttgtgagagctacgaggatccacccatgcaggaaaacccgatctgatctgcagatatatgttctggtgatcaacagttcaacacatggagcgatctcatgcacgcccacacaaattcgtgtggttttgggcaaacgcagccgtgagctttttttttttttttccctgaagctcctgtgtgtcatctctctttttcttttttgagctagaattggcaaaacttttttaatccggtgtcttttcatccgtgttcctgtgaaagcagcgccgaaaactacccccgctttgcaaaaagaaaaaaatcctctcgcgctttgttttttttttttttttttttgcctttgcgacctcatcggcatccgctttgcgacccggccgatgaagagggggaccggggagacggacggacgctgtgagccgcgaatcccaccagcgcgtgtgggcccacctgccacgggtgacgcgccggccggtccagcctccacgcgagcagcgggtcgggcgcgtcccctctccttggcggtcacgaacactgaaaaacccgaatccgataagcggccgctataaataccgggccaaatcagggtttcccttccccagccgcaccgcacgctttcttgcataagaactcccccccctcctcgctccccgccgccgccgccgttttcttggagaggagaaatccgtaggctcagaggatttttggtagtcttgtttcgtgatattcgtgaagagggggggagctaaggggggattcgtaagatcagaattggatcacgcgggggcgcgctcgggatcgggggttccaaacacagcttcttcgttgaattgtaagtttcttcgctgaaaccctctccgtaggttggtacttctgatttttttttcctttacagattttgtggtttgtagggcgtattgctatgtgttgctattgtttatgatgggaattttggtttgttggtgtagataagcttatctatgtaaaacaaaaggtcagtaggttacctctttgatcttgcttgtgcagttaggctatcctgtttgagttgttcgtgatttgcagattactgcaaaagctatcctgtaaaatttcttgtcgtggtaaagattgtactaagaatttttgtgtgttcagatcctaagacatagaaaaatagttttttttcgtctccccataggaatataacaaatgttctttttctgtgacaccatgatcgaattttgttttttaatgcaaatgtatggtattatcattaacataggatgggatcagggacgaaacatatgtgaatataggaacatttgcatatgtccaacggaaaagtctcaactctaaatcttaatccaaatgacatcacgattgtaaatccgaccagatcttaaatctgaatccaagtgagactcaattgtaaatctaaatataagaaagaatactgatatatgattcattgtaaaggacgctgtggcttgtaggaattgagtattactggaaaattaggaattgaatcagattgtgagatattaattgacctgtcctgttgtggcatatttactcctagttagaacttggaatctatcatattgttatgtaactgtttactctttggtatcgttttgatagcttcttatctcagttttacttttttgcattaaagactcagatgcttcggtctggcacatatatcttctacaaacatatgcccttattttctctttgggccatatatatttgtctgaacctgatatttaccttgttatatacttgtgcagtaagtggatgtactaatggagtcaaagggtggcaaaaagaagtctagcagtagtcgttccttgatgtatgaagctccccttggctacagcattgaggacgttcgacctgccggaggcgtgaagaagttccagtctgctgcttactccaacgtaagcatcaaatacagatttaattccctcctttgtatcttccgatgtgttgctaatcatgtcaattgttccttttgttgcagtgcgcgaagaagccatcctgatagccctttcggcttctccatcctagtagtttaggatttcttgcaattccattttggcacttttcttctgacctatttctctggctgctgcttcctgataatcgaccagttctctagtcttgctccctgcactcctccctcctccatctccggcacagtgttctgaccaacctgctccaatgggtgtcttgtctgctgctgaccctcccccagtctcagcaattgggtttgagggctatgagaagcgccttgagatcactttctctgaggcacctgtctttgctgaccctgatggtcggggtttgcgcgccctctccagggcccagattgactctgttctggatcttgcacggtgcaccattgtgtccgagctgtccaacaaggactttgactcctatgtcctctctgagtccagcctgtttatctattctgataagattgtgattaagacctgtgggactacaaagctcctgctcacaattccaaggattcttgagcttgctgaagggctttctatgccacttgctgctgtgaagtactcccgcgggatgttcatcttccccagtgcacagcctgctccccacaggagcttctctgaggaagttgctgtcctcaaccgctactttggccatctgaaatctggtggtaatgcttatgtgattggagatccagcaaagcctggccagaagtggcatatctactatgctactcagcacccggagcaacctatggttacccttgaaatgtgcatgaccggactggacaaggagaaagcttcagtctttttcaagacttctgctgatggtcacacatcatgtgctaaggaaatgacaaaactctcgggcatctctgacattatcccagagatggagatctgtgactttgacttcgaaccctgcggctactccatgaatgcaatccatggctcagcgttttctaccattcatgtgacccctgaggatggcttcagctacgccagttatgaggtcgtgggcttcgacgcctctactcttgcttatggcgacctggtgaagagggtcctcaggtgctttggcccttcggagttctctgttgctgttaccatctttggtgggcatggtcatgctggaacatgggcaaaggagctcaatgctgatgcttacaaatgcaacaacatggtagagcaggagctgccctgtggtggcctcctcatctaccagagcttcgacgctactgaagacgtacctgttgctgttgggtcgcccaaatctgttctgcactgcttcgaggctgagaatatggtgaaccctgctcctgttaaggaaggtaaactgggcaatcttctcccctggggagaggatgcgttggaggagaatgatggagtgtttgatgagtaagatgggacttctggtgacgattcgctgctttgttttcattccgtggcatttttatctgttgaggttgtcgtttggttattctgtgaagcagccagccaggctattagtattttcgcttgtaagcatgtgttctgatcttgggacgtatgcttggtctaaataataatggtgaactaaaagctctaggtggtcagctgcgtctgccacaatgagcatgcgtcgggagaaatgttgtcaaaacatatgaataagtatttgcgggaaatttcctttgccttctgctaatgttccttccgatctcaattgttaaattttgttgctgctggtgtctaagaaagttctgcttgggacactagatagtatggagaaaacgattttcgaaagtttccactcttgttatctcaactctgtagagctccccctgttccatgggactgcaaatgcccatggcacaggtatatcttaaggtagtacattaatgaaaagtctgggagaatagcatgtgcaaaatgcttactagctcttataagttaaaaatagctggaagaactgcattctatagctttccccgtgttcatggttatcttctgcaagatatggctggacgaagtatatgccgcatgcttggctcttgccgccccattcgccttggcatggaccattgacttcgattttttttttggacatgtttatgtatttgcttattgtcctctactttacatgtaacagtaatttaaaggagtgctgcctgatctgataattgcgtttggaatcctttaatgagcttgatcttgtcgcgcttggaaagatgatgcagcgacctgttcggtaccctatgcttatcttctgacatccatatctgtattattgtttatgaagttgtacgctttgtacccaattatccatgaatatatatattttttctttctggaaactgcatgttgctgaattggtttatactggacgatcgcgacctcctccattattcgggtgcttagattggttcggcttcgttgacacgcgcgaacgaaaaagaaagatattagatagatagatagatagattacgcggtctcgatcacggactcgtgagggcaatcgcttctcccctaccttgccgacctgttgtccttggaacacttccgagttctgacgagctgattcctccgatggtggcgcttctgtcgctgttccgttctcgctccaacgctgttgcttgattcatcagttgcaacttggcaaggaactggaagggatctgtgctgaggaggtgtgatctcacattgtcgtccaaagcttggatgcgttgcttggccgccatgatatgctcatatgccgcgtctagaaggcgatcaggtaggcaggcagctagctgctcaaaagaacgtgccacatctccgggcgggaatatgctcctggtctgtcgcccatatgatatgtgagcatcaaagcatctcccattcccagccacagagagcggatcgtttgttccgagcgtatcaattcctccctcctccttggcccgcgcactgcacgtaggagtaggacgtagcctagattgttgtagcaggtcgattgaccgaacctgccacgcagtgattcgatcacacgggcacacggttggcctgcactgggctaccgatcgatcggacgcgagatggaaacgagattcgccgccagagcacgagagggaatcgatctcccttacacgtcggccggcaagtggagtggttgatggctctagacgccgcgggaaaggacaaaggcgaccgacggaatccgccgcccggtcgctgcgacacaccccgtgccgcgtgcatgtgccgcgcgccgaacgaattaataagcttccgttccgttcggccggtacgcgcccggaagctggcagttgggcacccgcgggggcgaaacgagcggcccacgccgttttttcacggattttcagcccaaactgctgctgcgcgactgcgatttgggtccgagattggcccggctcgtggagttattacgggacaatcgcttcctcaacggtcttcctggtcattcgtgtgccagaaagggcatgtgactatctgaggacatgacacgtacagcgttttctttttcatttttctttgcaggttctgacgagaacgaacagacgcatttactaatctcatacgtgtactcccagtccgagagatttggtgataagagcttaacttgggctgtgatcagggtaacattttttagcgtgtcacatattatatatggacatatttaaagtattaaatatagtctaataacaaaataaattacataattctcttataaaatatgaaacaaatttattaaggctaattaatccatcataaatttattaaggctaattaatctattattagaaaaagtttactgtagcaccacattgtcaaatcatatatcacttaggcttaaaaagattcatctcacaaagtagtcgcattctgtataattaattattttttagtctatatttaatatttcatgcagatgaaacgttcgatgtgacgggatgaaaaattttagggtgacatgtaaataaggccttagttacagataaaacgcatctcgcgccatctgcattatactcctttcgctaaatcatttagaatttagatcacttaattttcactctcctttcgctaaatcatgaccatccagaccagagcatggagaaaaaaaaaaccaagctgctactacaaacagatcatcatcaacaacaacgaacaaatcgaatatcgatcattctcaacatacattgtgtcgatcccttctatgcatgtatgtatcgatcgtgcgtgcacgcatcatcagccgttgacgcgggagcacgtccggcggacctcgccgtcggcgccggtcctgacgccgaggctggtgagcctggcgaacgaggccgcccagctggcgaagaagctcccctcgctccgcgcgaacgcctccaccgtggcccgcgtcgtggcgttctgcaccagcacggcgtccgtgcgcagcagcccgcgcccggcgagcaggttggcgaagtaggcgttgtcgaaccgcgacgccgacccctcgtcgcagtccaccgccgccgtcgacgacaccgtgttgttcaccgccgagcacgccctgatcagccccccggcgtagtccgcgttcatcgccgcgtccgcgggcaccgtgctcccgttcgcgtccacccggaaccgctccccgaacgtcgtgcagtgcgccgacccgatggtgtgcccccctgcgcgccagtgcgccacgccggcgatcgacagccgtgtgctcacggtgagaccaggtgaaaagtgaaaatcgcagttgatcctccagcattcaagagcgtgtgtgtgtgtacctgagagggtgacgaggtcgtccagggtgagccctttggcggagaagctcctcgccatggcgtcgacggagaagccggtgtcgatgatgttcgccctgacgttggaggccagcgagaccaggccgtcgagcctcccgagagagactggcaccaacggtcctccggtctggtttgcagcaggtgaatgcatgttagttcatgaatgtcactcattttacattggtagtttatctgctttgtaaaccaatctgccctaacatgccaataggattttgtgccaagactaaaaattgagcttttaagtggcacagaaaccggagcaagcaattaacacaagattaattaattattaattaatataaaattgaaaaagggttcatttgaatttttaaagaaacttttatataaaaagtttttgcaaaaaaaaaacacggtttagcagtttgggaagcatatgctaatggaaaacgagggtgttgaagtttagagaaacatttccgtagaaacaaccatattataagtcttgctgtatttcttttttgttaccaagtctatgccgaatcaacatctatatgatgtgggtgaaatggtgaaggtgaatgtgagtgtgaatgttactgcaaactctgtatttctagatacagaggaatgtagtttcaaagcatatctgttcttaagtttcactattccagttgttttttttataaaaaaaccgaagccagcaaagctggtgttatattaagcaggggagaaaaaaagtatttacaagatcaccaaaacagtgaaagagagaaagagagaggaaagaagaagctactaaacaatgaaaaactattccagttgtgccccccttcattagctcatttcatcaatccccttaggaccattaatcatgtcccccacagaattacgcacataaaatattgtggtccaacgacataagatgacaatcatgaaactaatggaaacggaattgtgttcacttagttaagttcatgatggtctacctgtctgattttatttgggtgtaaccatagtagttctaattattttccaaggtatagtcgtgtaacgtatgcatggaccaggagcactcaattcattggatgattaaagatctaactgttgcagcattaatgtggattatttctgatgtcctatgcttatgaagagtactacatctgcttaactatatttagtagcaacatttctaggaaaattcatctcaggcaacaatttaaatatttggcacatttacctttgagtggattgtagcaactagaaaagagaaatcacatagtgccatcatacttacaaatgtaacagcatctcttgcggcaaggactaaaatgtcgctgcaggaaacagttacagggcacacggcttcaagcagcctcttggcagcatctatgacattgaacccaccaagtgagaggtttgcaggatcggtcctctccgtgccgctaccttcaatcatcactgatgcatcacatccctgagaccaagaaaaaatgtactctaagaatgactttctcactttctgttattgtgcaagcgtggatgttttcacaattcttaaacccgatgagatgcaaatgcaagacaaatacaattgttcccataattgtggcagtgacaatgtgcaagctgtggaaaactacattatgtttggttataccaagcgtgcataatggattagggtcttaattttagccaccacatagcttagtgatcaataactattctagactggaccattcaatcgacaagatatacattatattcgaataatgccagattattagccgatgcaattagtgccacacatgtcataactattctggggaaaactagggtgagaaaaggaatatcctaaactaactagtagaatgagcatttgattagttcttcaggtcttcagcatttcaaactaagaaaacggatgaaaataactattattcagctgctagtaaattgggccgaaggaactatatatcatcataaaattgaacaaaaacacattactgcattatatttccaccccaccattgttatttctgagaatatgaaaaactgagacggcaaatggcaataccccaatccagtgtgatggaacaggaattgttgatggctagatctacacacttggatgtgattcatataaccatctacattgcagacagccatttcaccatttgcttgcatgcacaagaacttccattgttgcaaattgcagccaatgtgacgcatttgacaaatgcaagcagtatactactagattctgagataaacagtcatggcatcagtagtttcttacctcaacaaagcagtcatggaagagcatcctgagaagcttgccggggatggtggaatccaatgtggaggccgacctgacgacatccctcaccgccagctccacgctcgggcaggactgcgcgtagaaatttggcgagagctggaccggcgtggacgtcgacggcgaggaggagttcgtcgtggaattcgttggagccggaggaggagaaggagatggtttcggtgccgctgccggcggcggtggcggtggcgtccgaggaggaagaggaggagacggtctcggagccggtggcgaggacggtggaggagacggctttgtggtcggcgtcgccgcaggaggaggagaagatggcttcggcgcgggtggagacgacggcgttgtggacggcgacggcgcaggaggggaaggtggcttcggcgcgggtggagacgacggctttgttggcgccggcgacgtcgccggtggcggctgtggaggcctcggggctggcgccgcgggtgtccgtggagaggacgacgagttcgtcgccggtggggatgccgcctttgccggcgttgctggcgtcggcggcgtccgttgagaaggcgccctcgcagccggcgttgctgagctagcagctggcgccggagacgaagacggcggctgcgacgacgagccggagcctgcggcgacggccactgccaggacagagaaaaacagcgccgagcaaagaacaccaatgcactcccgccgccgctgccgcctcatctgatccatcttgcagccgaggagaacgggatgctcatgagctagccagcccagctgagctcgctcacgagcgcacaatcactcacagtctcacacaccactacaccaccaccactatgtgcaagaacagctagcagctgatgaacatgcagaaatagtttcggtggtggacgcagagagcgatcgatcgagttggcgtagagaatctactagtcgcgtacatgtatctctcgcgcgccggcattaacgacggtggacgcaccggcagcagcaaccactatagcgaatgcgccgatgcgatccattataaatcgggggacgcacaaccgacgccgcgctacactagacggactcatgtacgagcatacgacgacataccggacggtcggctgggacaatctatagtaggagtacgtactatggatttcgaacagcggtacacgtacgattctccggcagcatgcgatcgagaaaaagtttcgtgtcaacacggcgaggccggttaattccccggccgtaccagctggtccaggagacccgtgtctcgcgtgtacttgtgctttaccttagctcgggctcccccgttagagcaaggataataatgggctataaggctctcatacaagagctagcttcacacaactttcaagaaacatacatcaaatttatagagtgagaaagagagaatggaaaaaataaagttaacattatagctaacttattatacaagttaactctaagattgacttatagtaagcagcgcgctttactattaaacttgctcttaatggcggctatctagctggtaaagctggcatcccggatgcacgcatgtttcgtgtttttttttcttttgaaaaaggataaacatgcatggccggctcttgttcaggcgcgagctagtagcatgcgcatgtggatgcgtaaggtgtattgatggcgagggagtgaatcgggtcggggttgggttgggtgcctggtgcgccgcagtaaattcggggagagagagccacgccattgatggcggcatttactccggcgacgcggttggtaatggatggatgggcgacgactcggcgctgggcgggcgggtttgcagatttgcagcttcctgatcagagttgaggccgcgggcgccacctgtggctgcacgcgccggcggcggaggtggaggaggaaggctggaagggggtgtagttcagccgagaagttcagctaaagctcgcgcaccgacttctccatttcggcatttcgcgattccacggtcagaagcgggaaggattggtaggcgggtgagtgagtgattgtttagttatcatttttttctttaactagttaagtgcctgtgcgttgcaacgggaaaaaaacgcatcaatttcaaattacagagtaaaattgtgctgaatagttattgaatgtaagcttatcataatcagaccgataaaattatgttaaataattattgagtgtttcttaaaaaagtagtaatataataaaatcctaattcagtccggggatatacgtattcagctgtatttacagttttacactcatgacatcaaatcaagtaactaatcaactaatagcacatttgtttggcaacaagtatatacagatgacattctgtatttcgtaacatagcaagtgaatgcaagagaagtaattttgcgagtagaagggactaaaccaaacaatacatgtattttttaaaatgcctctataaaatatctctacactataaaactcctgatctaagaggcagtttgcaaaatgcctctacaaaagtgtctttatataaggttttttttgtagtgacagcataggatcacacgtccgcaattcaaacccagaacaataccataatgttcacactgctagaacatcatagtgtcaacgattgattgagaacacacacaagtatcttttgtcatgagaaacatattctctatgcctgcaatatattcaatataaaaatctactgaaccacaacacataaagcatcaatatgtcctcatgaatcacacaccacaggtgcaccacaagctagcttgtttggtcatattcatagcaggtgatgttacaatgggagaggaattgaggaaggttacttggtttggtttgcctggataaggggaaaataggtcagtccttatttaccagtatatagtaatagttatatatatgtatgtcataccattcccgtataactattttctctatacgataatactatgtgtttgcttctaatatacttaagcataacatgtaatttgtgcaaagatgaaaacatcagccacaagcaaaatcttttaaaaaaaaagaagggaaaatagttgcataaaagagaagctttgagatctggatcaagaaaggacattggcccatgaactatttctcaaaaggacaaatccgctttcttaaaagtattatttcttaaatttctccacaagttcttcaacaacaaagacatttcatgggtcacgtatagaaaatacagacctaaaaacaaatgatagagcctcttctttataagagagaagagggggaactttttggtggatattttagaacagtcgctatggttcaaggaaatagctaatcctcaagtgggtaatggacaatcaattctatgcttggatgatacataagccaaaaaaatgaattggattgcatatgtgcacaatggtagccatatatagtattatcagggctcctggacccactaaattgatactttgctgaaaaaagagaacaaatcaatccaaaagtcagctctaaacaaatgacatcgatctgttgatgtagcataagcagtgcaattaaaagccatggaatatgagtaaacagatggagggtttcgtacagaaaaccccaatttctgatagtctaacgttaactaaattcagggaaccttataaagctttctacaaaatgcaggctacacaggaaatgctatctacttatacatcaaaagaaatttagctttgttattctgaaaacagatttgtaggcagtcctagcagcctatgtactcctatttgtaagttaaatatttattaacttactgttaaaaaaaacatgttcagcatccttgagtctagtttgcatatatctatatcaacactggctactttaatcccatgtaaacatatgaatatgacaggcaacaggataaagtttaagagaaaaatatatagagcaaaaggtttgtagttgcagcctcaatcccatataaatgtttaaaagcttgacagcctgatgcaagatttttttcgttttctaccgctggttgtacgattttgggtagcaaccgattagctgggctggatagctgcagccaaaaacgccacaacaatcagaacagatcagcctcaatatgctgtgacttgagactttaatgcattaagaaaaataaagctgcacttaatcagaagttatgtgcaattaatctgaagatagcattatatagtttagaaaggatatggcatcgaggtggggaacaaaagcgtgaaaatccccaacgatagagcagaactggacagtgaagcatgacctggtcatcgaacatcagtttcttacgccagcaagatctcaactaaattgcaagctcaataaacaaaagaatctcctctcttgttctttacactatacaaagaccatttcatttgatctaacccatccatcctgcccaagttttttcaagtctaagccattggttatgtatatgtatgtttctggtgataacctaaattagttacagattataccttcagccaacatttagcttgtacaagtccaactcaagatcaacttctatattgaggcataaataaggaactctcaatttattgaggatgaattatgaatacactgagaggtctttcttgaaaggaagattactatgatctcattaacaacaacattagtagtgcagcatacacatttttttctcaagattactatgaaataaatatcagttatcaatgttgataattcaaaaccacaaacaaaactatatacttattatgccgtaaggctgccctatcaggtcacttcttgctattttttgggtttaaaaaaaaatcatcaaacgcagaagtatttaatacaataatgaccttttcaatgtcagagcttcgaggcaaccttctgccacggcggggtgatcggctgctgcttggcgcggggttgcgtcgtaaggggccagctcccacgatctggcagcaactgctgaggtcgaggagggaggggaggcagtgcggggtcacgttgtcgggggctggctgccgcgattaatacaaagatccatgctcacttcaaatatgaataaatagaactgtcagtttagcataacgattcacagaaaagggcatccaccacaatctttaattttgcatgtggagatatatattcgaatgtggcaaccctatggccagagaatgcataatataagcagatcggcacaagtattaccttgttgatgataacctctgtttgactttccgacaatcagatcacaataaggcaatatgaggacaccacctaagatgtatcggatatcagaatgatgttttttttttgagatgtacccaagcagtctaacccctgcaatagattgaaaaacatacagagtgagattgtttctttgcaagacacatttttaccatcatatattttaattccatgatatagcataaggacagaaatgattaacagttgtctgtagctaaactctgaaatgtctttctttttgatccctagtgagcagaaaagagcaagcaagtgtacgtccaaaaaatataagtacattttaatgataaaactgttcccaaaaaacaaggaaataggaatcaggatgatgcagagaagatacattttattcagtgcccctgatcaacaaagattcactggccaggccataaccaatgttgcactttcaaccgggctaatttattcaggtgcaaactacaaaggtttgatgttttgaaaggaattagtagcacttgctgaccgacaacatgcatgtgtgatacagttacatgaaaagaacggcaacgagagcctgatagatgccatcctggagggcatctattgaaactgaaaaaccaaaaccttttcaagcttcaccctaaaaaaatcattagtctacataaacaaagtcagatcgtgaacaaagctttttaagctacatccgcaatggtgatagtacataatataagacatacatttataaaggcaaaatttgctatgggacataaaaaacgtgcaattttccttggaagcagattactaaagataagttcactcaccagcccaccaaccatcacaatcaagctccccaatttctgcctaggtagcatgatgccgtctaatcatgttgatagaaactggcatatatatagtcccacagtgtttacagaaggaggctatgaatatggcaggaagcatccagctcctagagtggtggctggcaacaaaagtggccaaaagacgaaaaatttggagagctaacattatttactaactacagtattgtgttgaacaaaccacatgaataataaatctcaagtaaattttagattttgatgaattctgccatacaaaatgatattaaatcaatgttccagacatactaacagatatacttgttagttttctgatcgataagtaggaaattaagcaaaggaattcatagaatgggttgaatgaccttaacgcaggcggcggcagactccaatggctgcacggtgataggcaggaggctagcggcagtggcaggtaaagaggcgaggcaccgtgacgtcgacggcaggctgatggggaagaggagcggcagcgacgtcgacgacaggctgatgggcaggaggaagacgcggcggcggtgacaatctggagtggctggcgctgtcgacgacagcgcggaggctgatgcagaggagggcagcgcgggggagtgggctgatggggagtcgacgatggcgtctggagcggccggcgacatcgacgacggcgtggaggctgatggggaggagggcggcgcgggagagtgggttgatgggaaggagtcgacgatggcgcaaataatgatgggaggagggcggcggcggtggcgggtggccggaggagtaggcgtcgacggcggggaggagtaagaatcggcggcgggtggatctggagcggagtccacggcacgagggggggcgcgccggcggcggttgcggtgggcggcggcgccggcgccggcaggggcaagtgggcggaggaagagacgtcgcggggtcaggttggcggaagaggagtcggcggcgatggcgagtggggcggagaaactgtccgcgcgatggcggtctaccgcgatggcgatctctgtgcgcgattgcccgttggatatgacgatcagatggttgatattacgcatgtctgtcagatgcgtctgctatgtcaggaatcaagaccaccactacggactttttaagtagtagagattttttaactttttcatcacatcaaaactatcctacacatagggtgtgtttagttactgaaaaaagttggaagtttagggaaagttgtgagtttgaaaaaaaaaattaaaagtttacgtgtgtagtaaagttttggatgtgatgtgatatgatagaaagttggaagtttgaggtagttaggggtgaatcaaacacggccatatacttttaactgttttctttaaactactaattttagtcaaacttttaattttaaagtgaaactaaacacagcctgagaggtggcagtgggttttatggcttcgccggccaaccaccggtggcagtgttcatcagaattctggtagggacaggcgtaatgggtatactagcttagaatcacgtagcaaaagaattaacgcaactccggatatagagtatcacgcgaagccaaaagcaaggtgtctcacgactgactaaaagttgaccctacctgaccaacattcgaaaaaaaaagaaccataaaaaatcattcaaaatatatatgactataatcacgaaacaactatacatatacaaacaaccactccctccgtcccagaaaaaaaaagacaaaccctgggtttccatgtctaacatttgaccgtccgtcttgtttaaaaaaattatgaaaaaaaaataaaaagacaagtcacgcataaagtattaatcatgttttatcatctaacaacaataaaaatactaattataaaaaattttcatataacacggacagtcaaacgttgtacacgaaaaccaaaggtttgtcttttttttttagggacggagggagtagtgcgtatgatccatacccgatataatgcgcgtagacacaactattgttttcctaaactccgatggtgagaaaccgagcgtaagaattgatagatgaaacgtgattagatactaactatacgtatagaaaaaaattataatgtaattatattgtaactaacatataattataataattatagtataacacggtggtgtagatgcgccgcggcatccacaggttgcatgttttcttaacttttgtcacatgttagatagcaattatctctttttttctgagggagagagagaggagataataaaatactcgatattgaattgccgatggattactcattaccatgtgtataaggtatgataactccaaatctcatgtgcttgtgtgtttttactttttagagctctataaaaataacatgggtgctaaactattgttctggaattatttcttgaaggcccaattaatttcgggctgggccattagcaagcaagccgcgtcgaatttgtcgctttgaatgggccggaaatgctagggttaccgtctccctcccaaagccccgcctggtgattcgccgtctccctccgtcgccgtgccttcccccgccaccgtcctgctcaccggcgttccgccggaacgacttgaagtccacctctcgagctcggcggcctcccccttagggcagaagcggacgaggcgaatggaagaggttaggggcagggagagcaaagaccaccgcggcggcggcggcggcggcggaggtgatggggacggcgagcggacgggacggtggcgcgccgaggaggtcatcgctgggaaccgcgcggttctggaggctctccgggagctcgtgatgtatcctgtcctctacgcacgggaggcccgcgtgctcggcctcaatgtattgtcgcctatcccctcttctcttcgtccttattatcatcaagtgcacctgcttgtaaatagcaatccatttttgaaataatctttgcattggtgcagtttcccagaggattgctgctccacggcccctctggcactggaaaggtactgcttttacggtgttaatgtcttcaatccggtgcaatttatggccaatgcgtctgcttaggctaggttcatgtagagtttgcttttatcttgctgtggattttgctactggtatcgcaatttgtagtgctgaatgttttactgcttttgcaattctgtcagaaaagcatggtccgagctgttgttcgagaatgtaatgcccacctcacagtgattgagtaatgacttaactcgaattggttaaccttgaaagactctgctttgcttttaattgcatattttgatttggcacttaattcacataatgtacatatgtttacagttcaatttctgtgcataaaccccacgctggagagggggagaagttcatgcgagaggcttttactgaagcatattcccaggcatcacagggtagaccagccgtgatattcattgatgaacttgtgatgacatatgtccaccgcgtggcagtaggcaagtttgttatattacctacaaattttatatttgccaagaagttattattaatgtatttttcacaggagagagcaagggtcccgcattgttggtcagctgttgactctgatggacgggaagtcatcaaagctgcttccccacctagttgttgttgcatctgctaccaggtcaggaatgtcagttgcgtgatttgtgatcttagcaaatagcctaacattttaagttcattttaggaagttcctctgttgatacggcagcatattccactaagtgcgcttaagttttcctttagttattctggttatgaacttcgtgtttttctcttgaatgaaaacacaacttgctttcattagggtggatgctattgagtcagcactgcgaaggcctgggcgttttgactcagagatagaggttactgttcctacagcagaagaaaggttcgagattcttaaggtatcatataagaatgtagttttcccctcaaaaatagtaaaagaatgttgtattttatgatgtaacatagcaagccctgcattttttggatgtggttaacgtatgttcatgatgattttttcttatatgaagcttaatcttatagaccatattatgtttttagctttataccaagaatctacatcttggtgaatgtgttgatcttcaatctgttgctgcatcctgcaatggttatgttggagctgatttacaagctttatgtcgagaagctgcaagacgtgcttatggtagattatcaagctcatcagagagtgagaatgtgctaacgctaatcatggaggattgggagtctgctaaatctgtggccaaaaatagtgtgacaagaggggtaactaaagaaattccagctgtttcatgggatgatataggaggtttgaaagctgttaaggtaaaatatgcctcattttaggatttctttaatcaaacctcctttaatggttattgttgctatgcttcagaaaaaacttcagcaagctgttgaatggcccatcaagcatgctgcttcatttgatagacttggaatatcacctatccgtggggtgctattgcatggtccaccagggtgctcaaagactacccttgcaaaggctgctgctcatgctgcccaagcttctttcttttcattaaggtttgctgcgtaaaaattgttctctctttttctcatttcatccttccaacatgcaaaaagaagcctgtgaatcgcataatattttctgatgtgatgcttatattgtaataaattcaataaacatcacttaatctcagatgtactgaaaaggagttattagaggaagcaaaagaacttaacatgtttatttcatgtactgttaagaccaagctggcataatttgttcaaattctgctgcttgaatcgttgtcctgtacgctagtccaaataatatagctagaacatgctaaccggatcattttgagttcagtatacagtcttctatgttgttctaaatttcttacacattttcaaacagtggtgctgagttatactccaagtatgttggtgaaggtgaagctttgttgcgacgtacattccagatggcacgtcttgcttctccaagcattatattttttgatgaggctgatgcaattgcccctaaaaggtgcacatttatatcttgtctcttgttgtcctgtggcacatactagtgagatctatgatacatgatgcatgatattggtaaaaatgattctgtacaatcatcataagaatgtgcatgaattgttataggctatcttctataattacgtaataataatatttgcatcttttccatggtgtacatgattaggaagttgaagaggtgtcagaagtgttaagcatattttgttggatatggttccccaaatgttcttttcatatagtagaatcaatttatgaaaactttgcttctgcgcatgtaaatctaatttccacatctgaccagtgaatgttaatattggagtttgtaatcgttcagaactggtcccagcgggaactctagtggcaatgccacggttggagaaagactcttatcaactctattgacggaaatggatggtttagaactggctacggtacctcttacatatttagattgacgatggcattcaaatgtgactctccttgtcatatctcatatatgccctttctttgtactaaaaaagtatcttgcaatttttgatgtagggaattattgtattggctgctactaatcgcccaaatgcaattgatgctgctcttctgcgcccagggcgtttcgatatggtatcccgatctccctctccctctccctcacacatagcaaacaaaatcatgttctttttttcattttaactgcaggttttgtatgttccaccaccagatgcggaaggtcgatatgaaatactacgcatccatacacgcaaaatgccattaggagatgatgtggatctttggaaggtagcagagcgtaccgagcttttcacgggcgcagatcttgaaggcctgtgcagggaggcgggaatggctgccttgagggaaagtctgaggtcagagcgttttgtatgtgacgatattcacttccaggccgcgctaagatccttgcgtccatcacttacacaatcagtggttgatgagtactcaaatgcagccatccatggtccattgacgaggagaaaacactaaaagatgtattattctggcgcacaagcatcagtgtcgcccattgttgattctgactagttatcagaacattgtatcatcggtctgctgtatatattgaccaaagttgtgacatgttcccatatgattgcagcggcttgtactgtttcccctgtgtttttcttgggttttgagagtattgagagacagaggttaacactagaagataactctgcctgttaataactcccaaggactaataaagatctcatcttccccaaggaagattgcaagctactaatatgaaatgatattcagaaaatgctgctgatcaggaaatccaagtgtcaatacatagagatcctgcaaaaacgcactgcttctggtgcttagacttacactaaaagcagaacatgcctgtttatgtttcacatatatccccagcaaagcaatttttacaatgggaagagaagtttcagatatgtaacatcttctgcagcatctcctatgcatcttgctccttgtagactaagaatgcgctggtcttgcaatagctgcgtgccagcgccttcccggaggaagtaggcggtgagaaagcgcactgtgagatgcacaaagtctcgccttcgaggaagcttttcctgcagaagacgaatggagagtgccttagcaagataagataatatcaaactcttggaaatgcttgcagagcatagaagagaacaactggacagacagataaataattcagtgatatttgcagtgtgatgtcagttaacaaatagttttattagtcctataatctggtcaaaagcttggaatttgtccaaattgacaatgcgtgctatgatggatctatacattgttgttacagagaacaatgcatgctatccttctcttaatgcaatgatgcgcaagccttttgcgtattccccccaaaaagaacaatgtatgctatcaagagttcaagacgggcattgcaggaatgctgcgaaaaagaaagatgctaagtgaagcaaagtaggtgagaatgcgcatcaaacttagaacttacctagcagcatccatcagttgtgaccctattcgctttcttctgcgtgacggtacaacccaaattgctcgaaatccacaatgtgcaggaacatcttccttttcacatattatagcaccaggatctcggtactcttctttgttcttgtctgaatgatcatgccgtttcaggacttccctcttaaaactgattttcccgaactctaatgtatggtttgttttgactggttcaattttatcaacaggcagatcagtgccgttttcctctgtggagcctggaatcactttatgtgctgttttgattggttccgcaacaaggcatcccactatcctctgactagatatgaacaaatatacctatgcaacgcaaatgaggttttacccattaggatgaatatatgtgcatagatgttgtcatatttgaactaggagctgatgttaccttacaaagcttgtgaaggagctgaccttcaccaaaccccagctccttctgtaccactttgatcacctcctggacctgaaatattcacatgacattacataatcataaaatgtctgcaatctgcttctgaacttctcgtaaatgtaaagtggttgcaaaattggatcagaaacttcgcagttagtaaagacacacattctacagtttagaactatgaggaacccactcttttcaatattcatttccccaagaccccaactagtgatttctttcaactatctaggcaatacagttagtcattcaggcaaaataccttgctgttccgagcacatgaattttcatcggtcacaagaattatccgatccccaccttcagacctcgcgaccacggtttcattgcgccaaccctgcaactcaaacatttgtcataaactcttcacagaaatttataacacgagatgaacagaagagtgagattcacaaatatacatcaggtgcaacaccttgaacgggacgccctcgaagtaactcttgtggtatgccttgtgagccttctcgtcgtcgtcgttcccgcgggcatacatcatgccacaaaccgagcacatgtggaggagaaaatcgggctgcccaagctccaggtggaactgcgcgtagttcctcttcttgttgaggaccttgccatccgcacagctcttgggcctcttcacctccatcccgcaggttccttccctatgcgtgtcgccaccacttaccaaatcaacaaagattgatcagtccattatcaaatctgaatccaggaacatgccaatgtcggacagcatgcttgggaattaacgagaactaaatcaacaaccatttttttccaacctgacgagcgattttaatattcgctctaattgatggaatattgcagaaattcgctactagagtggaatccggcaatatttggtaccggatcgctacagctaacagatttgaagaggggaccaagatgaagaacctgctcgtctcgggctcgggggcctgacgcttgaagaacgcactgatcttgggctgcatccccttcttgcctctcgtcatgctgcttggaaagacggagagtgaagaaacggacgcggcggtggcggcggtgaattatgcgaatttgccagcaaattattagcatgcatgtgtgcaacctctatgtgaaaatagctaaactacagaattaaccagtgtgcagaacccaacatatgtgcaaaacacatccaaatctgaactaccatatgctatatgagtagcctaacaaaatcaagaagtatcatacccaaaaatccccagacctaagcgagatatacacatcaacccaagaaaacttttaaaggaggaagaagaatgccactcaccgtccagcacggggcaggggggaaagaggccagtgtagctcgctcagcggggagggggagggatgccctcacggctgcggcggcgaaggacggccttgacgggaggcggcggctggtttgcggtgcagcgcggagggggggacagcgcccggctccgttgtgaaagggggcgtggcgaggaggaagacgagggccgcgggtggtcggtggggttagggccaatcgacggcggagatgaggcggtgaggccgtgagggcggatcggacgggcaggaatcgagaaggccacgcgcgcagggttttctaaaggggaaaaatgcgggagggggattcgggcgccaaaacaacgggcctgaaattggcagcgatggacgcccggacgagcgctgtgacctcggaacgttgttgggacttggctgggggtgaaaacggtatggaaattttctgaccgtaccgataccgtttccgcaaaactaatataataataatatttttatcgatggttatcatttttaaaatttagttttttttaatttctaacggtgtggcattgaagttgacactaaatagatgaattcatgaatatgaaaatttttcgaccgtttctgcttgttttttaaaaaataataaaataatgatgccgtttccgaccatttccaaccactttcatccctagacttgggagagaggaacgaacaggagactgggagaggtggagagtaggtgagcagcagttgtcgtggaccttattcttatgaacatggtgggctgctgggccaactcaatagtcaatattcattataataagttcactttaggtctctcttattgacgatgagtttagattgtgtccttcaaccaatttgcaagatcggtgtaaccgaggtcacatgacagtataacatccagttttaactaacgtgacgagttgactattatcaatctggttgagtcagcgtgagacccacatgggtcttacatgttagcagccaactctctctaccgagtccctttacctaatatctatctacccatcccttttccccatctctttcccgacaggaactggagcaactgctggaaaagccatcatgctcaagaaccccgtagttaccttggccacgtagcttgtgttgccatcggggtaagccgagggggcaacacgatgttacgcgatcgaggtcgatgctgggttcctgaggttgagggttgctcgagcagccgcctggcaagctcaaggtcttctagtccactggttgtcacccctctcccattagctgctatccttcttcccgctgctcaccgcctttctggccttctccaccggtggagagaaattggcaagagggatgggtagagagaagaggcgatgaaggaaaaaagagttaaccgctaatatatggggctcatgtgggtctcacgtttactcgatcagtatgatcatagttggctcatcatgtcagttaaaatagggtgttatactattttagaatctcgggtacaccgatattataaattaactgacattatactggtattgtggataaggacgcaattcaaactcagcatttaaatgtcgaaagtgaacttatttcatattcacttattaattcctatcaggccttgattaggtcgtaagtagctacacagtaataacgcagtgcaaagagatgatgcgcaatagtaaaaggcacaaagtcaaaattagtgttgacatgttgcccagttttctactactagtacatagattaatggtgcaaaattaccatggttaaattagtaggagtatacagtactataatagttgcaaggtggggggtgtcaagtcaaaaccttgagcgcggatacccatcaacgcacacttgctcttgctcagctcgccaacgccaagatgcgcctcgtcaatctctcccaccgatcaatcgcgagacctgcattctagccgtgcgaattccggcgggcttccgccgtagatccccaagaaacccccggcaagaaatcgctgcccagatggatcgccaagaggaggaggacgacgacgcggcgcttcgagaagccggcggcggcgcctccttccccggcggctggctccggcgtctgtcccgcgagctgcactggagcttcgtgctcgccgtcgtggccgtctacggggcctgccagggtgtcggcgacgccgtcggcggcgtcgcggcggggtactactggaaggacgtgcagcgcgtgcagccgtcggcggcgcagttctaccaggggttcgtcagcgccccctgggtcgtcaagcccatctggggtctactcaccgacgtcgtccccgtcgccggctaccgccgccgcccgtacttcctcctcgccggtgaggggattgcagcctcctccgcctcctcgatcccatctcgcagttcgaaggctttcgccttacttgatcacttctctcggtgattcattcaggagtgattggggcgtcgtccatgctcacgctctctctccaccgcaagctgggcatcatgccggcgatcttggcgctgacggcgcagagcgcgggcgcggcggtggccgacgtgacggtggacgcgctggttgctcagaacagcatcacgcaccagccgctagccgcagacatgcagagcctgtgtgggttcagctcctccgttggggcattgcttggattctccatcagtggtcttcttgtccactccatggggtctcaggtgtgatattccctgaccttagataatgatttgcatcatcatttgttttctcacacaatgtcaattgatatgattgtgattcttgctttttttttcttttcttgttctaagggtgctcttggattactaagcatcccttctgcactggtgttcttggctggtgttttgctgaaggagaggcgagttacagatttcgattacaagcaggtcagaatgtcaagacaaaatttgaacacctttccttttgtgtgttgagattgctgaattcaggcatggacagtgatgccacttgagtgctttgatggattcaggttcataggaaattctacaaagcaattcagtccatgggggcaacactgaagtgtgccgaagtttggcggccgtgtgtgtatatgtatgtttctctcagtctaagcctggatatccaagcaggaatgttctactggtacactgatccaatagtgggaccaggattctctgaggtatgcacattcctgcatatagatatttgctagatatcatcagttcatcgcatcatttgcatggactgtaatactgagaatgcataccactgttaaatccatataatgaggtgtggttttagataaattcagttatttgaccttcttctaattttaatcatctgatgacacttcgattgcgtcattcgatcgtttatttcaggaatttattggccttgtgtattcggtcggttcaatcggttcgctgctcggagttttactataccaaatttcactgaaggactgccctttccgcggcgtgctattctggggccaagttctttcaagcctggcaggaatgctcgatctgataatggtgacccggctcaacacaagaatcggcattccggattacgtctttgcggtgattgacaacagtgtctcccagatggttgggaggctcaaatggttgccgctcctcgtgctttgctccaagctttgtcctccaggcatcgaaggaactttctatgcgctgctcatgtccatccaaaatgccgggttgctgatgtctggctggtggggtggcctgatgctgcagttgctgaatgtgactcgaacggagttcagtaacctctgggttgccgtcctgatcagaaacttgtcgaggctgctcccgctgatgctgctgtttcttgttccccagagtgaccaaaactcaatgctcctcccggcagagatgcttcaggacaatgaatctactgaagctaggaaaggaggtcaagacactgctgaattttccgtccttgtcgcagatgattctagctgtcatgctctgaatgtggctgtcgaagatgaaagaatcaaagtggtcgatgctggaacgggtactgtggagttgattcctctcatgaacgagctacaagaccgtgggagttgactgacaagctcatgaacaggatacttgtcttccatccatgattcattctataccaaattaccaatggcgttctggttctgttctccactctttggtagactagttctttatgtatcatcagcaacagcacatcaataggttataggtgaaacaacagttagttttcctttcattttttgtaacagaaagaagcacagtatcatttggaaggatattgaggcagttccttcgggttttttttgggtgtgtgtgtttttgtgttttgttcaagcgtccttttgggacgtacgatttttagaggaatttcatgtgacttgaactgtttcatcatgtgaaaattctgtaaaattcatgaattccaaaggtgctcacaagatagtatgatactgtcatagacacagacagacagaggcaaaccattccattcaaagccagaatactgcatcggatacgacaggaggctggcgacccaaaacctcgcgtttttcttacaagaaacaaatcccagatatctcacaccacgaaacaaaccgcaacaggataccacggcgatcacgcttgtttgctgattcacctgccaacggcgatcgatcacgctttactgctgtgctaacctcttcaggtgctgaaacatctcctgctttatccaccgacggtcgtatggcaggaaggcatgaagcgaccggtcgaacctgcgaggtgttgagggcacaaatggttaagttagttctaagcgcatcagtgtatgattagtaatgctattcgatgtcagggaagccggcactcacactagtgcacttatgtcggttaggccatcgatgaaattgtacaggtcatttatatcataagttaagtccctggccatagggttgatatccctgattttcctttcgtaaaggccacagattcctgtcattccatacagcaaactgtaagtaccaagttcctcaagggaagaacacacatataaacatagaaaatggattaagaaacaaggaagagcacgcaatgcttgtcctgggcatgattaagaacataatggggataatagagatgcttttcccaagacttagaatggaaaacagcaacaatcgtacagccgttggcatggtcctatggttagctgatacttgactgcgtgactcccaaactatgtgaaatttacagacattcatttaatggttaaagaaaacgtatgactgttatcatgttgattcaaatagaagcactacgcatattcctcaatgatatttgagctttaaagagtagcttgttgggttttctgtacattagctatagcatatcatgttagtttattaaagcaatctgtacacgttctgttatatattcctacaaggttaaactaaaagacagtgaacaaaaatctgatgaatttcctgaatttcagtccaaagtactaacagataaggagtaaatgaagaaaatactatgccactgcttatatagctgaagcaagcaacaaatgctcatgcaatttattaatgcaccacttttgtgataagttcataaccgggaacatacaggcacaaaaggggaaaggttattcccataactgcactaacatttcaagcaagcatgagagaaaataccgaccatccagtgcatggttaactgaattgaagtccataaatgttcttgtcgctctgttctgcgatggttgcatgagaatgatggtgtgcctcccggcctgagaaaaagggcagaaatcacatatggtgcataaaatgctggcaaacatctaaaatgattttgaaaatgaaataagctcgcattactctagacactgagaacgaacggaacaatatctttgccagggtgaccgaagctaatgttatttttgccgggaacaatattcaatgcacagcggaaggcagtgaatgctgcagcaaaccatcccagattctaccaggaaaaatcacactaaccaaccaagcattcccgatttcccaaaggaagacaaggagaactgcatttgcacgcccaacaggcacaaactagatgatatcctgagcatttcggcagccctacgcacatgagcagaagctccacaccacaaagatggtatgattttgcatgcaaaacccagctgcctgtacgctagtatactgtagcacatgattcttccttgccttcctactacccaaagagacgagacagctggaggttcttcaatcaagcatcaacagaagcaagcagctgggggaggagaagcaggagcgaaacgggtgcataccatgttccgagcgaagagcgcgccagccgccgatgcagctctggaccagcacacgcgcccgccgccgcgccggccgacgaaccctaaaaaggaaaaaaaaaagcacgcctcgattagtgagtggcactggcaccacagggcagggcgcgagctcctctcgtcaggtccaatccaggcacgggcggggcggggcgggcggagcaagaccagaggagaggtgttacgcttacgcgaggaagattcgattgctcgctcgcgttcgcgtgacaacgaaggggaaagggaagtgggaggtggtggagccgatcactcgccgccgagaagcacacgagactaatgctgctgctgctgctgctgcagtgcagggctgcgtctggtggcttaggagcaacgcaacgagggggtgggtgggtgagcggtgagctttgcaattgattcgattttgatctccagcaacagagagggggggggggatagggacggaaggcttctagcgctttgtctagtactattatctaaatttaaattttggttgaaatgtatgccgtactctcttcattctaaaaaaaacttaatctaagagatgatgtgacctctctttctaaaaaaactgaacttagggctagtttggtttgaggcataaattttacttaccaatatttgacaattttaataatgtgtagtgtctatttgggaagccaaattttagaatgtctaagaaaataggccatgatgtgatctctccttctaaaaaaaactgaacttagggctagtttcgtaaaaaaaactgaacttagggctagtttggtttgaggcccaaattttacttaccaatatttgacaattttaatagtatgtagtgtctatttgggaagacaaattttagaatgcctaagaaaataggccatttcaataattaacttaggctatttttgtttagcacaactttgccttcctaaaatttgtcatgccaaaacttaccaaaatttagcattgacaaaaattccaaaacttaccaaaatttagcattgacaaaaattccaaaacttaccaaaaattgataaggccaatttactagcccttaggaaacttagcttaggagacgatgtgaactctcttgttatattgatagtatgaagaatgtcacgcacaagcaggcagcccacaaacagaatcatagtcaaatgcatcagcaagtaattctgaggaaaatgataaaacttcatcgcacacgaggcacgaatgctcaagcaaacctcagaattaggtatcaaaatttgaccgctacaatgacacgatatattgtaaaccaacagaatactccaaaaccatagtacattgttacaaaatgtgtacgcacagaaaagaactaataaagggacacaaaaataccacattaagccttgttcatctcaggctccagcgaattaagctgtcacccgatagcaaaatccatggcttctttctttccttcgttgtcgaaacaataatgaacactcatctgaccttgcaaaaatatacagcacaaaactggctgttgctcacatctccagtacgagagttcctctggggtgaaacacctaagctatagagaatacacgatgctgttttggctaggcacagcatccaaaaggttgatatgccaaggctgccaaggggctattatttcaaaagtttgttgcaggcgtcgattaccacagcatgcgagctcaatatagcctgacctgaagagtttccgcccatggttttcatgacagcatcaaaaattcctttgcggaagtatgtatcctccactgcttttagaatctcctcaacaacttcaaagctcaagccacacgacaaactcagtcgtgcaacaacttcaccaaacaaggctggagctagaggaaggtcaataccaatatcttccagcagggctgcatacagtaagcatccagttttcaggtcctcagtcttgaaaattttcttggcgtgcagatgctccagcagcctaacaagaggatcaatgaagttgggacccttatccaaagcaagattgatagcttctttcacaatctcagagtagtactcaggacactgaagctcctcgatacattgttgtgcttcatccagaatacgtatgccaaaatactcttcaagaagggataccgtcttcttctgaactgcagctggcatctcatgggaagaaccggctgctttgtctgtgacaggcacaacagctggagctgcacttacaggttttggtgatggtgcagtttgagctggtgtatgagtgagactagccataaggctggaagggcgagatggtggaccaccactgcccaaaagagcactcttaccaattagtgctccacttccatgaggaagaagcctggagttaatagatgatggcttgttaatagatgatggcttattaagcaacggaccctggttacgaagagagtcgcctcttggcattgatttagaacgtggaacttcccagttatcattatctaacccaggcattccaggcatctttcttgatccaggcataccaggtgttccaggcatcccaggcatcatccctcctgttcctggtcgattcattgggaatccaccaggggaaagaggaccacctggtgcattacggccattcctcgtgagtcctgttgcccctggccgtagtccaagtgtcttcatagcctcatcatgaatttcactgattgtcttggccttaatctgaagattgcaagcatcacaaaactcagaatggataataaatttataaatccagctaaccagtgattgctaatacaaacagcaaactaagagtgggaacaaaaacattgaagccatacttggcattaaatttagtgtaagccagaaacaacattatggtaccaaacagaatgcttcaatgtatagtcaaaacggtgaactgatgaattatttcaaatatggattataaacatggccattctcttattaatataggggtgtacaaagcaatagacaaacccgttgattctaaataaatatatgcaatttcatagcactggcgattgcttgccattcccacatgagcatgcatgtttatctaataagctcacagttaaagagccactacagataactatggtgctagaatttggtagccattgaccaaagtactcatagcagcacctcggtacaaccaagagactaacgtcattatgaaagaaagacaatgcatgtataaaagataactaaaataaaacactagggtgattttatttacctcttcacgtcgaggcacccaattgtttgaacgaagatcaaccacatcacgaaccataaacctcagacgtggtgccaactgaaggtttgttgttaactccttcatctgaatgaagtaggtatcattaattcgacgagattttgggttctcgtcaagctgtttaccaattgtattgaagaactgacaaatagcctcaacgttttcctcttcagggcaagcctttttatcaggtccagaccccaagagttcctgcatatagaacagattagacaagctacccctgaataataataactttattaccaatttgctaatgcatacctgaacaatgtgatgaactatcttttcaggtaccatcttttgcttaagtagctcaccaattagacggatatttccaagtgttcttagtttgacaatcctttctttgtcccttctctccatctcttggtcagggccagtcaattttgctatttcagcccttaggctctcagcaccttcaaatgcttcctgacaattgttcaacagcacacgcttgaatgtaatctctttgccacctggttcttccgaagggaatgatggtagcttctcattgagatcggaacaaagttgagcatacatcggacagaaggtgggctcaaaaacagccttctcaaatatgagagaaataacatcctgaatcaaaagcagaagatatattaatcacaaggaggctagcaaaaaatagaaagctacagaaaagagatctaaaatcatccaacctttagaatatcagcagtggtaattccagattccattagttggcccttgagtagatcaaatttctccggtgtcagtttgtttagtatactgcatacgcacaagaaaaacaggcagcaagtcaatgccagaaaactgtgttataaagaaataaagaaataaagaaataaaagcactcaaaaaggaacaaaaacatgaaaaagactgaacgataattatgataccctttcactgttttcaggactctatctttctctgagagattgcctcttctagctgaccaaggtacctcagccttgataagagcaggagtcgggccaacctgaaagacatacatcagcaaaggcctgatcacaaagtcacaaatacatacaagtatacaagttatgaaagaaaaatacatattaaaacatgtgaattgatttcatacaacaaaataatatggactgtcacatacaagacaaactgacattgttctgtaccaatttataacccgacacttcttctgtggtttacatttcaacattcattgcaagaaagatagggttaaaagagcatagatggcactagtgatcaattgtgaatgaggggacagcaaaatgtgtaaataacactgttgagttgggtagacgatcccgcaaaaggcaaaacctagttagtttagtaatttgatgaataataatagccatggattaaccgaggaggttacatcagacataatcaacagagggaaccaacattaattccgaatcagtagctaccactaagcaaggctacttcaaaagcaacattgtttagcgcaggaagaaatatgagcttattcaagatatgaaaaaaaataatgaatgaataaggtcaaatggaacaaactttactgataattcttgtcttgaacatacctgagcttttgaagcaaactggtggtttaattgatcctgcctgttaacttgctcttgttgccgaccacttgaagcatgtgctgctttagcttcacgaatgttgtcccaggacttctcttcattagctgccggaggttgaaccgtgcgtgcacgccagtcacggttatctgtctcaccataccgattgtgcggttgcgcctgggtttgtgtctgcacttgcacctgaacaacaaaagactacaatttgagacagaattgtatgcttcaaccagaccaattggtaggattgattaatacgtatggtaaaaccaagtgaattatgatgacagcggaaatagcaagagctcacatctgactcagggcgaccccaaatctgatcttcaccatgaagctctatatcaatctcttgattaattcttaagatggcctcaggtatgtcaacgatctgttagtaagtaaaatcataattagtacgcaaaaaattagtagtcttcacaaggtcgcaatataaatattatatgccagttgaatgttagacactgtctaatgttgtctcaatagaaggtgtagtacatttataaaaccaggttaaaacagaacgaccgaactgcgaaaatagggtactaaaactcaacccccccccctctcttttattgcatttcaagactacagagtaaacaagtaaccaaaacttatatcgaaagaaagctgcggctcttccacttgaggctagtaggtacagtttcacttaaatatcctgtgagtgcctctatttccatcctagatcggtgctactttgtatatagcatagtctaaagttaaatcattcatcactgaaatttccaatgatatgctagcaacgcataccatcgaagtactcgtaccagcaaaatttctgttataaccatttcaatgtggccaatttagacacttctacatttattgcagccaaagttggttgtgtttcaactttcactgcacgaatacctaggggacattaacgtggtatatttcgatgtttgtgtgctatgcacctagttgcagaaacaccacctacgcgatattgttttccatgtctgatgtgttgaaaagtattccaaatagaaacttctgctctaatttagctcaaatgtgccagatacgctgcaagcatttttcaacaaaaccaaacgacagggagcacgtaaagcagaacatgtctactaagatattcacagcaaatttcccatccagaaactgatattgaataacacaacagattgcaagtacctcacgcagttcgagaagttgatctcttgtatagcgaacacgctcgcgcacctcaaaatttggatcaccaatctgcagcaaaagtatcagccatgtcagcatatcaaattagaaaacacaagtccacaactccacaaattaaatcacaggacacaacattttggctaataatctgagagattgatccaacaaaaaaatatttgacataaagattacataacacccacgacaacaacaacttgcttgattcagctaaggatgcaatacataaatgctgtttgcagttttaaaacaaacatatatatgtatgaaacttgccgaagaacaaggcagactcagttaacttatatgcacggcccattgtatcgcacaagccacatagaagagcaatagaagccctgaaagctaaaacaacactggaatccactacaaatcctaagtatagcatgctgaaccatgaaatatccaactttaattagcaaaagctgtcatatcacagtcgggactatcagctccttgtctcgcattaaccccctcctaaaactaggtcgagccgtgcaagcgataatcaactacaaccactaacgcccctcccagattggagcatcgatttgagatccgatcctctcaccggatctccccctcccacgcccgccaccatcccatcgaatccacatcgagcagtacatcaagccgccagatcgggcgcgtccaagctctcatcccccatcatccccccctctcaccttggatgcgccgccgacgtgggagcggagcaagtcgccggagccggaggcggcggcggcgaaggcgggggagaagaggcggccggggcgggggccgccgccgccgccgccggggcgcaagctgatgacgggctggtgatccttctccatgcttctcagacggggggatgggagggggatgaaccgaatccgggggggccgcgcgcgagctcgatcgaggcggtggggggaggaatccgcggggaaatcgcggagaaatcgaaaccccttttcccttctccctcttcggcgagagaaggttgcgtttgcgaggggaggaggggaggaggaggaggaagggggagcggaggcgtggacgacgggaggagggtggggttttatcccgggtgcttttagggctgaggggagggtgggtgtgggtccggatcgtagtttccgcacgcttgcgtgggtagtctcgtactttcctatgcgcctcgcggggattttactggcacactctctcctggtgcctggtggtgtgcgctggtgtatttgtgtgcgggccggtatttgggtcgtggtggttttgggcacgagagattgggatatttacgattgggggtatccggggcttagctggtttgtgacctgaggggtgggtattaccgtactttgtgcagttttgctctgcgtgctcgactgctcgcatagtcgcatccggcttacggttacttctgttcttcatcgagttggtattatataccagatctgttttaaaatataataaatatattttctatgtaatatgaattaaacaggtcattaagagagtacattttaaatatgtatctaggcttaatggagaagtctattctgtcctagggtctcgaggtcggagtcttgacccccgcgtcgctctcacgcgggcggctcgggggcgaaaccctagccgcccgcgccgccacaccttcttccccatcctccacctcgccaccgccggagctcggcggcggcaaagccggcggtgagccaggaaggcggcggcgaggcccatacgagtcagcggaaccgccctctgcgtgaggaggacggagatggccgatgatggcacggccggaggtggagtcggccggtcagcttggggcggcggatccggcgcccctgtggcaggatctggccccccacctgcgggccagcgcggtgggcgacacgacggaggcagagaggggcagcgagcggcagcgatggaggacgcgggtctcgatcggcgatgcagcagcgaggcggtggtggccctcggcccggtgatggcggcggccggatccggtgatggcggtggccccttgaccagatccgtcgccctcctggccggctgacgacggcgagctgcctaggagaggtgggggccggtatgccctcgccagcgcagggaaggctgcaggaggccggcgacggaggactgagccgggtggcgggcacgtgacggaggcgggggcctggtgctgcaacggaggcggggggcgggtgcgcccaccggcggttgcgggaggcccttgtgcgcggaggaagtggtggccaccggctgcgcccactggcgtcttggcacggcgcagcggagcgctcgtggtcccgatggctggccgagcctcgacggccggtcccatggccgcctcggccggtggtcgatgcagcagtggatggtggaggcttggcggctcggcggactggtgaatctgcctgagctgtgggtggtgggctaggcttggcggctggagtgacgatgtggtggtccggcgacgttcgttgcacgggtggattgggtggttttggatgacgctgacgaaagccttggctggcctttggttggaggcatcgttcccctccttggaggcgtcgttatggcgtctccctcactaccaagaacctttcccatgcaaggatggtcgttcgtggaccccgcgtcgaagctctgtaagcctagcttttcggcgaggccttcgtctcctaggttccattcttgatgtggcgagcgtacaactttcttcgttttcttctaggtgaagtcggagctgctttgttagggtgcaatgaagcttggcaacaataacatgttgcagttttcgaggggcgttggtgttagctgcgttcaagaagtggtgctctggtgatttgcgctgatgttcaaagtggacaatcgatgtcttgcttgttttctgtgatgcatttggcaacgatgttgtgatagctgtggagtcgaagctgctgtgtcgctaggcgacaagcccggcaacgataacatttgcttcacgaagtcgaagcctttgtatcgcttacaacaagctctttatcgatagctgttttgggctccgccatttttcctttttccatggtgtcggtagcttaggttagagtgttgtggttttcgcccagttttcccctaattaactgtgcattgtaaggtttggtctcgttttctccttaaaatgagacaccttcttctttatataaaatgtcggcaatggcctgaccgttcgaaaaaatgtatctaggcttagaaattgtcttagaagcttgaaattctcaaaagcagctgataagaattcataaattctaaaagttttttttactttttactttgaatttattttctagacttttggtaaaaacatgaacagtttgaaggggttaggcattttatataagactagaaaaaatgtctgtgcaatgcaacgggtgaaagctattttaatcttatcgttattacttattatacgatttagttaaggtgaaattcactttgagaattcgcttggatatatatatattttagaaaaccataagttgcaattaggagtccgaccatctaaagttagcacgtgagttttttttaaagagatttcctatacgactccttctgtatttccaaaagcgaacgaactttaaaaaccgactcaaatacagatctgtatttccaaaagtgaacaaacttaaaagccgactcatacacggatggcgtaccaaagtaccgacaaaaacatcttaatccttataatagtagagtgggtatggttgtcagaaactcctcccttaaataacgactaggaatatatagttgagtgaggtggtggataggtcatgatttaaagtatattttacaggtgttagatattgtttttgtatgtttgtgatccccccttgtttaccatactaataacgtttattgcaacaagcccatagactcgattgcacgagtacatatgactagggatgggttaggacgatgaattgagatccaacctcttatggtctatagagtggaagaagggatataagcataattgagacctaaccatttgtagcgctgggaggaggaataagaatggctccgcttttaatcattagagactagcttggtttcaatttatggtctttgctatctttttctcgtttggatttataagatgcaaatccgtattgagcaggtgtttgatactacctcacatattccccatgcccaaatgtaattatgctttatttatttccatatctgcattatatttaaaaaaatcccatctctactgcatctaagtcccactctgatatattttcataaatagaaagttttataaggaaaatgtgagctctattgattatgaaatcaagttacaattgtttaatagaagctcacgaatataagttggtgtttgcacatgccataccgcacaatgcattgtgcacataactagctaagttattttataatgaaaataattattctagcttttgtttcaaagaaactataaaagttgcaggataaatgattacaaattataaatttacggtttaattaaaagcaagacaaccacttaaaatacaacttaaatacatatatttctatatatatggttggtcagagtatatatggtgaagagaagatgcacatcggtggtatgcacggcaaaggacacaaagatgtccgacttattcgctaatagcctcgtcgccattctcgttctcgtctatgtccaagagaaagtcgggtaggggtcagccacaccatccccaccgccggcctcgcgctatcgctctcagtgctcgatgtcaccacatcgttctactatcacaacacctcgtccttaagaacacagctgccgtcctagtgaggctgtttgggatggtgttcaggtgatgctcatgaatcgaaggcgccgattgttgttggtacatgacaccgtcgtcaatgtgttgggcacaagcgacgtggcacaatacaccgtcgtcaagataaagtagcaactgcaccacacgcaatatttgggtgtacaatcatgtgctggtggccactaagaaagagagagaagggatggagggagagaagaggggcaatgatttatgggtctcgctataatttttttgttttcttaactagggcacccactattatgtgggcctaatatttgttttaattttttctaaccagattccaaatgacacgtggatcccactagtgttttttatattttcttttagtgccatgtaataaattttacgtgagacgaagaccaagtaaacatgttataccgacatcatgtgagccaaaacaatcttaatactactgagagactcgacccaatcttatgattgaggaagaaactcgacctatgattaagggacgtaaagtggaccttttcctatacaaattcagccacagcccacgccccacggcgacagttcacgcgtatcagggatcagaaccaaacgaaaggctggcctgctcgttattttggtctggcccattgaaagcattggcaaagatccagtccgttgtctctgcaacagccgcgcacaggcgacaggtgcacgggctcgttccgcggcgtcgcatgcagtgcaggctcgcgaggctactaaactcgccttccactctgcacaatttgccgtctctagtctctacctgtgtatgacccggccgtgccagaacctgtactaccggaatacggccagggagtacatgccagttattttggaatttattttatttttttattttaaattttaattaatctcatattaggttttagatggtctcttctttccatagtttttatttttactaaaaagaagtccgcgcgatgcaacgggtaaaggttatcttattatcatcatacaatttagttaaggtgaaattcactgtgggaattcgtttggatatatatttttctagaaaaatcatgagatgcaattagaagtccgatcatctcaagttagcatgcgaattttttatttagatttcttatatgactccttctatatgtccaaagacgaacgaagttaaaactcgactcaaatacagattgtatttccaaaagtgacatgggccgacatgacgatgacgaagccattagccattaggcgtcgttctccttcttgaaggtgtcgttctgacgttgacatttcttagcaccaagaacctttcgcatgcaacagtagttattggtggactcctacgatgcatccgaagctctacaatcctctataagtttctctgttttttttgggatgtctatacatctattgatagaaaatcccacctcccatctttcaaatgttggaccgttggatgtgttttaatattcgtgcagatgcattaaccctacctctcatcctcctgttcccctcccgtcacgcgtccgcacccctcccatcgctactcctctgcccgatccgccgccaccgcccgcctcgccggctggccggaggacgtcaacggcgccggcgagaccctcccctccccccttcctccttgagccgttggcggcgaggtgcccccgccaccgacgccggcccaccacccttctccagccctgcggcgttgccggcgcctcaccggccgcccgatccgccgcccaccgccgggctgccgcctcccccagccatccttctagagccggcgaactcctcccctccccctccccttcccacccccaccccaccccaccccgcgatcctaacccgtagggtccttgccggcgccggagaaaaagaggaggtcgccggagttggaggaaaaggcgtgatgcacgaatcttgaagcccatccggtgtcccaaaatctgtaagatttggagatgcaaaatctgtcgaaagaaggttagcaatttcgtttttcttctccaaaataatctaccgtgtaccccgtgtaatgctgtgacgggagtgggtgcttgtttgtagctgtactagccggctagccgcgaccggttccatcgatacctcatatacctatcacgtgtgccgtttgcgcgtagggaggtttgatatagtagatcggacggctctcgtgcgcggtgtgctagatggtgcctgcaatattttgctcgctccgcgtcaaggccatgatgcgtacgcgtgcttctcacacgaaggtccccacctgtcagcccagccacccgagtacccgacaggttctctgctgcactgcgcgctctgctcgccgcggtcgccggcggccgacccgcgtgaaagcgtggaacatatccgagacttagttggagacttgggccgcaagcagattggatgagtttggttgttgccttaattattattaatcacccgtctcttaacgggtcggatcatatgtttgttagcgagaccgagcaggatacctgaattaatgaatttaacaatccacatagctgtacaccctataaaaggcagcagctagcgaacaagaattttcgtgttttgtgtgttgacatgaagataactactggtgacaggtatatacatgtgcagattttttttttcatgaagaaatacggataacgatcgctaatgtgacctttttttttcttttctctttctcgcttatgtacaggaaagaaaaacggaatgttggattcaagattcctaagaagaaatttaggttttgtgttcgtgatgagtatggcacgaaggcattggctgagcaagttatggttaaatccacgtcactgtggcgcgagattgagcttcgtaccgagacaaggatgattacagcatttttttaccatgggtgcggccttcgcacatggtcagcgtacaggcagaacatccctatttttaataaattgcatgccgcattaaacaatatactcagaaggtacaagagtcgtcgtgtggaaattggcctattttatctgcaatcaaatatgaaatgttttcagtttacagtccggagtcctttggacaacaacaacgagtttctgaaaaagttacggaaaattaaagcacacgaatgcaacatgagagaagataatgcggagaaaactggaagcctttcccctataattatggggacattgagattagttagcaagaggcatgtacttggctttatgtttgtgatatttttatcttgtgtaataatctttctatgaaaatataagatatcttgaacatcgcctaatattaattatttcttttacaatgatccttcttcatattcttgttggttttctaggccttgaaaacaacaatagaactccaagaccatagcaacctacttttatattgttgtacaattattcataaaaacatgtaaaaaatattttgttatgtaaactttatagcaagtttttttcctatcctattggtgtattgctggcctaacaaaaaaaacatatattttatcctcgccagtttgttttattgcgcaagcgttttttggtaggcttgcggttttttttgtccatccggttttttccgtcagtgttttttcacaccgcagttcggttttcatccacttgtttttttatttgccttttttttcgccgggccggaccctaatgttgcctccacatcgatctttcttcccatgcatgcgtcgtttcccccatccaattgatcgcaaaaatcgattctatactcatccttcatcattttctccatggtttcccctttcaactcgattttaattcgtcggatttaatctccatttaacattcgtcgatgatggctggccgttgagctttcccgaccattttatctgatcaaaattccttaaccaattttgggagatcgagaaaattcagccggactttatgggtaggatcggctccggcatcgtacggcacaaaaccatattccgaaggttaaaaacggtagtcgactgtgcgagctaggcctgtggctccacttgtccgtgggcctccgccttcctccccacgccgcatgcctccatccacccaacatgcactggtcgtcgctcgccgctcgctctctctccgcccgccggcctttgcttccctagtcgcctgttggcgagctcccaaaccgcataggatgccactccctccctccgcatgtgcgccaccgccgctccctctgccctagcccacggcaactccctccttgccgcctagccatggaactgaactgggttgggactagacaaggtcggggatatggctgatgtgtaataagggctttttgttagttcagggtagtagatacattttcttttgtattctaaatgaatctctaatggtggagtaaatgtatggtcaaatggttattacaattttgaaaagcgggttcattgagcaaacttcaaaaatgatggtcagtttaattgttaggcttcaaaatagggtgttaaagtgaaagacaaatgcatattctcacctgtctcaaaataactttatgattcaccatcttatttatgtaagaacaaactttatgtataagggtctatttggatcacatggactatatttttagtactgtcacatcggatgttatgacactaattagaagtattaaacatagactaatgacaaaacctattcgataacccttgactaattcgcgagacgaatctattgagcctaattaatccatgattagactatgtgatgctacaataaacatgtgctaattatgatattaattaggcttaaaaaaatatcacgcgaattagctctcatttatgcagttaattttgtaattagtctatgtttaatactctaaattagcgtccaaacatccgatgtatgtgaaggcgtgcaatgattgctttaggtggtgtttggatcagcccccctccatatatatatctttgcacataacttgccctgacgagtgcatttcaaccctgtgacatcccggcccaataaggattaggcctgtgtggcccatgtgagctgtgtgcgcatgtttagtaccacgtcgctagtttagcacgagtggaaccgacttataaggcctcttccctccaaccacatcactccggggttaacccttttacacgaagcgaggacgaaagtgtaagtggggtggtgtgtgtaagtgggcccgctcatcggttggctgggctacgcggttctagagggagggctgttacaaacccaatcctccaaaatatccctaaatcagctaaggtttcgacagtgagtcggtgaggttagcggaagaaggccgagaggtagtggttgtgggggttagcggaagaaggccgagaggtagtggttgtgggggcctcagcggcaggaggcaacgcagtgcagcggggttagcgatggcacagtgcggtcagattagcggcgggaggcccatggattctccaagctcgtcctcgtcttgaagtcaccggaagaaggtgttgttgctcaagtgctcgttgtgcgggagatgacattttctttttttggggaagaacattttaagtattttttttttgggattctggtgtcagtatatagttacaaagagatatatgcgacatgttgtgatgtggagggggctaagagcaaaagtgttgcctatgtgacataccatgttggtggtcaaacgtggtcaaagaacgattagactgggtgtgatacattaaaccaagttcacatatctaaacgtgcaattttttagtccacagacttaagtgacaccaccacacaaatttaggggaccggccatgtatttcactctataaacagccataaatccacagaaattttgttcacatctcgttctaatcgtttcaaccatgccccgttctcgccgcggccctcccaagggcgccaactcgtcggtcgccggcgctgcgccgcgcgggggacgcgtgagtggcctcaatcaagcgtacaaccggatggcgaaggccagccgggtgcccaacccgctggccacgcccacgactcaccagggggagctcccgggaagacgtgtcgaagtgaaagaactgaagttctagtcaaaatatgataaataaaaatattgttttttaagaacattcatttgaatgctgtcgtgctctataattcttaagactatttttaactttcccttcaactaatcggcagcaggaagctagtatggtttgctttctctcatagccgtggatcctattctctgcattcttctgaggtgcagcagcccgcggagcagctgggccaccaggtcgccggcgacggggtggacctgcccgtggcggcccaggagcaggcgccagtcatgggccaggagggccatgtgccggcggcgcccgtgcacgcgccggagtccgatcctccggcagcgtgagggcgagtgcaactgacaagatcgttctgcaagcgaggagggtgtagtggcaccgaagccacgcaacgcaaaacaaagcataatcggccatgcaaagtagtatgtagtaggaaaaaggcagtgaatcggctggtagtttgtagtaggagaaggagaatgaacaagaagtatcttgaatctggagacgttaatgagaagttatcctatatgaatttcttctttctactgtttgattgaattgctgtttgtttttcttttcttttttgcgtttttgtgatattttctttgggctgggctaaactgttcgaggaagagggtgggctccggcctttcgatcggtgctcaaaggtgggtcttttggcctcttcgtgcctcttgatcttgatctgtaggagtatattttggctgtgtttagtttagtgtaaagtttgaattttgattgaaattgaagatgatttgactgtagagttgcgtgtgtatgatatgttaatgtaatagaaaaagactgaagtttggatccaaactctgtatctaaacacagcctctgctagaaccgtcgtcctcttcgtgcccttgtgtgattgctaatagatctgtgtagattccctcactctctcaaaaaaaaaaaacagtgcagattctgtctcggtcgcgctcctcttcgcgttccaggaatccgccgcttctcgggaaggcgggcgcggcggcgcttccatgttcccggcggcggagcacggagctagggctcggccagcgccagatctaacggcgtcttcctagggaagagcaagagcaccggcagatgcctcgtggtcagctatatcggccgtctgcggcggcctcggggcccaccagatctggcggtgggcggcgacatcgagctgaacgacctccatcggcgccaagcagaccctgccgtatcgtcggcgtcgagcagcttcgccaacgacctccacttctgcgacctcggcggcggctgctcgttcatcccctggtatatttctttgctcttggcaagaacaagaacactctttgttcttggcatgaacaagatgatcgtgcctgctgcaattgtataaacagagaatttgttggatctgtggctgcagcgtcattgttggatccgtggccagcagcagcggcgcccgtctgctggtgtaggagagctctgtccatctgtcaaaggagcagcaaggaagaattggaatggagtattgcttctggttcatgctatagcaattttcttttatagaattggtgctaatgagtttgctaaattggaggtcactggatgtctggattggttgatttgagggtaattgatgttcttgaaagtgcagttttttttaatggtgccaactctacaaatttaatgtataaacttgtcttcttggttggttgatccagatgcggtgagttgacaacaatgggctcttgcatctcaaggaggaggtgacgacagaggtcaaatgtcaatggaggtaatgtttcttcagccaatttcacaatgttcaatcaatatagtttcaggtttttcatagcacaaccatttggactgtatgcaagggagtaggagtacatggattactcctacaagggagtaaaacagtgttcctgtaagggagtattaatactgcaagggggtaaaacagtgttactgtaagtggcaattctgcatcttactgtaagtagcctatttaatccctttcctgggattcaacgtactcgattcatactccattgaacatcatacatgacagaatgacaccatgattcatgtatccattcaatttcagagaccataaaaatgaggcactcaatgaaaagacaacagaatagcctaccaaacttgcaatccaaactttgttttccaaaacaaactttagaacatatgttgtgcatgacaataaaccagaacaacaccagagttactcctttacatcagtatttgtactttcatgtagttttctcccttatatcagcagtatttgcaacttttctcctatacatcagtatttgcgacttttctactctccatcacaatagtgtcctaagccattgctctaaccaacttgttctagacagtccaacgccttctcgtagactctagcatcacatgatagccaagatggtaaccttccttctctttccaaagcttgcttattcatatgtgggattttgtacctatttcctccattatctttcatcacttctagcatgcacagctgtagagttaggaacactctgtttatttttgaagcttcataaccatcaaattcttcttggacagcatgaattagttcttgaatagtttttggacttgagcaattagttaatgattgaatggagctaaagaatcctaaatctaacacattcatatctggtgaatttgagggttgtttcagctgaatgtttagtcctgttgcagccactgcttgtaggaagtgtgggtcatttggagggacatgtgttctagcgttgtcctgttggatataaattgtatccccaatgtcctcttctggccacaatgactgaatagctggaattactttttcaatcaagaattgcctcatgacatccctgttgactatgatagattttgtctctaaagtccctatggttctgttgcgactctttcttatagctggaacctgaaaccaattcataaagagttcagatcagaacatagagtaagtcatttgaaatgatgaactcaaactcacctctttaacaaatggccacgtgccaatcttgccagaaaaagtcacattcccttcctcgtcaaatctgggcctggctattgcagttaggaacataactttaccgattctattcttattttgaacagtccgcaaaggatcttcttcttctggcaggagatagtaggtcttcttccttttagtcatatcaaccacttttcatcaatatggactatgttgtgcatggtcatgaatctaggatcaatatcaccaagctctaacattgaaatgcagaatttcaccctttctctcttattttcctccctcaagtatggcttcaacgtattggagtggcgtcttatcttacccagcttgaatttttggtgcactgttgcaatactcacacccaaagagtttgcaagtgaccttaaattagatcttctattcagcggaattgtagcgatttttgagagatcaatttccatcttgttggggccacagcatctagtttttctgttgtcaacatcaaccttgagcccgagtgcaacctgttcccttgcatgcttccaaatcctttgaataacttgaatacctacattgaaatattctgcaaccttttttgtggtgtccttctctaatctgccacctttgcttttagcatgtaatgctatgtaaacagcatatctttctttgtctgataaccatctccttatctttctctcttgtggttgaacacctacaagggcatgaatgaaacaggacaaatatattaaatcaaattaacaagattcaaaataatatggataagcagttgtactaggactaggagtactagaattaatataggtaatcaaaacatgaattacatatcaacatgtacttagagtagcagaatgtcaaatcaacatgtaccactgttaacatgttactaggagtgggagagtaggagtactaggattctggagttgatggacaattaacatggatagacagttaacttttttttttctttcactctttatttcagttcaagaacttcaggcacagggaaataaacaaatggcagcaggagtatgtgtacaacagtacatgcattcaagtgtacaggcacagcagaaggaaactctacaacatgtatagatcagcttgtataccaacataaaccatgtggaggcttgtcaatgagtaggaggcttccatcatcacaatttgataatgcagtttgtatcttccttttgtaaatgcagtttgtaacttctttttgagactgtaacatgttgggagcagaatttgataatgcagtttataacatgttgtaaatacagttgttgaactattgggagcagaatgaatgaatgaatcgatctgacagtgtatctgtttggcaaattgagtcatgagctactcctggttatatcattgaacctacaaactgaacaagcatgagttctccagattttagaggcaagagtacaacatctactccatttcagaggaaagagtacacatctaggaattgcagaatttcaggggttctccaacaataccatgaatttttttttacagtatccaaaagattttagtcaagctttcagggtttttactccatgatttctggaaatttcagagaatactccctcatttctgaagtggaatacaatgatcaacatccatgatttctggaaatttcagagactactccctcatttctgaagtggaatacaatgatcaacatgtactcatagtattctacggagtaaaaatttcagtattctacagacatttcatgaagtgatgtacagacatttaggaatagtactctgaaaatttcagtatattaacatgatgtttggttgatgattcttaacatggcgtttgaatggcatcatcagttaagacatttcagagtgaagaatacagtacaacatcttcagtactccatttcagacatttcagaatttcagaacttacataaaaataaatgtgaactgtgaataatttcaaacatttcagaacttcaaaaatctgaaatactccaacatccttagcgagatgaatcaccttcacccgaagcaatgttgcctgcattctgagctattacctcgtcagctacagcacctcctccaccttcatccccagcaatgttgactccagcctcgtcagctatggcttcgcctcctcgaagttcgtcaccgtcttcaggaggaggagcgttgaggtcaaagagaggaatcgccgccatggagcttaacgtgatgacgcacacgcgaagcagaaacttgtggaaagggagctctgaaacttgggggaggtcgctgccggacttgtcgggctcaaactagtcgacgtgggcgtgcgttgagaagcgaagcacgccggagtttggctgaagcaggtgttctgtgaggcgaggcgtcccgtgccgtgccgcgtcgccggagtgcgcaccgaggaggctgcgaggcgaggcgttctgcgccgcgtcgctggagtgcgcgtcgaggagtgtgcagtgccggccatcggagtgcgtgccggggagcttggtgccgaggaggtgcgtggccgccgccgccgccggcgacgcggcccctgcgtgtctgcgagctactactacctccgaggctccgagcaatggaggggagaagaaagggacatcgggggcataaaggggaattcatcgcttccttaatttgaaattcaaatcccaggacgtcttataacttgtaacagagggagtagctctttaggccgagtttacttcaaaaatttttcttcaaactttcaacttttccatcacatcaaaactttcccccacacataaatttttaacttttctgtcacatcgttacaatttcaaccaaacttttaattttggtgtaaactaaacacacccttagtgttagtatttattttggcaaggttggttgcatcgatttggctgaggtgagactggtgacagtgagaatctgtgtccttatgttatgctctaaagattaactcctatattgcttctggatgtcatacttggaaaccatggcagtttttcattttcttgcctcattaatgatgcttcaatctatcccattcagatgttattgttttgaaaggtgtttgattgtattcctcaccaagggaaaccatagctgattgcagagttgatgctgcttgttgtcaacaccctgctgctgggccagaccgcccattggatattggtaacctgccagaatgttgtttttcgatgcatttatcacataattttcatactcgtctgaattttcaggtgtccagtcattaatttctgtatgccctgtgttgagataactgctcccatctactccctccgtcctaaaatgtagctatttctagcacagtgtcttgtcccaaaataaagctatttcttcacctacctcctcctctcaaccaatcacaacaattctttttcacctactttctcttttcaaccaatcatacacttcctccaattattctcacctacttttttaatacccatgctaacttcaaaaatggcttcattttagaacggaggaagtagattttaatctgttcagttgtatattcgtgtatccaaagctctctcatactactattcatggatgaaaattcaatgatattgatttgatagcagttctctgtaattggttcaacagagcagatcgtttgaattgttctgaactgcgtcccatcaaatcagtacatacaattgccaacactatcatctactaggttcgcagtgatgatttactcgagttcctttctatcccccgttgtgtgaatcttgattgatcttggttctgatttcactgaattgcgcaatgtttgattgcaggctgggacaaggcacacctaagaaccacacctccgcacaaaacttgtatttgcaggcgcatgcgtcatcctcggctatgattcgtctaccgccgatgcaaccggagcagcgacgactagtgtttttaattgtacaatcaatatggatatgtgcctgagtctttgtaacatgtagtatgatttttttactcgacaaaaatatggctgtaatttgtgttggctatatggatttgttggtaaataggatactctatagtcagggagtaatttatttttagggttaattggatccatgccactgtaaatatgacaaattaaaaatatactactactattcacgttatctgctgagtgccactacaaatttctaaaattggaaccatgccactccatcattctttccgtcctccccgtcaatctttccgtcatccccatcatctctccggcatgttcaccatgtgggtctccatcttgccggcggccatgagctcaaggagggagtcgaggaagtcgctgccgcggctgtacgggtgcatgtgtaggcggtgacgaacatggggtcgcggccagcggcgaacggcggcggcgacggcgaggggacgctctcccatggccaccgctccgcccggtgtgttacgtcgtcgccaaggcggccgtggtgtttggcgcggcgcccgacggggccgggctggggctgcagggcaagggccagctcgtcgccgtggaggccatgttcctcatgtcgctcgcgctcaccgccgcgcacatcgccatggcctaccgcgccagctgccgcgagtgacgccgcctgctcgtctacagaatcaacgtcgaagctgtgagtgattgattcccttctttgcttgtatcgtatcaaaacaaaggattttgcctagtggtagcttgtagtgtggattggaaacatattaaacccaaaatatgcaagctttctagattccaatccgtgttttcgagagattttggagaacaacttaggcatacgcttgccgaccttttactggacatcacaatggccggaagaacccgacgtccccacatgcgaggaaagcaatggtagagcggtggccggtggacgagggcaggaggaggcactgccgcttcttgccgccgccggctgcggcgcagggcgtggagaaggcgaccgcggagtccgcgcgctcgatgcggagctcggcgacgaggtgcaggttgcggctgtacccgtggtcggcgaggtgggcgagcacggcgtcgtcagcgggcgtcatccggggcggtggagaggaggagaacggggagaggatggggaagacggaaagattgatgggaggatggaaaaagtgacgggagtgggataggtccaattttaaaattttacagtggcatatagtaaataacgtgaatagtagtggcatatttttgatttgccgtatttgcagtggcatggatccaattaacccttatttttaatgagaaggttcgagcaatttgtggccaaagcaatatgttcatatgtttttactctaacaatctggaagtaatttatttagttagagaataccagagtcaaatgttgttggtatggttagatcaaaagctatatttactgacataagcaggggaaaatttgatgaagggtaatttttagttactgagaaaaggccaagaagttatatggctagactaaaggtaatctatttacgaagagaaggcccgggtaaattttttggggagtaatttatttattgacatgagtgctacggatttttgtgggaagtaaattctttactgggtggacaccagagggattcttttgctaaaaaaaatatatttgtcagtaattgatttactgatagaggcttggtgtgactaaaagccaataatttatttactaaaagaagtttaggtgcataggtaatttattagtaatctttttactcgtggtttccaagggaaggaaaacaacaggagtgtggaaagggaaaaaaagaaaaaaaaggaaaaaaacgaaaaaaaaaaaggaatggagggagtatggactgcgggcggaaaaagaaaaacaggggagaaacgactgcgggtggaaaaatctcatgaaaaattcgaaacaatgagcatttgagattagaaaaaaaaatcctatataggatttttcgaggatttccaacattaggttggaccttatggccttatgggaaccttttatcgtctccatctctttccaaaaaaaatcgtatacttttcttatgaaacatcaaaataaataaataatcagtggttcgcaaaggatcctttgaacgtagtacggggcttatgttttccatcatgcaatttgatgacaaaatcaaaatgttcgtgcccttgagatttgattcgtaagcacacgcgggaaaactaataaaatctttcagcatcgaattgcacgacaaagataggatcgaacaaataccctgcaatatcgttcattgaattgttcttggcgatcaattaagcatcgaaatgcaagggaaagacagaattcgaattcgaattcaacactgaagtattttagtacaggtttacaactgatcaccgcccacactgacgctgctactcttcttcctcctcttcacaatcccctgctccttcaccgccacgcccttcctcttcgcgtcttccgcctcgccgttgccgccgtcgtcgccgccgccggtgccgaccgcggagtacagcggcagcgcgaccgactcgggcgccttcacgtgcagcgcccgcacgttcctccacttcctcggcacgcacgccgcagccgcctccacggcggccaccacgttctccaccgcctcctcccgcgccatcgccgcgtggcccacccgcacggcgcggcacgtgccgccctccacccgcagctccacgcgccgcgccgcctccctcgcggactccgcccacgcctggtcggcgaggtcgacgggcacgacccgggcggccttggccgccgccttgcccttgccgcccgggcggaccctgaggcggcggtcgacgagcaccaggccgcggcgcgcggcgggcgggagcgacccgagcgcgggcgaggggagcgggtcgatgtcgtcgggcaggtccgccgggaggcggtcggagacgagggagatggacgggaacggcgagcgcgggaggcggagggtgtgctcgaagcggcgggcgggggcgcgcttgagggtgacgaggaggtagatgggctccggcgccggggtggggtggtgctggagccaccggaggagcgccgccaccgcgcgggccacgtcctcgcggcgtacgcggctggccggggcggactccatcgatggcggcggcggcggcggcgggagtttgggaattgggagtggtcgactcgcgggggtttagggtttgtatccactacgcttgttggacccgaagtgggtttggtcctggttgaaccggaccaggaagccggttgggcggctcggatgtgagccacggctggagtgatcggctcggctcggctcagccggtgctgagggaccatggtccatggagcaaacacaacacatcattgacacacaactataccaacgttctatctcctttgatgtcatgacatcaaataaacaaaccaaaccatatcttggccagtatgtcatcaatctggtcacgccataaatctcaaggggttcaagtcttcaagacatggctagatagatatatatcaaacctttctacggagtatttgtatggtcataagtgtcatgatggtccaaaagaggcaaagatgatgttactatgatcaatgaggtctactctaatttgtttgttccccggaggatggttacatgcctttgttgagacaattattccatttgaaaacttcacaataaactcacttggtaattactccctttaatttgaaggaaccctatagttttcacttcaacatcatattacacttgctagtaataaaatgtggtaccggtaactatcgagaaccacaaactaattataggtgcatactttctatttgcgcatctccctgtcctcaaaacaatgaggtccacatatactcagacacgctaatcaaaccacccgaaccaccttttatcactgtgtattcacaacctataaaaacacacttcacggtcggacagttttccttaaccaatcatcattccctcatcccattaaatttgctcaaataattaaatatgacaggcatgggttcttccatcggccgtgccaccattttctactgcgttgctctatccataattgccggcgccgcagcgacacaggtgccccccaccgaagcagagtccgtagaaggtagtagcacatgcctctcctgcaaaaattactgatcagctaactaatgcgttcattttttttggtacacgtactgatcacggcacgcgcttgtggctgcacgtatgcatatcccagcggcagagcttgcgtcctctgccttcaaggccgacacgttgccctcagcctcccgcaagctgatggccgttagtgacgtgccgctaggtaatggcaccttgttgtgttgttgtacgtacatgtgattatagcttggcggtatatcgtctgacatgcgcgagtgtggcgtggtgtgtggttggcagcgccggtgtgcccggtgcggttcgacaagatgaaggggcccgccatcgagctgggaaagaagtgcaagacgacaggggtgaaggtgtgctgtgaggcgttcaagacattcgcatgcccgcacaacaagctgatcaatgacgtcaacaacggatgcgcggacgaaatgttctacaccatccacacctacggccaattgctgccgggaaccatcttcaagaaatgcctcgagggaccgcatgggatgaagtgttgaattcgatcgtgctgattcgacttgctcgatcgatatcgctccgttgttgctagcctccggcctgatctatactacctataacgatgaatgtccctttcgtcatcttgcaatgtaactaaacttacttttattacttcgaaatgcaatgaaccacaaaaggtttattacaattttctcctaggatattggttgaacataaaatgttaaccataaacacaacatttaaaagtgtgatgaagagggcgagcgtttaaaagttgcatgtcgtaatcttgaggcaatggttatacaactgtttaccaattttggatggagattcacaaacagaattcaataattgtgtactccttatcttgggttggtaggtgtcttctttttcatgtgagaaactttttgttttgtgtgttactctgtaataattggctgtaactcgttgagcaaaggccgggatattctattccattatctaaaaaaaaccataaacccaacatatcaatgcaatctctgtatatctaattgttataagggatcgtgacgctttgagagttgtacaacaacccaaacacttttttcccttcctttcccttcctcatcttgcatgtcgccgttttcatgcgttcgtgaatgctccttcgcctcctatggtggcagtgccaacctcatctcgactagcaccctcagctaacctcctccatttcccttctcccctctcttccccaaggcggtggcatcgagtgcccccaccatgccatcttcgttgaatgaggatgcaaccatcacatagaataaggagcaccttctcctcgtgctcaacacagttgtgcatgacgtcttttacttgggtgcatcacctcatctatggatgtattgtacagaaacgttatcatgccgacactgccataagatcgacaaacaccttaataactcaatgaaagtactcaattaatataaacatgcatgtacggcaaatagacaaacacataaatagatatatgtcatattttggcaagaaaaccgaccatctatcttcggctcttggctatatgtcatagttttgggcatggcataagttaaatttaaagggttcatcaacacatagctagatgtacctctacagagtatttgtaattttgcatgtcaacgggccatgtgtttcaaatattcaaagaaaaatgctgtgtgctggaaattgtttcttctccgaaggatgtgtgtttgcttttgttgagaacagtataaataatatatgaacaatggtttaaatggttgctatcggtgtaatcactccgcttcatatttcgatgatatacaaactattcattgtaatctgtagtggggattggtacaactaatggttttattctaaatagtttatggaattcacacacacgttctctctaattaaaaaatcacaggggggcatcttctcctagatgttactccctccatctcacttaaccaattttttcaatgttttataataatataaggcgcatatgcatatatgtaatgaaatagcatatttccctccgcttaattttttttaacattctccaccctgaccagtatctgtaatttcattggttacatgtactttatttgttaagatgatacaaaggagaaggtgagaatgtactatttcttgatttttgcattagtagtagttgcgtcttatattttttatatggagggattaattaaagttgtacttgtagcagccaattctttttcttccgtttgaaaactttactacacatgcaggctcagtagtacttatttttagagagggaaatctgtgtggtctgtagtatgtacttcataatgcgagtatgcatgcatgatttgcattagaaatcattgagaattaatctcgcacactaattataggtccagctaagttggccctggtatatatattggccgcaaattaaatcaccacaactcctgccctcaaaataatgaggtccacaaacagacgctaaaccacctcaaccacaatttctcatggtcagtttcactaatcaaccgatcattccccctactctcgtatatatgctctcgtaaaggcacgaacacacatctctagtcctgcagcctgctgggaatcgcaagctaggatgggttcttccaccatccttttctactgcgtcgctctgtccgtggtcgccgccgccgccgtcgtgtcgtccgccgccgaggaggccgaggggccccaagacgaagcaggccgcttcctatcaggtactatagcacatatgagtcctgaaacgttaatttcctagcttttgcaacgtaaaaaatggctagctagctaactccaattatatttttgccatcgtcttttggtatacgatcctcttagcggccaccctggcgtcctccgattccgacgcaaagacgtcgcgcagggcgctgaccagccaagaggagataatcgcaagtaataacacgcacgcataagtgtttgttgtatacgtactgtgtgccggcgatgatatgatcgtcgtacgtcgtctcgatctgacacgcacgcacgcacggtgctgcggcgtggcgtacgtttgtacgtgtgcagagccgtgcccggtggagttcgagcaggtgaaggggttcggagaacttggggccaagtgcaacgacaagcagacgatgaaggagtgctgcgagctgttcaagaagatcgcgtgcccctacaaccatctgctcaacgacatcaccaacgtctgcgcgaacgaattcttctacctcatccacaccaagggcaagctgcagcccggaaccatcttggagaactgcaacgagggccctatggggatcaactgctgaacgcctcgaagtaccgtacgttgatcaatatattcaccatttcttaatttgatgacaaattttactatagtacaccaaaagtttgtgaaatttacttgtggatatcgaaaaaaaagtgtaatggttagaggacaccaaaaagctagtaatttgccggagaatagtttggcacaattggagagacaaattcttcaaaatacgaattaaaacaagcttatgaaactttctcttctcacacacatcacgctggttggagtctgtgaaatacgaattaaaatttatcctgcgcacaagaccccagcaaagtgatagaatgatgtaatcttcagcatagtgatatagaatgatgtaatcttcagcatagagataaaatgatgtaatcttctacatgtaataaggatcaatggatcactggtggtacattggtgcatttgccatgtagtttataggatttttttctctctaaatgattcggaaatcagaacacacacatcatcattcatcagttgagcctcttgatggacacgatgcgaccgagctcctcgcgcaccgacacgagcagcacgaacgcctccgagccctgcacgtccaccatgtgctgcaccgtgccggtcaccgggtcggcgtagcagccgcagccgaccacccgcagcacgccgccgccgtcgggcgcgccgacgacctccgccacctccttctccttcccctccgtcaccgtgagcagcagcggcgccgcgggggagccgcggcgctcgccgtactccacggcccgcaccaccttcccgccgtggagcgccacctccgtctcgtccaccaccgggaacagcctccccccgatctccacgcgctcgcgcgggtcctcgtcctcgtcctccttctcctcctccttcccggcggcggcgacgacgcggtcgtcgtcctcgccgcgcgacaccaccaggtgcaccttcccctcgtgctcgacgacgccgcgcgagacgccgcccagcgcgacgcgccacctcgtcagctgcggtacgtacagggacgacgccatcttgacgctacgcgggcctccggctgcggctgcggcgccgccgtccccgccacacaagaagatcaggaagctagctacggcggcgcacaggatcagcaagagcgatggggaatgcatgagctcctcgctagagccctcctcctcgatatataaaggagcgggatctggatcggagttgctcgatcgtgtgtgaaacgggaccagaggggggttagttcattgttgtaagcgagcgtaagccggtaaaggcaaaaagttaagccggctgggaagcatggggtggcatgaaacggtcgagtactagtagataacacacataccatcggtgatcgcgagccagttcacatccaattaatgttttttttgcttccttttgtcactcataaatgtgtagtactaatgcattcttgccaaattatgtttgtagccaaagtcctcaacttttgcttgtcattcctactgctctctttaattagtttatttagaaatactttagaaaagactactgtgcgagcgagcgcgcgtgaatgtccaattcctatccggattaaagtccccgcgtgaatgtccaatttcgatgtagtacaaactatatatatgatatttataggtatcataatcagacttcgctctaactttcagtgcaaaaacttgtagacttttcttgagatgagattttaaaccacgcccatgagcttgtctcatcccgattcgtttttaactttcaatgttgaagttttgtagtttatagaaactttatttacatagaaacatgtgctgcacagaacatgctcgcaccatgcgaattttcacgcattggacatacctaactaatacgtgttcatgttagaaagttcagccgcgagggaaggatcggagtgatgttaattatgcaaaaaagttcatttacttccctaaactatttcattggatcagttaagcaccctatacttatttttattagtttacactgaaaactactaaaaatattcagctttactttttaatatcatttatatattttttcctctttatatgagttgtaatttaagctaggaatttgagccatagatgacactattgtcaaagttccgaaatatttttaaaaaatttcacaactattgacttgaaatttaaaacctagatatttaaatcaatctcggtgcttccaccctatgtaaacaatgtagaaaacatctaagaaatgttgagagctgagttataatacatctatcaatactgcaaaatttcaatgtaaaatatgacatatatagacaaagaaaaatacctttacgaggtaaggtgaactattttaaatagtttgggatgtaaaaatgagccgataacttgtttagggaattataaatgctctagcgaaatagttcgggagagtaaaataatgattttacttttccaattatacatatgaaccaggtgcggatctctggatttttcatattttggtccttttgaaaaacttatttcgtaaatagacccctgaaaaaacttatcccagaaatggtcctttttggggcgccagagtacgggacagcgccagcctctctggcgccgtcctcctgccaccgtggcacacgcgaaccgacgtggcaggaggtgctggcgccgcccgagggaggagggcgccagcacggctggcgccgcccccccccccccaacccctcacctccattcctgtttctctgtatagagttacaacggtgtcatttttgttttattttttcggatgttttttcacacttaggatcacgatacaaccaaatttaaactcgaactaccacttagctaagtctgaaaatagctagcataccacttagtctactttgcaccttcactaaaattagaccataactcctttagtaaaaccctttgatcagcatgttataaataatgcactctatcactatatgaaattacttaatctaattcaaaatataaccacatgaaataatagccataagttaaacagtacagagagatgcatttttttgatttttatttcatttttttgatattttttcacacttaggagaacataggaaccaaccatatataaaaaataaactcaaacggacaaaatatgttacttgtagaattttccaaaactctatcgaaacggacaaaatatgtcatttattaaaataggcgtaactttctcatacggactcggaatcaggcaaataatatatccacggacatctacagaaaatgttacatccgattctcccctgctttgctgggttcggcgatattaaaacctctaaattccgcttgcaagattgtattttcgaggagagaagtttctcggtagagctttggaaaattccacatgccacatattttgtccgtttgagtttattttttatatggttggttcttgtgatttcctaagtgtgaaaaaaatatcaaaaaaataaaataaaaataaaaaagttacacatctctcctctgcactagttcggagagagaggagaggagaggaaaaattctacaggtcacatattacgtccatttgagttcattttttctatggtgggttcttatgtgtccctaagcgtgaaaaaaatatcaaaaaaataaaagaaaaataaaaaaattcgggggggggcgccagccactctggcgtgctccccctagtcacctcagcatcgccccgccacgtcagcagggggacggcgccagagaggctggcgccgtcctgttggatgacggcgccagccactctagcgccccaaaaagaaccatttctgagataagtttttccaagagtctatttgcgaaataagtttttcaaaaggaccaaaatgtgaaaaattcacgtgcggatctagcccacgtgccaacttggccacgtcccgtggactagggcgaaaaaagcccacagagatatatcttcagccgttcagcgtatgtagtttgaagtgagcccagtatgtgttgggttgccggggcttgatcatggataactcatcgcccctgcttgatacatgcggtgtgcagcgacgcaagtaaaaagaggaggaataagttcacttcgtgaccctcaactgtgatcgaaatctaatccatgaccctaaaccacaaaaccggatatctcgacccccaaactcctaaaaccggtgcaatttgactccctaggtggttttgaagggcagttttgctgacatggcgtcacgtggcgcctacatggtgatattgaccgagtcttcgttccacgtggcgttgacgtggcacttaggtggcattagaattaaaaaatatgtgtgggacccattagtcattcacacataaagaaatatgggccactgacatgtggggcccacatgtcaatcctcttcattcttcctcctccctctctcccttctctctctttctctccctttttccccttcagccggcggcaggcggcgagaacgagcggcgacgacaggatgggcgagggcaggaacggcgagccgtgcagccgcccccgccgctgccatactcctccttccgaggcgtcgcagccgccgccaccctgacacctctccccgccgtcgcagctttcccatgctcgtttgtagtttcaactgcctgagaagagcgccatttatattttttccacgaatatctacatgtatgttcacataagaagacaatctacaagaaacaaataacagatatggtgtaccggcttaaatagactttctacctggtcatataaatactggatctgctgagcttgttgtagaacatgtgttgacagttgacatgagatgattaagtgctgacatctctattatctttgtctctgtttcttggacagcatcaagaagatttgtcaactccacctaagatacgagtgccggcggctggggcagcacgtggagctcgtcggcggcctgctgcgggagctcgagctcgccgagctgatgcggcgggaggccaccaggcggcccctcgagcggctccaaggcgcgctgcggccgtgctgccggcgctcgcggcgcccatccactgacgacgcgtgctcgttctcgctgcccgccgcccgccgttggggaagaaggggagagaaagggagagaagggagagagggaggaggaagaaggaagaggaccccacatgtcagtgggtccacattacttttttgaatgataaatgtgtcccacacatatttttaaattctaatgtcacttaagtgccacgtcaacaccacatggaatgaagattcggtcaatatcgccacgtaggcgccacgtcaacaaaaccattctccaaaacagtcgagggagtcaaattacaccagttttaggagtttgggggtcgaaatatccggttttgtagtttagggtcatggattaaatttcgatcacagttgaggggcatgaagtgaacttattccaaaagaggacgcgcgggcgtacacgatcactcgctctcgccgtgcggcccgttgcccgttggtggtgagcgggtgcctcggcggatgacggaagcgcgcccggagcggagcggtgctgcgttcgggcggagcgcacggaacgacatagcatgccaacgggtgcgcaagggcgcgctcctgatcgtcacgactcacgcgggtcgcggcggggcaggctgccgtgccgacctgccgggccttcttctccagcatctgcctggtggatcgatgcatattgtctctcgaccagaactcttattgctagctgagctggtaataacggtaagataccgtggcagccgatcgatcgatcttctgtgtggaggtacgggccggcggtgtctgatttggggctagtttattttattatcgaaatcaatctgactaatatttgatgttattaaaatttggtatgttttggttctatcgaaagtttggtaacgttagatatgttagtttgaaacccttctaaagtcttgtatttgtttttgtgagagaaaacttttaaattccaaagtttagtaagttaattagagattgtaaaatatattttattttgtaaagtaacataaaaatgatagggttaaaatagtaatgaagtgaaacatcggtttaatttggacctgcgcgacggctgcgcgacgatggcacgatcgagctcatagttgaatggagacagagagcagaagccacctggacgtggtaccggccgaccggtggcttctcggtgtcagcttaactatgaattatgaaatgatgaaatagtttgtccttctgttatcgaaaaaggaatgaaaaaagatacacttattttgtcacgacttatttggacgttagaacgtaacatctccgaactttatcctggacctctactcgaagagatcggtttaattcccgttctttatggattccaagcaagacggaagggtactgtaaaaaaccattttgtacgtcagtaccctcatgtgcagcacacctgtcttcagaaatgattgtccacatatggatatggataggttaattttcagagaccaatttttacgtgccctcatgtgtagtagaccaaattttcaaaatgcatttttagacaggactgtaatattgactactaattatgtcgggttccaaaactaatgattcggtaaccaacatattaaaattgtatcaagctctggatcagtagattgatacaagttcaataatctgtatcgtctttgcatacatttagacatagctttgaaggagatattattacataaagtaatagggtatttacaagattgtggctaactattacagcagaagctttagaatgacctaactctgctgttttactatagacttaaaccatttaaattacctagacttgaagactaagttaaaagggaattaacttgtgtgattgaactcccatcatcaacaagaactccaaaataattctgaaaaaggatgttgaagcaaggatgagtacaacgtactcagcaagctattatatcaaataatgaatgcatgaaatagtatttaagtagatctaggtttactggcagaaagctgagaataaagaggaagaaagcctggtatgtctttatgcaacagtatttagtaaaatcttgagttaagtttctaaccaaatatcatatgagtcccgatactcaattccgtgagcacggctattcgaatagtttcatgaatactctactgcagtagatgtacgctttactcgtagtcgtagcccagccttaggttagtcgtagcccagccttaggttagtcgtactcgatgttgaatactctacttgccaattttcattagcttagtcgtagcccagccttaggttattaacaatagtggcacctgttccatgaactctagtccccatgcgctctgaacgtaacgttatcagcagcgagaggagttcttgcgttcccgaggtttttagagagaactggatgagagaccccacgtcatctcaaccaggtttttacaatatacacacacagcgatcgcaatataatcaagatatttacctgcgcctcggtaaatatcacatttgcccttcgcggcataagtttgcctccttcgcgaggacttagataagaaccactgtacagaggtaccacattgttaattaacctaataactaggtctgtccctattctaaaagctgcggtcatactcgttcgtttgacataagtatttggtggcaattatatcgatagagacagtactagccacccggaaatcaactaattcatgcgtactgtcccaatctaagttcattatatttttatgcagtctaactaggcagggctaagcaaaatctagcatatatctagtttgctatatgttcaagttatgaattcaaaatcatgaatggctaatgcttagaataaagctatagagtataggataattatgctcaaaggagaggaataataacttgccttgctccaacgcaaataaatccaagataggcaacctgattatccgatgctcgaaatactacaggttgccatccagaataaaatagactctattaaagaagaggaagaaccaaattcaataaaagccataaaacaacaagaaagcaatgaaggtgagaaaggctaggtttgaggggtatagctatctccttaatgggttattgagctagtattttatgcgcaggctctaaggagttggaggctaggttggagaggggatcaagcaactgatgtcgcttatatctcatgtgtgggctttggttgaatagtggctagggtttcgatgctgaaatgggataacatatcggctcgtatttcatgtttaaactatgggtagttggagggtaaatagctggtatggagtttggatagcaggctggctagggtttcatttgattaagccaatatcgaggtaggatgaatatcggctgagatttgggtgtttgctagtcgtcattagaattgggtagtatgacgactaggtttggtgtctagccgatgtcaacagacaatataacggctagagggataggaagtttgtgtaggtttagtggggcggatgtgttactccgacaaccgtgagtggcggcggagcggctaggatcacacagagtctgagagctaactgtgcggcgtgctgtggaggtcgagagaatagtgaagctccgactgctgtacgcatcgaggcgtggggtgccaggagcagcacttcgaccttaggtttaggttttgccgggctttacaaccaacggttcgacgtcggggatagtaaaccgcgagcgtccccatggaaagcgtaaagttccaactggtggctttttagtggctaaagggtattttggaaataaacggaaatattcgaaaagcaaatataagtttaaattgtaaattcaattataagattatatcaaatatttattcaaatggtatttgaataaattaaggaaattcaaatgaaatattaaaatagcaaatttggtgtcaaaaggtagggtttgaatttagatgaatttaggtccaagtttcatcggaatcggatctacggtttaggagatatgggcttctaaagattgggatttgaattaaatctagaaaatatgaaaagttactgtgcgggggcccacctgtcagtatcttatcttatttttctttttcttttctccttcttcttccttcttctcgtcttcctcttctctgttccagagagagccgagagaagagagaggagaaggggagcggggtggcggcgctccggtggctggagggcggcgacgtcggaggccacgcgtgttcccgagcgtcgcgtatccggggaaggcagtagctggcggagagggagagggaggaggccggaacggcgacggcaggagcttgaccatagcaataaaaggagtggcggtggtggcttgctgtggtggctaaaagataggggaaaaggggaaaaatgagttcacctcgtcgaggcaaacacgatggcgcaagggcttggcttgtagagctgtggaagaggagatcggccagtggcaaggtggtggtcggcatgggaggagagagaaagctcggtttgatttgggaaaaggaaggggtgttgccggtttatttataggagggggaggtcggtttggaggaggagggcaagagggtcacgacgacggcagtggcgtgcaaggaaggacaacggcggccggctttagtttcttagcggcgacggaaggcttggcggcggcgtgcgcgtgcacggcacgcgcgcttgcgggaggaggaggggcggctcagctatgggccgacttgggccgcgcgagggagaagaagaattcggcccaaagttaaaaaggaggaagtctaattttcctagagattcaaataatagatttagaggaatttggatggctagattttgaaaaaggatttgaataatttgaatttgaaggaaaattgactgagagagagtttagaaggaaattatattttaatataatttccaaaagaaatatttctctagttggtttgagtgcaatattttggagagggagtttatttaatgcactcaaatagaaattcaaaatattcaacaccataaataatatttctctagatttgaatatttttgagtatgtggagggaatatgtagggagtagagtaaatagaattttagcccaaaatatgtggtatgaaatttagagaattagatatgggctaaatgaggttttggatttgggacggagggataaagtctattctcttagcacaagagcaattactcacaatatttgtaataatattattcgtgtgccgagaagaaaatcaagctacagaaattaaattggtggaatttagatatttggatcaagaatcaaaggatgggtttaagatcaaaggatgggataacaattaattccaataaaattggaagtggaaaggatttggtttggaagattttcttggaccataattcgaaagggttttaaatagaagaaattttagtcgaaagaaagttttagataaaaaccaaatcaaggaatatttcgagataaaattttaaatgagaatcacaaaggcttttgaatatcaaagggggatttttatgcaggttagctttaggaggtctcactaattatattttcctaagtttaaagaggttattaagaatataagacccggcatgatgcaaaattagaaaatagctaatttttggtatgttacaaattaataggacaaactaatacggaaaaaaattgattgcacaggttagaacagaagtgtcattatgttttgtttctattgatccttcctttttatttaacttacgatgtcgagcatcactgggcatgaacgtacaaagttcaagtcgtcgctgcagtcttttctagttcttgttctaggctgtacttttaaaattttaaggttccattatatatttatatgtttcatagtaggttttctaattcttagatacagtatagctcaggggcaattgcttaaccgtatgtgaagagcagcattttaaaagcaattggtctaaacgttttgtgtacatgtcaattaccattggcaattcttctcttcagccttcacgtccaggcaaaataactgaggagaagcgagtgcgactattgcccgttactactcctcagaagacagagtcaggtagtctgctatagcgatcaacgcgcgcgcgtcgtcgtcgtcgccacgtcgcacaacttccttgtccttcgacgaccgactacgccggccgtgcgagactgcgcggcacgaattgagtccgcgcacgcgcgcctcctttgtttgtttgatgtcgaaccgtgtaaatcatcgtaccaacatatcctaataccctatttattcggtctacgggtatacccgttgacagttgatgtggcgagtagtatttcaaagtgacaattattttgagataacttttgaatgctataaagacaaatattgtagaacggaggaagtaataaaagaacatgtgatgagacaaaatgtgtgggtgaacgaataaaatagtataaaagttagtaggtggaagaataaattaggcatggtttagtttccaattttttcttcaaactttcaatttttccatcacatcgatcaaaattttccttcacacataaacttccaacttttttcttcaaacttttaattttagtcaaacttctaattttggtgtggaactagacacagctttaatataaaagtagataatagagaaataaattagtataaaagttggtaggtggagaatatcgtagtactaagaaatcctaaaactccttatattttgggatgaaattgatggagaaaaattcctttacattcacggacgaagggattactccctcctctttcctgtttaaattcatagaacatgtatcacatatatttaaaatcttgtatattttggaacgagaggtgaacgttcatagcgaacactacctaccgctaccgctacgatgtaacagttttaatgtagtatcttgaaacttaacgtccgctatttagacttaacagatagcggatacaattcaatttagcggatcaccatatcctgagcctattttatataaccacgaacccataacaaataacgagtttgttagtgttttgtctcccaaaactttgtattcttgtgaatcttaacatctaataagtaggatattatgtttgttgtttaatttgatttaagttgaaacaagacatcaactcttcgagtgctactaaatatctagtattctcatagcttatacgtgtattgatctatcactaatttgtttatcagttattttgttattgttttataatattattatctatgatatgaactcttaaatatatgtgataattaaatgccgctattgattaagctcgcgatccgcgatcgactatatagacaccaattgatcattaccacctgctatattctattattacctttccggtactgtctctcggcttgaaatgtcgcgcgcgtgcggaggcgtgcgccaagatcacgggtgatgacgatggcatcgatcgtcgaagctgcctcttgactgcgggtgagcgtgcagcttatactgaagcgcggtagatcgcaccaacatttcagcaatgcaacgccaagagttgccgtgcgaagcacagacttcgatttggcgtacgtacgagcaactactagcggctacagttactagataggatcggaacttcgttttctcgtgacaaagctaacccccacgcttgttcgttcaattagtttccagataaattgaaaaatctatactccaaagacgtttgcattgagcagcaaccgtgtactagttcactgacccaacgacaacgacgatgacgacgctgatatccgccgaaccacccggcaaccccaaccccaaccaccccggtcgattgggacacacgtagaatcaccgcttgttaccgcgctggataacgtggaggcacgtacgccagccccagcgggcacaccacggcgtcaaatctcggtgtagtactactactcagcatcagctcatcatgacctgatcgtggccatcggattacttatatttaattaattgctcgacagatgtaatatccatcggaaagcaacgtgcagctgcagtgacacgccgtcaaacgaccgaagtccactacaaaacatacagatcggtggcggtgtaacctggttaccaggatgatagtggagcgcatgcttgtcagttgtcaccatgactttgtcctttttcctttcaagaaagctgagggacggttcgccattgattaataccgttcattcaaaaaaaaacaataatgacatatattgtacgtagtttcattacatgtattgtaatcatatccgattaattatatatccacccatcaaacaaacgagaaaattaaaaacgttgaaatgaagtgcgttcatttatgtatatccatctggcaactgcaattatattttttttctcgagtatacaagccagacacactagcacgcgcacaccacacactcacacatccatctatatatatagttgtacatatcctagcacaagtctagctaaagagattaaaggccggcgaatacccatgtaagtttaggtctagtttgaattcggataaacatattctaacacaaggtttgatgaattaacttaactatcaaaatccaataaattaatgaaacatacaagtgactactacaatactacttactgcctcacgttccacaatattagaatttccaagttgttaagcaaaaaccatggtaaagggaagagacgattatcttttagtcactttgatcagtggtcaaattttaaatcacttatattctctttccaaacatctcaaattgattagccaaaaatgtataaattaaattttcgtatattgaaatcagtgctccatagctgttcatatggtaatacacaaattttgcgtcctataaatacttatagtttagaacggatagggcatgctaattaagatctcttaaatataagttcgaaggagattaactaaagtcaaaactcattagagtgatacaacatccgtcgtcacaaagtgtcagcaatgttaggtgcgttcgaatgtgatgtttgactgggatttttcgtgatacgtaaaacaagacaaaccatttattattataaacttaattaattgagtattaattattataaatttttagttttttctaagaaactattttaaaaaacacaccacttaattagtactagtttggaaaacatgctaacggttaatgaagagtatacgaatctaaactcactttataactccatcttacccaacttaattagagcaaggataataatagagctcacttcctactattagctaatcttaaagccaacacgtataataaattagctataagtttggctacaattttcttctcatctcgatatgtctcacttatatattattaattgtatttgtcttgaagcttgtgttaagctagctcttgcatgagagccaacacccttaactttttgttatatctctcctccatataagcttatagtaggtttatagctcactattatacttgctcttatgaaggacaggggaatgataaatagggtgtgagctgaaaaggcatatctatttgggttatggtttcccctagttgaaacaactaaaatataagtactttggttaaactcaatccaagtgattgaggcctgaagaacgacattcagggtgcagttataattttttttccctatctccctgtctataaagcagctttactttaggatcggactagtaataatcaactttagagctcagtgtatatatctccaaaacatgacgacgtcaaaactatatgtgttgatgtctttgtcgtagttgttctcactcttccaagtgagagtccttgcaatgtgcaactccgtttttatgtcagatatgatggaaaagacatgcctttaccttaaataaatctccgcaaatgtaacacgatgatgggcaagtccaacaacaaatttcagctttcccctatcacttggttaggtcaatagaagcttctagaccagatcgcctctatgtgaaactatggtgaatttggtttacttttgctaatacattgcataaggattatcatgcaagtgctgtgtaaatacattacattctattccattatctaaaagaatgcatcgcatttcttttcttcttcgtacttcacacgaaaacaaggattcttggatgaaatattctggttgctctcgaagttactcgccgtcataggctccagcttataaatttatggattattcctgccacaaactttaaattatgatttttctatatatattctgcattaatataatattgcttagataacttgttctaaaatacttttatgtttataatatgtaatatttaattaatccttataagcattaattatccatatatccaatcatttataaagaacaaaaaccataatcaaatgctgagagatatatatcatatttttcgtataaaacttattacctctagataagtacctcgagattctaaaatttgtgtgtaaaattttagtacctacaaatattttctcaaacgtaaaatttgtcattttctaaacattataattcagaactatttgactacatatatgcaccaagaggtttcttattccaagtatatacatgttgaattgtgcgtgtgcatataaaagtttgtgtacattcttgaccatatgaatacttcttacctttcaaatcaatatattgaacgcaaaaacggaaaaacctaacaattttatttcctaaaaaatacagtagtcaagcagctgctatagtcagcaaatatagttagctactttcatcgctcacataactcatcaatagattatacacaaagttatctcctcaatagaccgaggatatagatcatactgttgtcagttgacaaggttggcagccactcttttctcatttaggagtatatgtaagattagtcttgcctaacattctccagtcatacgcattccaattaatattgtgtcttactccctccgttccgtaaaaacaaatatagtacgtgatatataactttgtagtattacgaaatattaggagcaatcgtttctattttggcttgtaattagagggcgtttaattagctactcaaaaaaaatactccatttgttttaaaaaaacaaatatagtagcttgatttataatttacaaggatcgaaattaaggagcaatggtttctattttgacttgtaaccaaaggacgtttaattggtcataaaaaatactcgagatataacctattttattaccgtgaatttagacagagatagaaaaaccattgctccttcttatccttgtaataaatcaaactataaatgaacccaatcccttaacaacatgtagtaccatcataaatatatcattataatcatggaatgacggaatatgttagtacataatcttaatagccaacatttactgagccatctttatgtcatatagtacactaatcatctactaaagaaaagaagaacaataattattgctattttaattccttacaatatttttggccaccgattgaaagtgtgtttatttgacccattttgtcatcctaaattagtttggtagtcacagtcttcaatcaacccgagttataattccttgtcctctcctccaccgtaacccgaacagctcttcttgtcaaggttaacaaaaccgtatgattatcgtacgttatagtggttatcacgtacggtaatcttttcaactttttaaaaatacggtataccacgctgtaagcctgtaacgtcgtcccaaacaatttggcgaagctaggtgaggtgacgctaaaccccgcttcttgccgacctgagagtcggagagtctcggcacgacacgacgagaacgatctgataaacactcgaccgcaacgtccccacacgaaaaacgtccagggtcgggtggggtgaaccgtgtccacccaccaaactccaccagtccacccccatccatccctgactgtccgactccgagcccatcgcttgcggtcgccatcccaccaaccacccccctcgccccacgcggcccccacccgtcgccttctccaacgaacgacgccacacggggtggaagaaaacccgaaaaataggaggaaaccgacgggggaaagccgcaaaaaaaaaaaaagttgagagaaaaccagagtgagctgcgcagctcatgacacatgatggtgagctacgcctacgcgagctcggagctcagctctaccgcccccgcacgccgccgccgcccgtcgcctataaaagccgctccacccccaacgagcccaccagctgctctccaccaagagctgctccgcccccctaccccgcaacccgttgctttgtgccgcgcctcgctttggtcttcatccgcctcagatctgattcgttctaggttggtctggtgagtggtgcttggcgtttttgttttttgttttttttttgttttcgtgtgtgaggggattgggatgctcacgaggtgtttggtggtatgcgtgggcggcggcggcggcggtggcaggggaagatggcgatcacggtgaggcggtcgacgatggtgcggccggcgtgggagacgccgcgggtgcggctgtggaactcgaacctcgacctcgtggtgccgcggttccacaccccaagcgtctacttctaccgccggggccccgagggagggggcgcgccggaggggttcttcgacggggagcggatgcggcgcgcgctggcggaggcgctcgtgccgttctacccgatggccgggcggctcgcgcgcgacgaggacgggagggtcgagatcgactgcaacggggaaggggtgctcttcgtcgaggccgacgcgcccgacgcctccgtcgatgactacggcgacttcgcgcccaccatggagctcaagcgcctcatccctgccgttgattacaccgacgacatctcctccttctcgctcctcgtgctccaggtgagctccaaatttctagtagcaagtacagttagatccaagcacaaaatcaaacgaggttagagatagctttctggaagtggagcgcaaacaatgctttgcaactgcagctgacaactaagtttggcagtaagccattaattataacattttggggctgattgtatagctaggtcccatgttggctgttgcactaaatgtttggggctgagcttagcgggtcacctactctttggttggctttaattagctgcatcagatgtacggttccatccaggcagttgatgtctttctgttgtgggcggggtctatttttggtttgatgtttatgcttattgtgatagtttagtaggggttgtgtaggaattatagaattttaaaacaccataattcaatgccaataatcagtatccactaaaaaaatgaagtatatgcttcaccttgactgtgtcaaagcctagacaattttgatttgtccagagtgattgtatcatatagatttgaaatgtgtttttcacgttggactccacattgtcttctatgttataccatctaaaagtggcagcagcgtgcatcaatttgtgcattaagagtaacagacaacaaaagccaccggtcgtgcgggtacatccctgccaagcttgagaaactaatactagaggactactttattaagtagccctttaatttgctccggtatatccctatatcctgtcctgaactactacacttatggattcatgacctacagatatttgaaccgagaagcttatcccatttggagctttttaacattggatttgcacgtttaaccctgctagcctttgttgaatacttaaaactttgtggcgatgactatatatattgctttgatcacttaagcataagtgccgatcattccatgtcattccatgttactgctgatatttaagtgttttgatgccagaagtaatggttagattgcattaaaacttgttattagatgggaacaattttagtaggcactaatgttttcttctagggcctctatagctcccatatatggttgattggtcaatctcattgttccaaaatgtcaaccatttgccccatgatgtagacaggaggggacttaattgggtgtgatattaacattttgtgatagttagtctttgactgacaatagctttcttttgcctgttcgataactggagcccttgtcctgtagagcctcatgagctgtttatcctttgatggatacatcattcaggttgcacgttcaattttgtcctaaatgaaacatgtctgatctgctcaccttctggttatccatcatcagctgccctttcatgctggaattcttgtacaataaatcaattaggttgaatgaatcattagtcttacgtgagacatacttgactttgaaataatatggtacagtgtacaacacaacgtgttaatggaaagaatttatttgcttgtaagtctagtagaccttaggagctaaaattttatttagaaaattgttctaataattgaggcacatgctaatactttttccttgcaactgaaaatttgtgcatgcactttccataacataaaactgggccaaaatttacaaggttacaaaccatagtttcattcaatttttttactcgctgatatgtcagcaaccatgactctgagtagtcttggtgcactgcatgttggttggtatggatctgagtgttaactggagcatgttccatctgacaagtttttgcttataataagttaatagatagtactgttttgcgccatattgttccaattttagaagttatttaaaccttgatttcctctcttttatcaactctagttgttgctaacttgttgtaacacctgtttagatggcaagctgacttcaattgtggtgtgcatgcatcaaccttcttttttttgtgggttgggttgaccatggaatgttgcatcctgagctagacaagccatttgcatgtagtccttctctgttagttgccaataaaatgtcttgcagctgtggcaaaggtacttttgcattgcttggtagagtgcttgtcaattgttggatcctaacaccttgttaatgtggatctgaggcctgcgaatatcatgcatcccaaccccaaaaaattgtagagaaaattatgttactctttatctagtgcacaattggagcatctcttgtcatctgtagttgattccttctatgttcatcagaaacttggtgtattgcctgtcttaatggctcttcctagtaaaagcctctaagatcctgtccttgcgatattatattcggtgatgcacttgcagcacatatactcagatcttgcatgtgcatatgttttaaaattcacatatgtaaagcatcatcgaacatttcttgagtggccataaattctaccatgccatagcagtcactgtcaaacacacaatgctatgcattcatgtccatggacaattcagctatttcatgcatcagcatatgtctgttttcattctagaatcactttgccatctcatcttctggttcgtggccttgattttagttgtgttagttttatttattttgttatccgtagcctcattggttagctgattatgctagaaaaaaaactatatcaacatgataccatattggtgattcaacacttaactgatgtgacatagaccaactttcaatgccccctaccatatatgtatttggtctaccattaatagtaagcacgacagtagtcaaaggaccaaacttatcagtaagggagatcacacatgttcctataacaaagcggaatctaatatgcatgcatatagtattatccaattattactatcatgttgtcttgcaatttcatttagtcatcaatacacattgtttacctcatgaactatgtccgtatttgtgattaggtttaaacaattctggctcacatttattaattataaaattgcatgcctgcatgtttcatgttaattaatgataaggcatagtacatgcttgcgctagtttttgtatcacttgtactcttgtttgaaaatttttttttggctgatggcagattctatggcacattttttatggtagaatcagaaatcgggaatttgatggaggatgttgtcatttgtatgcattattacatgacaaaagtttgtatagaagcacaaatttgagtttatatgtttatggttgcagtcaacaattttggtggcaatgcttatgtcttgcatcctaagtcttggaaattcaattagaaatccagtacccagtatagtatggaactgagtttcagttcaacaatataacttgcagatttttgaagagttgtgtcagtacatagttaatttctgacatccagaatgtttatgcctattggtgtaagcaacttctatctgtgtcattcatgtactatctatctcaatacttgtaatgttgctataatggtatatgcagttgaaaatatgaattatatttatcttagtaagtgaaacatttcaagacactgattctccttggttttgttattttgttccaggtgacctacttcaagtgcggaggtgtctcccttggagttggtatgcaacaccatgtggcggatggcatgtccggtttgcactttattaactcatggtctgacctctgccgaggaactcaaattgccatcatgcccttcattgaccgcactctcctacgagcccgagatccaccaactccatcatacccacatgttgagtaccagcctgccccagccatgctgtcctccgtaccccagtctgttactgctaataagacaacaccacctccaactgctgtggacattttcaagcttacccgctcagaccttggtcgactgcgttcgcagctcccatcaggagaaggtgcaccacgtttcagcacatatgcagttcttgctgcacatgtctggcgatgcgtatctcttgcacgtggcctgccttctgaacagcccactaagctgtattgtgccactgatgggcgacaacggttgcagcctccacttccagaaggttactttgggaatgtcattttcaccgccactccacttgctgaggcaggcaaggtgaccagtgggctggcagatggagcagcagtcatccaagaggcgctagataggatgaacgatagctactgccgctcagcattggactacctggagctgcagcctgatttatcagcattggtccgtggagcacacactttccggtgtccgaacctcgggctcaccagctgggtgcgcttgccaattcatgatgcagattttggatggggaagaccagtgttcatgggtcctggtggcatcgcctatgaagggctggcgtttgtcctcccaagcgcgaacaaggatggtagcctatccatagccatctcattgcaggctgagcacatggagaagttcaggaagctgatcttcgaggtgtaagcagactacttatgttatgtcagggagaagttgtagagctagagttctcaggtaaaataccttcaagtgagtcatgggggctatgctcttgctcctgttgagcaaattgtctggccacgttctcttgtaccttagcttgcaaggatatttggccatcaccacagccgtgtgacgatgtgagcaaccaataatgagctgtttttttgttttcgtttaggataggaatcaacaatgaagaaaaggtgctgtattctgtgaaactacatggcagtgttgttcttaccaaaaatacatgacaagtgaattgggtcaagttattgcctgttgtagctcaagtcgatagatgaacatcattgtacagtacgaatgtacgatacgactataacagcctgattgcctatgaactgcaagtaaatgcatgtgaataactgaatatgtgatcgtgactgatatttgttgcttgattgcctccatcaaacgtatatgtgatcttgactgatattcgttgcttgattgcttccatcaaagctgcattcctggtgtttttcgttgcaaccactccttgccatggatatccaggcttgtttatttgcaggcctcgcccatggcggcgattcatgtcctctctctcacacgcatactacatgttctctgaccttttgttccaaagagaggaaaaaaacagcggagaagcatccgttccgtttctagtgtttgggtgggggtaggcctactgcgactgccatgtgggacacacacgacaaggcgacccccacatcctccatgccgttcaaaacttcgcgacacgaagcccgaggagcagggggtttcgtcctccttcgccgcctccgcctccccccccnnnnnaggccacctccctcactcaccgcctctccccccactccccctctcgatacacgatcaggcgacacgccgtcccctccttccttaccccgcgtagcctagtggcttctcatcgccaccgccgccgccatgccgtccgcgccccgctctccgcgatttcaaacgttcctcgtccggtgcgccgccgacggggcggcggacgtgggatgctgcctcaacggtcaaccctgcggattgccggtgctgggccgccgtgggcggcgccgttgcgcgctggcctcccgcggccgcggcctcggaggctctccctgataccccgcgctcctccgacgcacccgtgtgctgcggccctcgtgcgctgcttcaagtgtgaaatcggtgagcacatcataactccccaaatcgcatttcagatgaactcgagaggaaaatttcaacattatttaaattcgttgcctgattacgccggcttctcgatgggaatttttgcagatacatttgcgtgtgccaccccttcttgctagacgtttcctagtgttattgctactagtagattcaagtgagatcaatcgccataattgctcatttattcaactcaaatgtgaaaatgctgaaagtctatttaacaccaaaaataataatcttagaaaaaaacaaactcgagatattttctcgtgcttctagagtattcctccagaaataaattaaaaaatacggagaaaattaaccttggatggggaatgaggtacagctagcacagtgaaaaagaaggctaggttgtgcagtgcaggctacagtgaacttagatatgcgtacgtgcatcaagccaacgtgacaaagcccatctgaatatgctcctattctttctatgcttagttacgtcatcaagctattaattgcgcctaccaccgaaagactaaccagggggtttagcaattaaccagggggtttagctattaattgcgcctaccaccgaatatgcacatattctttctaagagtatgtacaatagcatgctataagccggctgtaaccatatatcgagaagaaaaaagaagagagataaaaaagcgagctacagatttgtagccggctgcaacacggactttaagatgttatgtgtgtatgagaggtgggaccgtgtattaatggtgcagtatatttttatagttaactattgtataaatagactattagattggctatagatattttggagccagtagttggctatatattgacctcgctcttaaccccctacgaatccttcttgtttcttgagattttgttcgtgcactgctgcattggattctgtagttaccagtaacaaacttcctaatgtggtcaggttaaacccctcgcgaaaggcgcgggcggggggcttgtccggacgcgcgcgagccgagccggagccgaagccgttgctggtccgagccgagccgagccgagccgagcgaggcgtggggggtggttggtgttggtggtgacgcccgggtagtataagtgaaggccccctcagttgcatggaaggcgaccgcttgcgctaaggccaaaggtgaggagatctctccctctccctctctctctctctctcctcccatctctccctctcctctgaatttttgttcgtttgcttccaccgatcagaagcctctcttcctcgcgggggaacctgtgaattctcgatctatcgcctctcttcgtgcttcgatttcgctgtgcttgatctcgctctctcgctcgctcttgcggccgcgcgtctgtgttctactggtgttggtaacgtcgatcgctcgctcgctcgctgctggtgtttctcgtcatcgtgcggtggggggtgcgtgcgtgcgtgctactggtttggtaagcccgctccgttcttgtcgtcgtgtgtgttcttgcgtgcttctgaccttctgttgctgatgctgacgatggttttcttctcgggttttggtgccgttggttttgctgctactggtggtggttttcgtggatgggatgaactgaagttgccggaggcggacgagcaccgcgattccatggtgatctccgttcgcctccgtgtttgcaactcccacgggttttgctcgttccaccgtcggatcgaagcgtcctcttgtcgttctcgtctactagatcccttcggtgtacggtgcaagagcttcgtctctcttttttaggcccttcagtctccaaaaagttcgtgagatttttacccttcttagatcttctggtgttcgcgtgttcattatcgttgcttttttggctgctgtttcagtcgtgatcggtggttttcttggaggaggctgcatccgagtcttctcggaattaactcggtgattttttgttcttcccaccatctgttcctggatgcatctctttctttttttcttttttttttacggtgctacacagatgcgcaatggcaacacgagggtggctgcttcgtctcgatctctcgcttgtttccatttgaaactattttctgttccggaatgttcgagatcgccatttcttcatgtgggtttagggttttagaacgtgtaggcttgtaacatcctttcctatcgttgggcttctgctgcgattgctggtcttgttgggcgagcggaaactggatgtctctgcccgtgctttttacctgttatttggtttaattttctgctttttatatgccaaatcttcattaggattcccttcttgctgaccgagttattttttttcctgcaagatcgacgcgttctgtttattaagcgtattaacacttttccattttgttgccagtttccgggggttgtgcactactgcagtgttacattgttcggcagttcgtttttggtaaacatctatccatccttagaccatagtagaactgaaatttgggaccgcagagttttctccccctcgtttattcttgttcttgaatgctagattcgagaatctatgattatacttccttttaatcaattccctaaattagtcgttaccatatgttttgattatacttcctcgagtgaatttcttcattcttcagattgtctggtttattcttgcaagatgattgtaatcttgtctactttttgtatgatgcagttgtgtttgttttcacttccctctgttggaatgcactgataaaatttactattatgctgtgctaaatttctatgtattttttactgtatcatcatagttcaccttaggtctaactttcatgctagatcttgggttcaaaatgatggcatttgtgtatcttgaagattataaatgcaagatataaaaagaagaaaaaaaaatcctggaatgcatccgtgggacctgtgtctaccaaaaaattgctttgtatggactgctttagagtcatgagtcatctttgcttgctcgctcatcaacaatatgtgtccaaaatattggagttatgctttgagctttgcaaacagtggcataccgcgtatctattttttgtttctgcaaaatgcagttcaaattcaagctagttaacctttctattcattctgccccaataattcctattcgtattttcaccgttacttctagtatttaggtgatctgtaacctgatcttagtatggaatttaaggatattttattcctattattatgtttcagcgaagcagactccgctatggctcaacctcaacgtcccctccaagttcctgacataacaaagtctactcattctggagggaacactgtacttgcttatgcttcatcagctatgcaaggataccgtagcaccatggaagatgccgtgagtaaccttccagtcttttgtaggagaaatggggggttggcttgcaactaattttggtgaaattctaaaggctaatttgtgtactcttctattctccagcatgcgactattgaaaatcttgatgctctcactaacacgtcattctttggtgtttatgatggccatggaggtttgatcttcaatctcatccccatataaacagcaaaattcaaatttattgtactgattgaggggatactcccttctcattgtatagggcatattttctttaggcatgctcattcttctttaaagctacactttcaactttgatgtctcacataatatattgttcatagctacaaaaccaatatgacgagaaagcactttgactaattgttggtcaaaacctacaaagtttgacttcttgaaaagtatgctcaccctacatagtacataatgtggggggaggactaggctagtaaaatttataatatccatgtacatgcaaccttcattgcactcaagagtaatgttgcgcaatggttatgtaagatgagtatctcaattatttaacttctatttcaggttctgctgtagcaaggtattgcgcaaatcacttgcacaataaggttttggagcaagaagattttagcagtaaccttgctaatgcattgaggcaatcctttttcaggttgtttttacagctagttaatccattaactctatattttgatgccacatgagttctttttataagaatgtaagaaacaaccatcgccacattggtgttcattattgcacctgttgtgcatccaaatataaaatatgtaatcctttttcctccttaattgttgcagaatggatgagatgttgagaaatcaggcggcaagcaaggaattaactgagtatggtagtggcaacgagtattggagaacagctgggcggtcttggctcagatgtgctccttgtgtgctggtaatatctcaattgttctgtagatcgagaatctaaggtttttatatttttgttatttacttcaagttggtttttgttttccagggacctgtctattgtggaccattagcagaaggatgtacagcatgtgtggttctcattagaaatacgcagatcgttgttggaaatgctggtgatgctcgttgtgtaatctcaaggaatggtcaggtgcagtgactacttttgttttcaaatgcctagctggtatttcctttttcataatggatgatgcactctaatgtcacctaactattctgtttatttctgttgtattcgaaggcaatcgctttatccaatgatcacaaaccaaattttccggaggaaactcagagaatagtagctgcaggaggttccgtatctttttctaggggttcccaccgtgttaataatggaattgcagtatcaagagcaatcggtatagcttatatgtttgttggcggtgtgaggtcatacacaaacaatttaatgtgttgtaactggtattcttcttctttatacaggggatttatcttacaagaacaacaaaaagttgcgtcctgaacaacaattgctgacttgttctcctgaaattcgagctgtaaggataactacgttgtgttattgaagttaagtttgtcccactggatatgagctgatgcaaaatgatccccttttgtctctggcaggaccaattaactgatgataccgagtttcttgttatagcatgtgatggagtctggtaagtcctcagctaaaagtatcagaaacagttcttatatttttctcccatgttcatgatttcttgcagaatataggaactccaaatgacaattctctctcgtacgcttatttgtttgttcaaaatatttaccgacaaaatttgcagattttgttcagctcagtttgatttactgactaggctactttaccaccatgtacataaagtcattttgtacagttgttgaaccggtgggtctaattcctttcgttagtttagtgtgatgatagcattggagaggtcaaatgtctgcacctccctatatatgggttcggatgctttattgtgtccagatgactattaacttggtggcatgaatttcagtttcacctgttcagttcgatggaaatgaccatcgaatatatctaatttatatcataaggactaaacttgaagttcctggatgaggaaattatttatgaaacctgatggagtggtgataggaatttcaccctgcctgaccattactctttgacacaattaatgtaacttgcagctgtttgctctatatttacatattttttttggttttgtagggatgtcttggcaaaccaggctgtggttgattttgtacgccttcacttaaacaatgtgagtgacattccccgccccctctccagtgatacactgtaacagtaaccttgctaccagatgaggaaaatttatccgtgtgcagattatgcctgtagaaatgtcttcatactgagaattataattttgtccagcatatcttgccctgaatgtagctctgacatttagcacagactatcctctaaatgggatggtgcctggcctagttaaataattttctgtcggattgccgtttgtatagtctaaaaatggaagcgtgtgcaccatgttttgcaccttgtccatttacagttatatgttgttattccttttgccttgacatatatgtatgatgtgaccaacacagggggtggagctgtcggtaatctgcgagagccttcttcaggaggccattacacgagacccaccatcgacggacaacatgagcgtcatactggttcggttcctgcacccagagggcaacaggggggcgagggcggctacttccagcaccagtaccggcaccgtccccagccgccacagcaaaagcatatcgctttgatctcgatccttctcatgcggagatgggggtgaaccttggatttactccttcgtaggattgctttccattgatgactagtcttgtcgtacttggtgcattgacgacggagatttggcctggaggaggggtcgcttgaattcgttgcacattcctttctgatcctgtttagtctcgtggaagaaaatgctttaattgactagtggtactcttttggtaaaatgccaagctgcctttacagactagtagttcattctgccttttatgatctcttctgctttttatgatctctcttcatgctttgatctgaattccctgatgaagcctacatgaacgcatgccatgctattttgttcactttgaatacactgtgctgtgcaagtaggcattctcagttgctctgcattcagaatagcagggagattttggttcgtgtttcaatctcggccatgcatgatgttagttgtggtccttgtggaagcaacctggatttctgggatcctctgaaccgagtgctgctagctctgtcatcaggagattgttttggaggagattgattgttgctgcaactagtggcgtgaccggctattgtctccgttctatccgctgcgtgcagagagggccaggactcgtattgccggcagtggcgaactggcgggtgacggccctcctcaggatcgtcggcgaggactcgtttctgttacttgttactacctgtatgactgtatccccggtcgccgccgcgggatcgccggagctccgcggccgtcctgagttggggcaggggagagaagggaacaaactggaagactgaaaagatggggaaagtattcataattgacccctacagagcatgccgctgtcaagggtagcggtccggaattttgcaaattagactctgaacgatctgttcagttcatggcaaggagaaattttcgattttctcatcaatggctacttggtttaacagactagctctgaatcggatcgcgtttcattcgtgtcctccccgctcagcgcgcggcggcttagggtgagtggtgcggccactccggcgaggacgtcggcgttgtgtggccgaaccgaacgccaaaggaaagataggagtagcatctcccatttctgccgtgacacctcaatccatttcgaatctcaacgttgtggccccgccacgcaaacgtgcaagtaatttcaggtggctgtattataaagccttgacagatgtagttctagcttcaccaacaaatcaagaatcatgtcagttacatagtgaggtcaacaattgatctcttaacacaaacagcaacatggaaaccaagctaaggtaccagatcataatgtaagaatgcttgatcagatcattatagtactaacttgaaaaactgggatagtaaagcaaaattttgggcatgcaaagaaaatactagctggctcgtaaagcaatcaacggtacaatcaagtgatcaactgcaaagcatataatagctcacgataagtcacttgcattatatcaaattcatggaagtgtgcagcaaaatagtgataacttagccactgaggcattcgctaagtaatagctacaaaactccaatcacatagagaccaggacacaaaagactactgcagcaccctaacttagatgatgccaatcttgttggccacgtcgagagcatcgtagtctggtgtcagcttcacgtaagccttcttcttcccatcaggcctggaagacaagtagggtcagttaactacactacctagcaaatcaagcgataaaatgaagtatgaaggaaagtgctaacctgatcagagtgttcactttctttgcctggatgtcgtacatcttcttgacagcagccttgatcttcttcttgtcagccttaaggtcaacaatgaagaccagagtgttgttgtcttcgatcttcttcattgcggattcagtggtaaggggatacttaaggatctggtactgatcaagcttgttcctcccaggggtactgactcttgggtacttggggtccctagacttcttcaaggtcttggggcggtgaaatgtcacggatgtgcggatcttcttggtcgtcttcttggctgtcccagacttaacagccttggctgccttcaaggcttgggccttggcatcacccttcttggcaggagcagctagacacaaaataaaacaatcagttcatgcatcttaattaagcaccaagctgaggttaaaaaagccaggcagaaatggattcatagactaattatacaacccgactacaggaatacactcatttccaatggaccatattcatcaatgcttagcaattcaatacttattttaaacaaatatgcataaaagaacttattcagtactaagaccttatatagtgcaagcgagactacataataatatgatgtacaaaactagaaatagttaaaaacaaccaatatgaagcaatttgcacatggtctgaaatcaaaagaacatgtaaacatgatccagcaatatcatctgtgtacctttaggagccattggagcttcacagggctgcctcttgaactgcacacaaagagaacagtgatatcagaagtatgaaacagaaaaactaaacaatacaccattgcgaattcagctatttcataatacattactaatatagaaagagaaagccacctaactaagcatagaactgcttcacagtagagtcgttatacacttcaggaggaaaaggtatcttgctcacacatttcacattagccaagtaaatctaaataagcaatcaggcaaaagttcggccctaccatttcagtaagtataagagtactagtaacaggctaacagcaacgatacatcctatgtggtaatcaaaatgtatcctgtattataatccaaacagggtaatttctgatgtgaaaccaatcaaccaccaaaagctaaccaagacaacagattcagaactcacacaaaaaaaaaaccaccttaatagtcaacaaacaactacatcaagttcaaatcaaccataacgagcacactaatatcgccagcatccctaaacatcacccacagttctaaagattcaccgtactagactgtgtaacacgccatcctaaattgaatctccagaagaaaagcaccaactactggatgagcaacgacctgaaatccactacaagaaatcgacgaaaagcgcgcgcaagtagcggatccagcctcgccctcagattaagggagagacgcgagctccatcccgcgcggctacagagcacagaaatgcgcttgactaagacgaacacgagcacgaggacggcgggggcggaggtggtggtagttgcggcgggggacgcttaccttacctctccgggacggcggcggcggacgcgaagcgaggagggagacgacggctgaggagaaaaccctagcggcctcgcggggcggcgacttataagacggacgcgagctgagctgctcccctctagggttcaggcgggctgggccggagccaccgcggcgagaggctgcgtcggcccatcatctcatgatggattagtaagggaaaaaagtacaccaaaggtccctcaacttgtcatcgggatacaaaagcatcctcgaaccacaaaaccaaatatacggggtgccttaactatacaaaaccggccacccgagatctttttttttttttttggtggttttaacccagtattggcctacgtggcgcgtgggacccacatgtcatcgtgccacgtaactcctttcccccctcttctctccctttctcccccctctctctctctcacactcttctctcgcagtcgcatgccggccgacgggtagggagcagacgcccgggcggcggccggcggaccgcagcgtgcgaaggcgtcctcgccctcgtcttcgtatgccgaggacgagcgccgcgttgaggccttccaccagcggttcggcaccggcgcgacggagatgccaacttgcttggcaccgctcgccgccgccctagtagcagcagcagcaaggcaaattagcgtgcacgcgacatgcgcgaccgtggcaacgacggcttgcgagccggcgagctgatgccgtcgctccggcgcgccatgttcgagctagcttctccagtaggcgcgatgttcgagccgcaggagttgcaagcgaaaaaaccctactagccaccagcccacaactggcctggacgcgccaccgcagctggagatggagatggaggacatcgaggacgtgctggggctggctaggctcaccggcggcgaggcgccttcggggctccgtctcccgctcgccgccgtcgccggtccgctcgcccacgcgacatggaggacgctgccgctccccatccgccggcgccgtgcgcgcgtcctcctgccaccaccgccgcttcgctggtcgccgtgcgcttgcacgctgcctccgccggccgccgcttagccccgctcgccgccgtccgttgctactccgtcacggcaaagagaactaaaaaaagaagagaaaaaaaaaagaaagggaaaagttggcgtggcacgctggcatgtgggtcccatgctaactcagccgtagaccaaaaccggggtcaaagccgctgaaggatctcgggtgaccggttttgtatatttaagggaccccgcatatctgggtttgtggtttgaggatgtttttaatatcccgatgacaaattgtgggaccttcggtgtactttttccattagtaagttctctcgtggcccaatactctcttgatgggcctgaagcctcggcctaccaacggcagcgaactccccaaatcgccactaggccctccccggctggattgttcaccctttcttttcttctgaaaacttattttataaatagattaaaaaaattatttcgagaatagaccttttccacggtcccaacgttaatgatattgttgtccaacatgacggtatcagacattgatagtgtccccttaattttctcgtggaagctaaatcatttacataaagggatggcttgctgctgagaacttatgtgtttaaagacttatttttaattataaaatattttcaaataggttctttttgctaacaacactagcgccaatgaagttggagctgcgaaaagatccattctagaatattttttagggatctattcgtaaacaaactttcaaaaaggtgtaaactaaaaaaataatccatcccacaatgattcaccccgatccggttcgccacgtcacccccacgcaccacgctacttcccagcgtggcattgttcgcggagatcccttttcctcgcacgcgcactcacctcacctcacctcacacgccgccttcccgacgctgacagccgggccccaccacagacctcgacggccatggaccacgatcccaaggagcggctcctcctgccgccccgcgccgcggcggcggcggcggccaatgggccccaccgccgcgccgcgcccgcggcgggcggcggcgggggcggcgtggccatcgacgtccacgggctgaagaggcgcggcggcgggcggcggtcgtgggtgcgcgtggacgcggcgacgggggcgtcggaggcggtggaggtcgccaagccggcgctcatgcggcggctcgacctgcccgcgcgcgacctccgcctcctcgacccgctcttcgtctacccctccgcgatcctcgggcgcgagcgcgccgtcgtctgcaacctcgagcggatacggtgcatcatcaccgccgacgaggcgctcatcctgcgcgaccccgacgtggcggggggaggagctgagacggaggaggccgtgcggaggtacgtcgctgagctgcagcgccgcctcgtggaccgcgccgacgatctgccgttcgagttcatcgccctggaggtcgcgctcgaagctgcctgctcgttcctcgacgcacaggtgccactgcgtattatctggaaacctttgcttgcgaattattgatttcattaacaattgagaagtattgacttgcgtggcgtctgctactactacttcattaacaattgcactgctctagcaattatgatttaatataaagtgaagcatttgcatctgcaatgtctattagaccagtagattccactaaacgatatctttttttacttaccaggacactgtatgatgtaaacaatagcttttattttagctattctctgtttaaacagcggtaggaaggtgacatgtgaatcaggcagtgggcaagatcactgtccacaacgttcattatgtcgatactaagtattcatatgatcttacattgttgcatacaactaaacggtagtgtctgaccccaatgataaaagttcaggaatgtagcaactactaatttttcaggatctcatacttagttgttcctttgccttcaagagtgattgcctataacctgaatgtgaacaaaatgaagtaatgcatcacagatttgctgatcaattggcaaatcctgcagtgatcgtcttgtgctacgctcttttaatagtgttcttttgtgcataatgatacggtatctaactggagaaccaaaaacatttgcatatttgtcaggctgtcgaattggaggctgacgcttatcctttactggatgaattgacaacgaaaatcagtacccttaacttggaacgtgtgcggcgcctaaagagtaagctggttgcattgactagaagggtccaaaaggtaaatggactgtgtcaatgtagttttgtttttggcaaacattaaattggttttcaataattggtctatttcccccattaaggtcagagatgagatagagcagctgatggacgacgatggtgatatggctgaaatgtacctcacagagaagaagaggaggatggaagcatcattgctagaggagcaggcgtttcaggggatgggcaatagtggatttggttcatctttctctgctccagtttcgccagtttcctcaccccctgcttctcgaaggcttgagaaggaattgagttttgccagaagtaggcatgacagcttcaagagtgcagacagtagtcagtacagcatagaagaacttgaaatgttgttagaggcttatttcgtggtcattgattacaccctcagcaagttaacttcggtacgaagcctcgctttttatgcccttctgtttattttttacaactacatgggctaataaattttatgtttatatatatatatatatatatatatatatatatatatatatatatatatatatatatatatatatatatatatatatatatatatatatattccaacagctgaaggagtatattgatgatacagaggatttcatcaacatacaactggtatagtccccaaatatcttcttcatacttgatagttaatttggtagcagatcaatttccaatctcacaacagaattggcttgtttcttatccaatactgcgagtgcttgcttctcatctgaaactgctatttaatttctctatactcaaagtaaaccgtatgcctcttgccttgtgtattcttgaaactgatatggcaaatgcataattgttggaatcaggagtacaattatctgaccatcatactatgtttactttgacatatatatagcttcttttaacccgtcatttagttgttacagttgactagaaaaaggcacaagacaaactaagatacattcacaagtgtctccaaatattatctaaaaaggtgtctccaaatgggaatgatagattgtactaaagaaaaaatattggacaacgttactgctgattactccctagcattttggaggatgcatgataatacagtaagactaagttagtaaatataaagtataatccgctcacaataacattagttccatttaagctaatgaaaatctattaacatgctaactgagattaacttaaagttgggactggggtgagacagtagacagattgtaagttgggtcagatgtcagaagattacaacagttgacaggctgttggagcatgtggttagcttattttcaatgtcaacaaaaagatcttctgtatcactacatctgttcactataacttcaaatgtctgtaggccagattttttccctattacagaggacagccagtggtcagtttctgtacaacatgcatgtttgcatatgccccttattcaccaatattctggttggtattataggatgcacaatcgtattctgctgtggtggtatttcttttgcacaaagggcctgttggtaagaataaaccgaaggtcctatcttagactaacatcattacagatatgggtttccaccatgtatttaccccagatatcatgtctatcatatatttctgcaaggtttagtagctcggctagagatatgatttcacagactttcatattgctgatattagcagtgtgcaactgctattaggttcagtatgtaagagaaatgaaagttgtttttcatttcttttagcctgtttggtcactctctatctggacaagaaaatatgctcacatgatcatcacaaatgttgttcttacaggacaacgtccgaaaccaactgatccaatttgaactgctgctgaccacggctacattcgtggtggccatcttcggagttgtctcgggagtttttggcatgaactttgaggtggacttgtttaatgtaccacatgcgttcgaatggacgcttgtcattacaggcgtatgcggcttagtcatattctgctgcttcatctggtacttcaagaagagaaggtttttccccttgtaaaatggatttccctgttcctcccccccccccccccccccctcttttcagttttctactgcagcgtgcagacgctgcactggaaatttatcgtctttcagctttgccagcacgcaattgtacatacattttccctccttgtttcaatgaaagatacctgtagatcatatcgtgatggagttgcatcggctgcaaatgggagagcttatacttttcaagcatacgtcgctgccgataaggtagcctcgtacatctggcacacgcatcttttgttgttgtgacactgttgctctgtaagacaaacgtactggatcagtgttgttctctcggggaagtacttgcatgtgttttagccgtatgcgttggtgtattcctcagtggtagtgtggtactggtgccctacttgctctgaccttgtcttcacgtcagcaatggcggatgccgatgccgtgcagggtagacatgcagtaacactgtactcctgtttggtagcacatgcgcatccatgacaagaaaacaactggatgagcaggctcctatagtccggctacatgataatacaaggagtccactggagtactggaccaatgtgtgccaaatttttttgctgatgcttctctcatctgggaccagcatgtggtggctgtagtcattactggatgtctgattgctaccaagatccaaaagtcatggtgtggtaacagaagcctgtcctttattgcgcccctcagaaatttctatgtttatgtaatgtggtgttgctattgttttactatgcaccaattaaccggttttccggacaaatcttgctccctgtctggaacacagaaattttacaggactttcacaaggtatttgtaaagtccccggaagaactaataaaaactctccatctctaattttgtattgcgttgaaatactagcccatctctaatgcaaagtgcttaaggaagtcctcataaaaaataaccattttatcttgccatgtaggatgagatattttagggtctattcggtttggaaagaatttcacgagaactttgaaggattttttgtaaaaataatgtaaaattcatacgctcccgaaggagtcgtttaatcctgaaagtatcaatgattaactaagcaccaatacgtagcaggtgctgtaaaacttctcttggctactttgatttaaggaactagatgaagatatggatacttctattcgagtggagagttcttatatagatggttaattacgcagcctatatattaacacacttgtgttttttagtttctagcagctacatcattttctataatccttggccctaaaaacaagtccaaatttttactaagattatgaaaatatatagctgtatttaaaaagaacaaaaccagaagctgaaaatttacacccaacttttctatactctcatcagctacttctcagaattttaaactcaataagacctatattaacactcaccatacattgagaaggcttaggccctatttggcacaacttcaaatataagatttttcggtgttgggtgttgagtgttcctaatttcataaatccatgaatctggatatgcaattactttgataacatttgaataatttattttgttcctgtttgaaattaaatataaatatttaaaccactataatttaatacgtaaagaaacagcaactaggttggatataatatctggtgacaaacaatacctgcatatccgcatattattgcgccagaacagcaaccaccgttctctcacctcaaactctccaaagttgaaacaaacaggcgcacaccgctaggccaaaactactctctgcctctctgaaccaaatctaccgctaaagaaagggaaaaaagaaaaaaaaaacagcgagctcccaccacccaccaataccagcggcagtaaattttgagctgcggctgctgttgctgcttggactccacctcggcacctcgcgttccccttcccccctcacctcgcctagggtttcgtctcggctcgcgcgccgcggcgccattgctacagctctgctacatctctgggtcgtgcgtcgctgatgatgcccccgaggttttgtgattaagctcttggtctcgtctccgcgagctcagctcagagtgggaggcttttttttgggggggcgttgcttggggtattatgggtggaggcgggcggctgaactgttcctgggcaatgccggggaggcccggtgccgattgctagggttttgctcgtggattcgcgtggggaggcggggatcgcttggaatgcgtgggtttcgtgcaatctactgcttgctttgaccccccaatttggtctcgattcatcaggaggggggggggggggttctagcnacgcttgtgggaagcggagctgtggccgcaatgtccggggctaacgcgagggggcggctctcgccggcttccggcggcggtggagactctgagccgcggtctgcggggagcaggacgcggtcggtttccgctacaaggggacggaagccgtcgccgaggcctgggagggatgcggcggcggcggcggcggaggagaagaagcccgccgcggtgcccacattgctgccctcgctcagtgtgccggcagggatgcgcaggcaggagctgctgctgcgctcggggctgtcgctcgacgcgtcgtgctcgtcggacgcatccacggactcgttctgcagccgggcgtccacggggcggattgggaggccgacgtttggggctaggaagaagaagactctctgtcagactgatcacaagattgtttccatgctggaaagggaggttggattggcttctgctaatgatgtgcctggtctgaagaggaggtgttcatgggtgacagctaatactggtgcgtgttcccgattcgcttgcatttttcagccagtgtcgacataaatttatcctgcattgtctctagtacagttatttttgttcgatggttttgttgcagagaggatataatcatatgattcatcaggactaaaatttagaacaaaaggcccaccatttgtgagttagaaatgctagatcctaaagaccatgcactgggtaaaaaatggccagagcatattctgtcttctgggcagaccccgatcttcaagattctaaatgttacagaaatgttttctgtatgtggttacattactatgttttatgatggtgcgggtgtagacatgtagctagccactacaatcacaaggagttatactaagtaaaatctgtcattcttgtgaaagaagtaacatcacttttcgcgaacacaaagaagtaacatcacactgtagtcatcttgtttcatgttgcaatcctgtatacagacctttaaggttgaataaatcttctctagggtggggtggggatgggagccgagaacattttgtggtgaccaactctaagaagcttgctgttgaaatgaccatatctttgggtattacccatatctttgcatttcacagtgcctgcacgcaggccgatccatgtctctcataaacacaagaatgcattaattcataaacttgtgagttttataagaaacatgtgttagtaacaaaacgggatgaaattatgcccatgatggtggaatcatttttcatctgtcttgccaatttataagactgacattgaacttgagcgagacaaggtcaggtcctcctcttttcatcttttcttgtttactgaatatattttttggtactaaggacttgggtaataacaaattttctaaaggacctatgccaagtaatctctattttgtttatcaaactgatcttatgtagcatatattttcatatcttaacacatgagcactcattgcttacaagtgcagaaccctgttatgctgcatttcatgacgaagaatggggagttccagttcatgatgacaagtatgtgaatatcatcaaccttgatatgatactcttccatttggtaaaagaatcaagtgtaaattactctattactttcagggtgttgtttgagttgctggtgctctcaggtgcattggctgaacttacatggccaacaattctgaacaagagacctatattcaggtaacattttgcatttctgatgtacttgaacctgtagtactaggtgttggcaaatcccaaataacatattcaagtatgtctcacagggaggttttcatggattttgaccctgtattggtctctaaactaagtgaaaagaagattattgcacctggaagtcctagcagtaccttgttatctgaacaaaaactgcgtggtgtcattgaaaatgcacgccaaatactcaaggttggccctttacactcttgaaccttttaattgcataaagaggtctctagttcatttcttggaataagaatgatacaaatcacgctttaagttctttggtaaccccctcctgatataacattatctcctgtaaagtcttcataaaatttggtaaccccatcccgaagcaaagttttttggctttaccttggcgtttcagtgtccgattcagttttcatcatgcttttcttaaagcaaaaaaacgtaggatggttacccaaagacattcctgagctacacagtggcttatctaatccattgtgcttatcattgcagattgtagaggagtttggaacgtttgataagtattgttggagctttgtgaacaacaaacctattttgagcagattcaggtatccccgccaggttcctgtcaaaacatctaaagcggatgcgataagcaaagatttggttcgcagggggttccgtagcgtaggcccaacagttgtctacacgtttatgcaagtttcaggcatgaccaatgaccacttgatctcctgctaccggtttgctgaatgcgctgctgcagcaactggttctaacacaactgttgggagcgaaacgaattcagacagtagcaatcgtgccacggaacagcagatgaatggaaccaatggactagctgctgatattgcacgtacaatagatgaacttagcatttcatagcgaatagggggaaatgctcaaatgatgtataagcatgtgtgtattttgtttatcgtagcgtttaggtgtggtctgatcgttgttacttgtcacgttgtagcgtaggacattttagactttagcatttcaagacaaatgaaacggcggcatgtaatgatgtatattctttctttgtgatgcttgtttccaaacctgcagtactgagttggcatgtgaagttcaccctcgcttttgtcagatctttgaattgttagcatgtattgtgaagttcacccttgcttttatcagatctctgaattgctagcatgtatagtgtttagcgcgatagcatcccgtgttgtgaagccttcttctgtgggaattaaaatgtaacgatgcttgaattgatttgtggaagaaatatggcagttttccattaatcatgtaatcatgcacggattttattaaactctgggggtattgcaatttcttcgtcgcagaacaaaattctcccttctgatgagcagtgctacctagcaaaatacagaagcctttgtacaacttagatgagatgacaaaacgaactgatgatgaaaatttcagttcctctatttttctttctttcaaaattgagcagacttatgtgttccatgacaaacttaatcggggcacaggaatgactcacggatcaatcgactatcatcaggaagaatggcggctgcagaccgctatcctgtagcaagtcctgttgtctgaatcgaactgccccccaaaaattggctgaagaaaattgtcaggcgggttcagattaactgtaatcgcgacccaggtggggccacgagatcaaggagcaacccagcggaggaggatatactcacatccatggtcatggagagctcgccggagccaagagaatagctccacgctccacgctccacgcagaacagaatcgcccagcccagcccagcggtccacggaccgtgcagaatgctacaggctccaaaccaatccaaccgcgcgatggcgccggcgcggtcgccggaaaaagaaaaaggtcaaagagagcatcaaagaatccgcgcgcgcgcgacgagcctaccctatctgaacactaatcgcgagctcaactcaccgcgaaacagaggggacgacgaggaagaacaatagcatctatcgctcccttccacctccccgttgccatcgttgcgtttcaagctagttccgatcgctgccagcccgtgtgctgctccgtccatttacggtacagtacacttaattttgctccataaacttgatcagaacaagtgaaatttttccaggcgaagaatagtagtcaagttatggttgcagcgcgcgacttgattaattagcctgggaaatctagaataccagacgagagcaagctatggtttcagacagacgtcagtgtatacgttgcatgcgaaagcaagatttcattcgaaccatatacgcattcacaaatcaacctttctgatttgataaaccatcagttgcaagttgcaacaactagcatcttgatttagcttggattcaagagattttttgggcaaattaattgagcctgatcaaaagatagcatgttgattgagtactatcttattaaaaggcatcaccgagaaaacgatagaccacgtcgaagcagccattgctttctccaagaatctcaaataaagcgacaattcagacattgatcagcagctagctagctagagggtgtgatacagattcatcgatgcaccatggcaagtacatatgttgcatgcatgcatggtaaatatgcatcgtaaggaagatatgtatcccggtgctttaaaatacaaaagaaaagggctcgtagcatcaagtattatttaggcggagagaattgattcaattgtttggaaacacatcatattctcatctacacaatcaattaaaacgacagaacatagctaataattactcttaatttcagtcatgtgcaacaaatatgatgggtgcttaaaaatatacaaaggactagcttgtagtatgcatcaatcctttataatctgcgatcgaattgagttgctagaacatatattgtccacgacaatttgtttttctccaagatcatatatattctgcaaaatcaactaaaatggaagaacatagccatcagaacgaagatttgacatagttccagttcacaagtgtagcctagtggttacaagagcctcagtagcatctaaggtcctgggttcgactcctcatggaagcgaatttttcaggatttaatggcattgtgctttcagtggtaggaatttgccggcccagtcttcgaagatgctcataggggtagggtttgcgtgcgtgtgttcataggggtgggtgcgcgtgcgttgtactgtgtaattctcaaacaaaaaagtatagcttttgaatagatattgttgaatagatttgacatatatagttcctgttcacaagtatatggttgaacaggaactatcatcagaacgaagatttgacatactcaaacgaagattttactccatactcaatcatatctattcaaaactatgtttgagtatgaagtaaaacaaagacgatcagctaaggccacatgttgataacaatatctccctttctttcatcttaactaattgatttatgatcaggttacaaatagaacacaaaagatgcaaccatttcgtgtacatatatacgctctaaagtatagtgcaaaatcgattcccggccctacttaaacctttgacatatatagttttttttttaaggacggactagttaaaatctctgtacctacaaaacaatactcacagcaagtggatgaaatttatcaggtgtacatatttgcagttttaattaactcggcattatctccaagatatatatatatatagataaattcttgtcttatgatttttgccaagaactagctagctggaaactgatgataatttcaaagagcttaggcctcgtttggctaatgggatagggaaatgatttcccacccattaaaagacatctttaaatcctaaccattcattcttcctcttccacttaatcctaacccttcattcatttcccaatcccaatcccacctctcatttcccattatccaaacacattcttatagttaattgaatataagtacctttcaaatgtgcgggaaaactgattatatattagccacccatatataaacttagtacctttcaaatgtgctgttggccttaagaaaaatcaatggacagtttatgcacataaaccacatttggttaatatcataaaataacacaaaatgaaaaaagaacttttattgtagagttttcttcccacatggatttactccaaattaattgaaaaaaaagggtaagaaatgccttggttagttttcacgaacacaatggtaaattagtatataagataatgttacatcaattatattcatgatgtcctcaattaaagtgaatgataaaacttggtaaaattactttatgatgcattatacttaattatttaaccttatgcttcatttaaataatccttgcgtgacacatttaaaacggataaattcttagttctcattaaatattttatttacaaatgggaaacgggaagaagtatgagatgaataaattaattcatggtatatgcttttctaaacatgatcgtatatgtttagctaatcctcccatttttttaatcaaacgcatggattaaggatgccggtcataaaccaagaatttactagaactaattagtaagtggccaaaattaaagtaaaattcgtgcatgatgttaattaatgccatggaatcgaggggggatcgataatccaagagatagtcatatatatataattgttggattaaaaaaaaagataatgtggcatgcataagatagagacatgcatggagtactccaataaaattagatgcagcaaagtgatcattaacatgtttgtgaaaagactttaattaggttatgcatgaatgatcaatttcatgtgcatgctcgagttcttgacttataaaaaccagcagcaggtatgcatgtaagatccatgatccagtgttagtaactgattctttgatatatacttataaacaagatatttatgggcagtggaaaaatgaacaagagaggagagatatcgtactttgcatcgataaggtgtgacttaactacgacccatagactttcaagtggaccagtaacaactgaaattgccacggaacctagctagaacaatatgctatctgagatattcctattagacatgcatgaattgaagtgagcagttaaaaatatcaattgctaactatcggcacataaattctatacttatcgcatgcaatattgcatactaacttaggtactttcacaatatatatacatttaaatttgtgaaaaaaaacaatgcattcacttagacctcacccatttcagcagagaaaccagctactagcatatttgacacttgctagtttttggtgtattatctcaccgtgcatgactagttgcactgtaaacttaatgcatgccttctctagctatgtcattagtagaccgactcttagccaaacttcattgttatctgcatccagctagcgcgtgcacatcaaatcactttatcaggacaacaaaaatccaggcaatatttcaccttaattaaggaaaaatttaagtcgaaccacttggcctctatactcacaatattccaatatctcaaaaataaattcagattttcaagactcgtatcagcaagtacatttgctatagcttagctttgtccatggactacatatatcgagcaattaatcctgtggccttaatttttttttcaaagacttgaatcttgtggcctggagagtttcttccgatcttgtcacaggagcccagcaaattaaactcaagtcaaactagtgggggatatatatggactctgaaccgagagagggtggtaagtacgagcaccatgaatggaacagtggcccaacagtatcctacatttttggagccattgggggacaatgcatcgttgcaccattactccctactttgaatgccagagcgagatgtgaggtgttaattctcaagaacatggaggaccagcagacagcagaagataactgactgatgataaggggaagccgcccaagcagatctgggtctccgtactgttcctgcctgtcctccttcctcctcctcctctcctccgatcctcatcatctagctagctgatctctccacacttgtgtgcttaatttgactgtaacactggatggggcgctacagaagaagatcgaagctaggaacaagttgaaacaagttaaaagatctcgatctggttaaaatttcaaacatgccctgggagattcctgcgatgatttgcttctcccaagagccaagatccatcaatggcgcagtaaatattgcatttccttcccaagaaggggaatggaaaagatggctagtactagcaggtactagtacaactagtagctaggctcctcgcaaaagatgaagagaagggcgtcgtacgaattgacgcaggagatatggaaaacagcaacagcaagcgctggtactcctacggtacaggcatcaacaccgactccaattccccatccgaacagtgccatgctagtactactcctctagttggattacccaaaagaacacgaacgaaatgtttttcgccgagattttagaaggagtcgagtacaaatagcttggcaaactagaaaaaccgaggatacacaccgcctcacggcgctggaacacgaacgaaaaatcgcagaaatgcatcaattcgattgtgagagatctagaacctggcaactgcgcctatgcacgattgcgccggagaagaggggatcgaattaatctaaagagcctagagactcggaacagctcatggcgcgcggagcagtacaggggattccgtcggcgaccggccggccggcgaggggccgagaggccagcttagctagccgcgggagggggagaaaacggccggcaccggatgacagaaagagcagtgagcacgcggccgcgacggcacgcccgccggtgccgtcacgcccggccgtgtgctcactctcttctgtcacctcgcgccaccggcccgcccgcccgccggccggagacaccgccatcctccacacccactcacgctcgcctagctagctagctcacacccccacgatgaaacccgcggacacacacatacctcgccgcgcgcgcgagcgcgtgaagagaccgcaacgtacaccaaccacacggcgacggatcgcggtcgagaagctgaggcgtgcacaccggaccggcccaccggccagtggatttatataggcagggggaggcgagagcgcgaggagggggaggtgcaccggaggtggtggtggtgggccagctgcgaaggtagcatgcgctagcctggacctggactagctagctagctactagcaagtagcagcagcaagctcgaccgggaagggcgcggggctagggtttccatcccggtggtcaggtgggttagtgggtgtctggcgtggtggctgcgcgccatgcatgaccaagccgcgccgcgcgctagctgacctgcggcgaattgaggtgggcgcgcgagcaagctaggctggcgtgggaattagtcgtgacagtgtggctgtgctgctggggcggacgaccgatcggcccagctaagctaaggttaacatcagagccgcgccggtattgctcccaaattggggaattagggtggtggggttgctctccaggagagaagggtattaatatggggagggccagtacgggcttgacacggagcacatgcatgcccccacatcgcgcggctaagctaacccttgcggttgagggctgtacaacaatatagtgtcaaagttaatttgcacttttcttttcgaggagagtacacatcagtttttctttttgaaaaaaaaattcctagggtgttcacagtctaaaagatgaagttaatgtttcatggtaaaatgatgtgttaactttcatattttacactattatttcgggttgaattgattcacgagatggcgtgttacacttttaactttaacctaaatgatgaagacatgtcctatcgacagctatcccatcagctaaagcatctcaatcatggttgaacacatcctcgtttagttttatgaagacaattttatcttagttacttctacatggtatgactttaaaatgatccgcacttaaaggttatattcaatcgtaagtagtgacacgcttttatggcatgctaggtactttaactttatttgttcaagcacctgaaagaatcatcctccatgacccatagggcaagagaactcctacaatattcctaataaccatcccaatgcacgggttgctcaatcacagacacaattaatggagatactaacaaatatattgccataagaggatagaactcataggtgttctctaaattattatcatttcgtacagaccccaacatgacatagcagtaaatgcatatattgcaaaaagatagcaagatttcagttcttatatcattggatatttgatcaagtgttcgctcagaaacaaccactgttgtcttacgtaaggttagtttatcatatgggcgcgacgcccgtgggctggcatggaaggtaatgattattctactttagtttaatcatggttttagttttagcccctcaaaacttaaatttaatttatttggtttcactttgtttcaaaagttccaatagtatttggtttttcactataatgtgttgcaaatatatagtaacgggcacccatccctgtacagagaaatggatgagagatgcacgcgggcatgggcgcctagctagctagccagccacagcggatctaccgagctctgcgctaacgaccaccagggaagtgaagtccagcattctggaatgccctccatcgctgcatgtctctgcatatgctgatgcaatttgacggtaccaacacgatgtgtgccaaggctgtagttgcaacggtaggagactaggagtgtactccggtcctcactagttataagccctatacatagctagctgtagctggtgagtggcatgcatgcctcccctgtggatttatgtatctgattccgaattttgccccaacccaaccccaaggcatgaaccatgcccctctgcagctcttcttcgtatgactatagtactacatgtagcgtccattggccgttgctagcaggagctaatgtggcatgctctcaatgaataactgaaagtcaggaagcataggaatagtgacattgttgatggcgcaggtatggtactcctccaacatgtatataaaacaaacctagcacaagatatggcatatcctaatactacaaatccgaatagaaagttgtccatattcatagtacaaggatgtgtcacatctcctattagtgttttttttaatggaacaaagggttatacccaagtactctggcttcgacgtcccgtacacaagtaggtttggctcatgtcaagtcgtacgtgtcaaccagagccggctctctataggccctaatagagaccttgtaataggccctcaagaccaaatatatttttacttgtaatatatacgtgttataaatcatatagtgtcgaaaatgatgtaaataaacattataaacacctaacttacgatgtaaattaatcaacgagaacaaaacaaaatcctagcccaattttcagactaaatataattaagcaaatgagaagatcacaaaactcactctaaacactaaccacgatgaaataaggtgtgaccacatgggagtcagacgtgaggataggcaacaacatcctactagctgggttggttcgtgatgggccccatataggcttgggccctaggcggtcgcatgaccggcctagagctctaagatggcccacccagcggtatgttaattcttttggcatctttacctcatcaaaattcatacgcggataatatgttacgtatactaccccttctcttatgttctacgagtactgtaagtagtacttaaagaaagttgagccacaagaattgagacggtaagtgaggatggaatatagaagccataaaaagttaattattccattcgttgcaaaatacaacaatataaagtgtatatcaaatatgataaattttcacccatattcttttatctatcattcacccacttccactattcaaattctccacctaccttttcttttcaaccaatcacaatcttctctcgttcaatttcacctacctgattacttcaatcctaaaactctttatgatttaggatgggtggggtactactggcttgattgttatagcttcagctccacttctcctataactagaacccaactaaacaatttaagtttttttttcaaaattttcctagctttgttactcactaccagcttctcgaaatatcaaattcctcgaagaggaccttttgcgtcaggatcctgaatatgggcatacacttgtggtggtgtgcgtgcatgcatggcctgctggtaatcttgaaagcatgcaaaagttaactctctttttcgtctccaaaagtaagagccctgtagatttagagctagctggatcaatgatcaatgagagcaggtataatagcatactataaacatattttgagaagataaaaaatgagagagaatagtagcgggctactgatttatagctagctacagcatggacttcaaaatacatatgtgtatgacaagtgggaccaggtattaaattgtgtactatatgttataggtaactattatatgaattaactattgactatagatgatttagagtgagtagttagctatactattaaaattgctgaaagggacgcggttaaaaaggacgcatcctggccagctgccacttgacttgctacttgccagagccagcgctgcgctcacgcattaacaaatttggcacgctagctacctcggtgtggtccttgatcagttttattctccatttaccctttgatcaaagcaggctcaaaaacaatatatgtgccggtacaactaagcaattaaactgaacaaagcgttttcgtggtccctttaattcgaacgaatacattgtacacagcacagtacagtgcatgcatgcgcatatgtgcatgtaaatatatatgtgcatgcgcaacatgtacggcgtcaagcgtgcgtggtgctagcttagcctagtattgtaggagtactagctaactaaagattagttagtgttgagaacactaatcaaagcttaatttttgtataggaccagtgttattctcgatcgccggatgatgctctagtccagggtgtggtgtgcatgctaacgcattacgcatgcctaatgatggtccagggtcgtagtgtgttgtgcctttttcaaaccgatggagcagcacttagtccatggcctttccgtgagctttaatttgtcgattgttaacaaccgaggtgggcaacattggttaattttagccagaacggtaacaaaagaaacgtgagacagacacacagcccaagatcgatcgagagctagagaccatcaaattgaaaattaatgtgcaacaaaaaatcaagcaattaatcccgtttaatttagtttccttcgttccaaagaggctgggcatctaattgcccggtagggagctggagatgaaaccgacccaagaaacgtaacagtacgtgcaaggtgcaacacgtccacacacgcctgggagcgagcaggatcgatcgacaggcgtatcccggtcgatcgatcggcatcttgtcttctctcttttcaccgattcctttgatcagcttgtgggggccgtacgtacgtgtccgtggctagctttaattccgtgcgtgattggtgcagtctggtacgacctggcgtcctgcaggccacatgacacagagtgcgcgtgggcgcgcatgcacacacgcacccccctgctgcaccgctgcacgtacgtacgtacgtactccctccccgctcaccgcggcgcggccgccgcggtaaccagccaggagcccaggaggccacgacgacgcgcgcgtactcctccatccatcggtgcggtgccgagagcgagaaccccggtgtcctcctaaccccggacgcgcgcgcccgctcgcgctcgcggtcgcgcacggcgtcctgcagcctgcagcgcgctcgcgctggccggtgtaagccagctagcgcgtggcctgcaggctgcagccctgcaccgttgcacggcaggagcgggcgatcgagcggccgcgccggctggagtgtatgatgcgtggatcgatcacagtctcacggatcatgtgcgcgtttccacgattccactgtgtattgtgtgggaattaatgcccacatgaccgaacgtggtttgctccagaggaggagggtgctcgatccagaggtgacctctgcggcgcagcgaggcatgcatgcaggccggacagatgaagggatgtggagtagacgacgacgtacggacgtatttactgcatggtgtacgaaagactcccggattggaaaccacgagcctgcctatattaggaagttttcaggtcaggccgggcagaaatgattatactggatttttcattaaagcaccggatcgacatgcatgcatgcatgtagcggccatggcatcattacaaaacacgaatgattactgtttgtgctgcagtcaggatttactgtaccgttctgaaagtgaaaatggtttgcaaaaaccaaatgactatgaaaactagcaaaaagaaaaagaaatggattttacaaattacaaaccgaccaccaacggtttcacaaactgaatgtttttcacgaaaaccgatcatatttattaatcctagctgcagttaggtgctgcccatacatgacatagatacatatctctctggcgcacatgtgaaaccatatgttcagtggctgataccacaccaataatattacagacaatttctactgctgtggcatcacagtccacacacatccaattaagcaacaagcacatatagctctaatcaatttgaactgagtccaatccaactccattcatgaaaaaataactatataaggtatattattactgtccaagagagctttggccataaatttctgttacactatttcacttacagtaattttttttttgcaaaattaaatattattggattaatcgttgttcaaagcatagaactggacagtgaaaaaacgtcttgtatttcttctgaacgttatgttgaaactattttttccttgtgtcaccaagaggtccaagatgaagctagcatttacaacaaactattttaatgatagataatgcacccatcgataataagctgcatgcgctgacttcgttaatcttaaattatatgctctttttaaaaaggtgcgaatgctatttatcaacaagcaaccctgtccgagcagttcataaagttctagtctagtatcttgaaggcatgccactataatagagtatgcacgcacatatataagcatctgtaattgtactttgtttcggacaagaaaatcgcgcgtggaagaacacaaaagcaatagtgcatcttactagtacattatactatatatcaaatgggccatggccggagcctggttcatggcacttggctaagtgaactatctgggcttcaccaaacatctaactgggcctaaccataaccagaagtccagaacgcaagataagcaggatgacgaagcagagagagaacgtacgccatgatcgccaattcgccattggtgaaagaaaacaaaaaccttccgggcgttggggactgtggccccggcgagaggagaggggactgaggacaggcagaaacggagcagcaggctggggtaggggaggctttatgatctgttgtccactggatgatagaatcgcatgtgcggtgcagacacatgaatgccggcctgctcgacgaagacgcagcaggaagagtacttgggctgtgtttacttcacaccaaaattgaaagtttggttgaaattgaaacggtgtgacggaaaaattaaaagtttgtatgtgtaggaaagttttgatataatggaaaagttggaagtttgaagaaaaactttagaactaaacacggtattgtacacacactcgtcgctccaaattctaccctgcctgcatgcagttcttcaatgcacaaaatgtttggtgtgtactacgagagagtgatgaggtgtacttgcctccgaattccggaattttgtaactcgaaaggattcattttggtactggcataaattcaggttgagtttcacctcaagcaaagtaattcgtgcggtagttcgattctgaatttctgatactactggtactgtagagactgactctgcttgaaaattacgtaggaaacctgactttctgacaacgcaagaacctctcttaagcaatgaaacaaccaatcagcaaagacagctaacatattctgaataccctgatttcaaacgtgccagacatcataatgaggtgatcatttttttagataggcatcataatcagatagtttgatgtgccatcactcataataccatgctaatgcagcacatctttttcgtgtatgctttacgtcaagtatgaaaaattccacgagtaggccagtctgataataagcttctgctgcgcatctccgacctgtcctgtgtgccttccgttccaagttgagctatagataagaagtttggactgtggatgtgcacataagcacccaccaactccacaaaagcaaaagctcacccacttacccctgcattggctctcagcatgagttgcatcagttgctagtagctctgatgggttataaagttgcctcccatttggatgagagattgagagcactcagcaccagtggcaatgtggtttccactgccagtgatcgatgcatctagacttctcatgaagaacagagcagtatcagtagagcaccaatcagttattagtagtagtactcagaaagcaattcatctgaatttggtttggttcaagaaggaataacataacaatctctttaagaagataaggaaaagagtaggtttttgaaaaactacggagacttttattttttgacgcaaaactacggagactttgaccaaaagtatcacaaaactaagtagaaacccaagcaatattctgaaagatagataaaacaagacactgaaatgcagtcctttcccatacttacgtatgaaaacagaggcatcttgagaagagctcagctggatatggacaaatggtgatatggaacctcctcattaacccaagcaatattctgaaagatggataaaacaagacactgaaatgcagtcttttcccatacttcagtatgaaatcagaagcatcttgagaagagctcagctggatatggacaaatggtgatatggaacctcctcattgagtgcagtacgaaagatctgtcggtgcttaatcattcacatacttacttgagaatcaacgtacaatgattttgacagaacaacacctgacgcagacaccagcaacgcgtgatgcgtctctatgtaccctgtaaaatactagtatgaaacagtagaaaggcaggaaaattcagtacaagatggcaaaaggcaatgcccctggaatgcagtcgaatatgcatctttttgtctgtgttagaaaagaaattcaggtacagtcaagttattaagttggaaggttacagttcttgagtaatcttttggtctctgcactaaatcactataatttctttttttgtttccttctgttgagtgagaatttgcaagtttgaagaagaatgacaaagaaagaaacaaagaaggtgacacatgacaaacttcagtagactgcagactgtagtccactggtgggcggtcagatgatcggcggcggcggcgtctcccagacgtcgaacacattctcctcgttgtgcagggcgaagaggcgatcgcctccgatggagaagtcgcagatggcgccgccgtggctcctccgcagcgtggacgtcaggacgcactctgggccactgaagacggagatgctgtcgttcatcgacgagaagagctgcccgccgtgcgtggcgagcttcgggtagcagctctcctcgctgggcaccttccggttcatgaacttgctccgggagctccaccgcacgccgccggcgttgctcctcaggtcgaggaacccgaggtcgtcgtactggttgatcacgcagacggaccgctcgtcctccatggcgatggcgtggagcacgcgcttgtcgtcgagcgacgcggccatgccggcgtcggaccacgaccaggccacgttcttgtcccggaaatcgagcaggccgatgaaacagttgtcggtcttggggaacagggtcgccaccatgagcgcgttggtggcgtccagccattggagcttgtcggcgtcgcccaaggcgcagccaggcggctcgtagaagaagtcggcctgctcgccggtggcgcggtcccagacgccgatgccgtactcgttgagcctgcccttgcagctggcgaagatgctcgagtcctggtcgaacgccagcgcgccggcggtgaaggacttggcctggcggtcgtgcgcgacgcggaagcggtgccgcaggtccccggagacggcggagaacgcggccatcccgccgtcgcacttccccaggcgctcgcgcgcggcgatcaggagcgtggcctcgtcgaggtacgccacgtcgttgacctgcgagtggtcgagcgacaccgggcggcgctcgtcgagcatccagttgtagacgtgcacggcgcccccgtgcgcgacgcagcaccccccgtcgggcgcggcgcggatggccgtgccgtccccgggcgcccgccctggcaccgacgccgcgaggcggaggcggtcgccgtcgaacgcgccccaccgcgcggcgcggacgtggtcgaggagcccgtagtagagcgcttccctgtagagcagcttctccggcagctgcggcggcacgtgcaggctccccgtgcggagcaggtcgagcagcaccgcgaagcacgccgggttccggtcgatgaaatattccgccacgcctcctcctcctcctccaccaccaccgccgccgccgccgccggcggtgggggcaaggttccaggacgagtccagcagcgccccgagcatggactccctcccggcgttggcgagcgtggtggtggtcgtctcgaacacctgcccgcccacgttgaaccgcacccgcccgcctcccatcctctctcctccttcccccagcaagcaacccgatcaccaattcaccatcagtccatcatcatctccaggattccgcgcccaaatcgagtgggggaatcgtgcgtgcctcgagagaaattgggttgggttgggggagaagacgagagacggatttgtttgctatgtacgcagcgcgcgccagcgacgggacggagcggacggggagacagtcgggcgaggcgacccaaccggtggtgtttgctttgacgtgacgacggaatttagactgaagaaatggccactctaaaatgaacttttgtcccaatcaatcgatcacagacgggaaaaaaatacttcctagtacaacctaataatgtaaagattttttaaagagacatgagtattacgaaaatatttgaaaatagttggataaatgttttgattgagaaaatacatgaaaagaatgattatgattgtggattagactcgctcacgttagatgcaacggccagcgactagcgtgcgaggcagacacatcgtgtcgtccggagcacatagccagctgccagcatagttaggctgtgtttagttcaacgtaaattttatattttggttgaaattagagatgatgtgactaaaaaattgtgtatatgacagagtgatgtgatggaaaagtactgaagtttggatcaaaatttagatctaaacacagccttacagggaaggtcagcttcgctctctccaatcatcgcgttcgctacggcgggcgggccgaatctttctgccgcctcgcctcgttgcgctcgctcgcgcgggttttaatcgttgcgttgacctccttttgctgctcttcctgctcctgtcgggatcgtggctggattgctggaaatggcgcggcgagttgggcgaccggcaccgcggctagcttggtcgcttccggttgttggggcctttttccagggcagattctacagcagtggagactggagagaggaaaatggagacccccgtcgatgaaacgatgtggacgctcatcgtgcccgtgaggggatcagaagtgcaggacacacacacacacgttgacatctctcatctttgcatgttacagtatggggcagtagtacaggcgtgtatgaatgcgcagagacatggtcaatcctgattcctgagtccggctaatttgaatggttggtggtttggtgccacggtcagctcaccataatattcgcacagagaagaatttatggacagtggactataaagatgcaagttgtaatccatagcatttacatttataatttatagtattagaatgtgctatatgtcatattaagtctgtttttctatagtacgaaaaaggtatggagtatccgtattacatcatacaccgatttgttttttatgaaacaaaaagaaatacaactaaagagcatccctggaaggccaaaaagtacggagaaattaagcgatcaaatcaacttgtagtgttgtgtattataacatgggagcatctcaatagaaactaaaattttcagcaagtagtaactaggaactgcaaaacatgtaaagagagatttagcgttacaaaacagcgtattagagaccaggtgcgacttgcgagtaataaggctctgtttggatcacagccaaacattgccacgccacagcgtggcttgccacagacctgtggcggaccttctccccgcctcaaaaatcactgctgtggtgctatggcattcaatggctaccaaccaaacagagcctaactcaatataataaatgcaccgagactaaaatattcctttccaaatatataacctaagattggatttgtccaaatccctattagtggaaatatataagattagatttgtctagattggttatagtgaaaaatgtctaatccgtcctagattgagttgataaaactttccttttgaacaagactattatcaaaatttaaaaattttaactataaataatgtctaaaatatttagtattttaaaagtatggtggtcatatgtatagattgatcttaaaaattgcttcaacaaaatcatatatttatttatattttatattatattataataaaaattttcgtcaatattgttttttaaagactatatccttataaaaagattttatcagtccggagaggtattttttaaaacagagggagtacaacttatggttggtaccaaaacagaagaaaaattaagaggatatataaacggataagaggatatctaaacagagaaaaaaatgagagaaatagggtgacattggtgcagaccgcaaaaacatgaaatcgatcgagaggaatgatttgtgcaacaatgcagaaaggcaaaggatgatgatatgaactacgacatttctctccattcatgcttgctgcaaaattgacgtctcaaatagctccagcagaaaatacaatctaataagggttgaacgacagcaagcaagaaaccatatttgctagaggctcacagctgaccacaaggaacaaaagtaacacctacattacaactaccactgcaactgctacaactaccagctgtttcgtgacggtcgattagggcaagacttggcaggcaaccagccaagggatggaagccatataaattgctaggctgctcatgccaaaaaccttcagactgcatgcctcataagtaccccttggaagaactgcacaaggccagagcaaattagttatgagccttccttctgcgcttctttccagtagaaattttagcagacacatgctcttcctcttcagatgactcgccttctttctccttttgctttcttttggtcgaaagaccatttgtcttggatccatcagcagctttgggagtgcttgcaccttttggatttgatccgctggatttagcttcatcttttgaatccttgtgtttgctgccaccatcattttttgatttgcttgcgcttttagtgttaccagtctcatccttgttgcttccctttagcaggccatcctttgtcttgccagtggatcgagatgatcttccaccttcattcttgagggcactgccacttttaggtgtcttggatatatcttcatcatcgttttctgcacttttccccttcaaaggactgtcatcattttgtgaactattgctggagcgcacacctttagggcgtcctcttttcttgggaggatcagcgacatcagtgccacgatgtttcccactgcatacaaaacaagacaacagtttcagttaaggtgttgcatgtaggctggatcaatatggcacatccatatgaaaagaacctgctgggtgtttctatttttccttcctttgtttgctcacccaagctaactctaccccttctgccgtgcggcctggtaaaaatgatcaaagaactcaaatatataaaaagaaagaaaacaaaaccatattataaaggataatagctgatgatgaacgaaactggagcattaggtaacatctgccagcagtatgcatgtcgcagcaaaatgaacaaataaattatgtgattacagttggaactcctgatcataaatagtaaagttacaatacaaacagaaacacagtaaatcttataatctatatggtagaaacataaactgaagataatggatgctgggaataatccaatcaaccacaactcaaagctcagaaaatcaaggtcattcatgctagagcaacttattttgtctccgttaacccattcaagaagcattccaagcatcttgaacccccatatcaaagattcaagataaggagattgcaggtttataggaatgacaatccgaatcatataaaagattttagtgctgatgtaactaagaaagtcatcaaaactttaagaggatatcgatgatgcaaagtagaatatttatttacatacatatcagacgatgcgtcaggattgttgtctcgcccctgcaggtagcagatgaatcagaaagtggctagaaaggatagataatggcgtcaaactgcatggacatacctcatcaatgaattcccatttttcattcttaaggtgtaggcgttcaacatctccatcatcataaacaacctgggtgccaaaaaaatgaaggtatccaaagatgaaactgagctcaaaaaaaaaactagcatttgtagtgatttggacagcaaaaaggcataagtcagagctcatttcccaatgcacaccttgtgcttttttgaagcaacatcaaatgactcaacaacacctttatagaacctgcagagcaagaaacagattcagaacaagccaaacaacacaccagtaaaactcatgtaagaaatcacatatcgtagcaaaaaagagtgaggagaccaggatagataaaatataggtgtgtaactcaatctagaatgaataattgtactgcatatattattaaagaaaaggtacatatttagaaacatcatatcaaagtaacgaataatgcaactgaagcgtcgtctgcaaaagaatatgccatgtcaatctagatcaagaaatttatttagaaaataatgttcatacatatgaaaatatcatcataaccaatgaagcaatgggtactagttagcctacaaacacaatcttaacaaactcctacatttgagaaacataaatgatggttatagaacttactttctgtcatcaggccaccacactttgattcttgagccaacaagatttcctttaagaattttgttcttcttgggctggggagtctgatgaaagcaaagaaaaagatttgaacaactgaaacagaaatcagcttgcaacaagactattcactaacagcaataagaatcaagtatgcatatacctcttcagcttcctgtgcacgtttcctttttgagcccccactgtcacctgcctggcctttgtttttacctgttttggccgaagacttgggagatacgatatcctgcgttatgataaaacagtcattgtggtcgatcatcatcatcgcatgcacaaacatttcaacacaaacccatcagatttacaccaaatgcaaataaagctctatgaatttcgccgtagatacaaaatagttggtggcaggttgccaagccaatcaggaagttaaaaggatgaaaggcagagaagtttaaaaatatgagagccatcgacccaacatgttatagttttggaaagcataaaatgttttgaggttccactatttctaaataacactcctaccaggaaaccttagaacatggagtcagacagatataaaactatgaatatgtaaaacagaaatccaaccttctgctagtgatatacttatgcacgacctatgtgcaaagcaaaacctcaaatcatctactgttgacaaagaaactacctttaaactgagatcctcatcagtgtcttcatcgggtggagtatcttcctgctgtttcaaattttccttctgcttcttcttcgaagattccccttcaccagtctttttgaatgaagacttgatatcatcatctttagctagtcgccttgtagcccttccaccagaatcactaactgcgtcagcttttttagactctaaacctgatactttgccttttccaacattcttcttctcatgcgactttgatgcaggaggccggccccgctttcccttgccagcaggtgtgttatcaacatgtttcgatttgtcatcagcagctctattcccagtctctggtggcagcttattatccccatcatcagtctctggggataactccctagagactaaaatatcctcgttgttgttaacagccttagaatgatcaaccacttcagaatcagtggaagtatcaagtttatggcttttctttaaattgtgatcagatggcttttcaggctctgtggtgattggttctggtatttctttagcaccggatatcaaatcatcagtgtcttttgcctgattgtcatcagaaggcagttcagccttcttatcagaagaggatggtccacttggagacttgaccctgtctattaaagcacaaccattgctaaccgccgaagtggaagtattgtttggaggagtaccgtcttttccagggcaattggcatcttgctctaattttgatgattcctaaggaataaaatatgttcattgtgatatctatctcactttcaagaacttcagattgaatgtcagtagcgacatacctgagctgactcatctgaaacaatcttatgagataatttcccatcagccacctgcatcacaagctttcatagtcagcttggctgaaataaactaattagtatatcagaagaacattggccggtatgatatcatatcagattgagagaatttacactacaaacttttacagatcacacagttgataacaccaggtcatggaccattctattgactctaccagaaaccaaaaaatatactaacatacaatcaagcatatctttgaataacaccaaaaaaacaaaattaatcccaagaccactgcttgatatttcacagttgatactttttcagtcaatataactttcaaccgctaagacagcattccagggtccaaattctagttattacctgatgggcaacgtgacattttaaatttaacatacatattactccagaaagaatgccatagaattgcctgtcaaaatagtttatatacagcatgatatttaaattaaaatacagttgatcatacaaagaaatgcctgtcaaaacatttctatgtctcgtgttcctctcccaagtcccagtggtggctatatagcataaaccatattatacctctatagagtgacagatctaaccatttccagtagcaaatagttgaactcaatgtgtaagactaaaaatatgtgttaaaggttgaccacctctaataaaaagaacatgagcagtctttgcccatttgaacacatctgaaaatacattgagaatgccacaaaatgcactaactctatggtgagcaaaccttaattaatattcaaaaaggaaatttgttagtagtttgactgaccatatcctttccaggggcatcagaattgtcggctactccagcatctaaagcatcttcgaacaatgatgtaacaacttcgctgtactcatccaagggagtgccccgaagtaaaggagtaaacactggctttaacttctcataacacttattaattaccttctctgcaagttcgaaagatgctggaagagtttcctacagagcaaatttgaaattttagtgaagatgatcagatctattaattttaatatgaaagatgtaagtgaattcgaattactttttcttcctttttaaggttcttcagaaggtaagatgctagatcttgaagcaggcaggatggcatatcttgctggacatcttcgctctcatcaattacaaacttcatcacagtttccatcgaggtgatgacattctcttgatgagtattgctgaaataaatataacaaagtaatgaattataggataaagaagacttaagaaaattaacagaacatacgcagggcagaaccatgaacatagacataaagcaaatatacacaggaaaacacataggaactattgtgactttatgagttttcacgtcaaagcaaattgtgaactgtgtaaacttgttggaacaaatcatcatgcatgcttttgcacattattatgtgataagagaaaagcagaaattagcaggttctagacaaacagacagaggacaacaaaggattaaaattacttcatggcagattgtgccattatattttacgcagggaacaaccgcttgtcggttttaaaataaatgatgaacataagctaacaatgaaaaactggggaatgggatatggcaactcctcggtatgtaaaatttagcatcgatatgcatgtaaaaaatgttattccccaaagatttgcaatcagaactgatagctgcggtcaatttggtgcttcaagtaaaaaatcaaacgcaacaacgcccaatgatatcgacaaaccatagtaatactaatacatgatgtttcccttaaagtaatcttaactggtgagtgtaattgcaaatgcagttctaacttcttctccatgtacataatcatgccaaattagcagcataatattaatcaggcatcttgcaagtcaataccagaaccacaacatatccctagtcaatttaagaacccgaaagaatcggcattctcaaggtgaagaaaatacgaaatgaaccagcaaaagaagttacacacgatatggttctgaagaagtggtgaaacatgtcccgtatcagatcgtcgcagtcaagatctagcatcaagacacagctccggaccttcgcaacggtttcaagcatcgcaaccctccttgcataggaggggctttccatatcatccaacttctcaaaggcctcaacaactctggtaaatacatcctgcaacaaagcaagtgacaatggtcagtgtgagcaggcacaacaattccgtagcgataaatcttgcagcagagccagtgacaagggtcactacaagcaagcacaacaattccatgacgacaagaagacatttaccttcatgacatcatcgtcatagggggcctccggggcagtgatcctggtaacctccgttaaacaggaggcaacagcaagctttatgtcagggacactgtgatccagtaactccttcttaatcagagcactcattgttggccggagagccttgtgcatgctctccggcggcgactggtcaaccctggccaaccaggtttctgcctcctgcataaacgaatgagcagttctaagtttctacccaattaataaataaataaaacattctatttatacagatccaaacagcgaggattaaacttcacatcaatataacaaccagtacatcctatcatgccaggctccaatctccacggcaacctagaaacgaacaacgcgagagaaaataataagaagaaaaaaaaaagcagggtcaggggcgctcacctcgattaatctgagcagctcgtcgtcggcgtccgggagcgaggtgaagcgggcgccgatgtcgcgaagcctccgctccacctccatgtgcgcgccgtcggacgccatcacggcggggcgcgcgcggtgccgccccagcgggagagcccgcgcgaagatctaccccgagcaggaggaggaggaggagggggagacagttagggtttcgcgaggggactggagggggagggggagggggaggagagggcgagagcagcggtagtggggggtgggagatgcgatagagatggagtgtgttaagatttgagaaccagattttcccctctcaagtttttcggatcccaaactgttttttttttcctccccttttccctcctcccctctcgcagctattcgttcggatgtcatctcgacgactctcgctggggtttgggttgggcctttgggccaaaatcgaaaggcccgtcaaccgattgattgcgttaactgagttataaaaaaacaagattcaaccacaatggcacagtataacacaacaatgtttgtgaaaaaaatatattagtgtgcatatcgttagctttcctaccagcctactaataaaattttacgtcgtttggaaaaagctaaaaatgttttgcggcattgaggttccatatttgaaagtgcagaaattgagagatgatttgattgttaaagttgttttgaggatccctgttatcttggctcttaaaaaagctgggtcaatctgaggaacgatctatgttctttaaataaagttatttgagggttattaagacatccaatacatgtggtgggagatgtgtgagatatataaaatgactctggtctctatataaggtttataatcatatactatgaaatctattactctgtctgatcaaatttatttgacataagtcgggtatttctagctagatgggtattgtatttgtcacatacaaacatatctggacaaccaggcgaagtgactttttacagagccgctcatatcgtatagcacataatatgttcatatgtggtagatttagaccacgggtaacttagagaaaagatataagagaaaagagagaggaatacatttgtgaatataaaaacaactgattaacatggcatgtgaaaatcagtttgttgatgttgcgttacagaggaacaaataacagcgtagtataaaaaattgttgcgatgcggtttcttgcataacatggagcccaaacaaatactaggtttattatacaaaataatcagtaaacattttgaatttaaaataaaaaaagaacatctacacccatgctttctcgagtacccctacacttatctacttaacatgtgctttctctattagatctaagatttgaacttaagaaacacataaaaagacaatcagatgatatagcatataccgaaaaagttattgataattgggtagtctactataataaacctttgattaaaatatcggatatcgctaactcaatcctttgtttggaaaaatggcatgatatatcgaagaaaattacatgaggccggtcctaatcttctggatggcatgtggtgcttgagctaagtcatcagcgctatatttgatctgatgatgttggcaaaagtggcaaacacgttgttggtgaccaacaagggagaaaccggggaaaagaggaacatggcgagaaagatgaggaaaaacgtggaagaaggatgactagaaagataacccagcatgaacaattaattaatacgatggatgtggaaatcacagaggaatttcttcttcgttacccaatggatcagatttaatcatgatttgattgggtagtttaggatatgccaaatattgtccccacctgtgtagtaatctacaactatattcacctgtaagcgtagaatccattttttttcaaggaacaatgcattgaagtgataaacaatatagattgattcagggaacatatggcacatccttttgcacaaggggaacaaattattgggacaaaacgacctagaggatgagagaatatcaaactcttccttattcctttagctattattaacaacacattatatggggatgactatgactcctagtcggtatgcatcatccgacaaaagtgcattttcattcgatggattgattcatcgcccaagctaaccatggagctatggtttcttggcaaaccgcccttagagacccgcaggggggggggaggggggatatatcggatatatgaagtgactagagtagaccaagtctattagcgatactttgaactataactttattaatgccgaaagcaaaagataaaatagcaaactatcctgatcaagtaccatatgaaaagaacattgcaagccaagtcatgccaatctaaggagcgcaaacaaagtacgaagatcacggtatatacgagcactccctacagaaataaagcaaactttatgaaataattagggcatatgactcattgagattttaagtcaagcaagtagctagactagactaatctagatagcttaccatatttatatcttatcttactgaaataatgcacaataattagggaaaaagtaatattacaaaggacaagatttatatacttaataccgttgagcactgaagaaagaaatagaaagggtgcaagggttacaggagagtgtgaacatgtagctaagggatttctcataaatgtaaaagcatttttgttcttaaaaatgtataaaaaccatttcccatcttacaatttgtgattgcattttttggaaaaaaaaaagagaaggaatccacaaaagtgcccaacacaaagcttcgaccattgccgtcccaagcgttcaaattttccacctcgaggcctacgggcggcctgtacgatttacctgttggttcggtcgctccgttcctccggcttccgcctttcctcgtcgcggctatacggctattatacctaccagccaccacaccacccttttcccacacttctccactgactcctcgagatggatcccgcgccggcgacccctcgctggaacctggagcggccgtacctcaccggccgcttccatcaggtacgcctcccttctctcctcctcctcctcctcctcccctgtctcggctgcccccattgccgcctccgcctcatccaccctcgcgctctctctctcgcaggaggccaaggtggctgcggcggcgcagggggccggatccaagccttactccctcgactccttcaggtgattcgccggttaaaatttcgcgcgattttttttttggtgctcgcctcgtggtttttctgatgccccggagttcgtttgaatctgcagccgcggcggcggcggcggcggcggcgctgagagtgtcatcggatcgtacgccgtctcagtgcaggtaccggtagcttgtacttttaggttgtttagctggcttaattggcttcgagcgactacttttttaatggaccgatgctagggtttaggttccggttccgcgcttctacttcgagctcaatggttcgggttaattggaagaattcgtcgtgttttttttctctctacatgtgcatgaactgtaaattgttgttaaccagagtctggattggagctaggaatgttattgaacactgtattttgattttttggactgcctacttccttgaattcagaaaacaatattatgtaacggtgctaggttagaattttcttttgatattttggttcatgtggtcaatgtagtgtgagtagatataatttcagataataaaatattttgttacataactcgaatcttctgtttgaatttgagtgattctcagagtttgttggtcggtggtgttcatgacatactgacatgccgtgctaagtacaacatatttgttgtaacaatgtcacaaaatagctgcattttcactatgttgctttaagcagctattctatgaggctcaatattgtaatatcttcattttgcacatctttaaaattatctgaagtaatttagctttcacaaacaactgaaaagtgtaactccaacctatctgttattgatttgcaggagcttttggtcattgatgatttgttatcagctcttgtgggtattgagggacgatacatttcgattaagagagtacggggaaaggaggggtatgttgtcttccagattgattcttcaatggaccttgcactccaggtaaggcctgaagagtacaacaactggatcatgaattgcctccaaaaaggcagatgcgtttggtacttaactctttgggtttttgcaggaattaactcgtcggatttttcccttatgtgaggattttgtcttggtataccattttgtggagtccagatcacatttcaagagtggcctggtcaaccatgctctagctgcagcattgagggcattcctcttggtaaactccctctttcgagccaggaatattttaattaatttgccttgactacaagctttcttatgtttggaaaaggtggcaaaaacgaatatactaacaatttcatattatatagtaaaaacagtaatgcctgaatcatgagttcaagtgttcagttgtttattctgacatggaaacatttgcataaattgtattggtagagagtaatcttattacattatccttaaattaaaagaaggcctatgttttccagtattggtcctcatatgtgtatttggcacgaagttaagtgttttatttgtttatcaggattatcaggcaatggttgctcaactggagcaccagttccgtcttgggagactgtcagttcaaggattgtggttcttttgtcaggtgagttttatttactgcattaattatttatcctgatttgattatcattttaagcacagcaagtcctgatgtgctttttggcagaggatgatgagttcattgaacgcacttgctgttctagtcgagaaagctatctccaataacaccagtggttctgctacacttaatctacttcaaagtcaggtatttcacctctgagatacattttttttcttttgcatctctctttctccaagtacgagaatctggtgggtatgaatatcgttttcagtaggctcctgcaatccaagctgaacagactggttttcttatcggcataacatatttctttaacatagccgatttctcaacattcagttttttgttgccttttcattctggtccacatgattagctctttcatccatgtattaaattgctgtactcctttcaacataggcaaaggcaatggctggcgatagtgctgttcgatcattactggagaagatgacagagtgtgcaagtgcagcgtatcttaggatgttagaaaggttcatcatgttcatatcttattgtctttgctacttatcggttcttacattttgtgttgaagttaacaagcattttgtaattgccagttcttaattggattgtagtgttaagacttaagacttgtttagattaaaaacttaattagcttgtctgctgtattttgataatttcagcttctaatgggcttcattttaggtgggtctatgagggcgttatagatgatccttatggtgaattcttcattgctgaaaacaaatccttgcagaaggtaccgaatgacttagaatttctggcctacttaaattccatcgttctctgcattttcataagactagaatactgggtttgttatattcttaagataatcagaggctttctttgattttgataggagagccttactcaagattatgatgctaaatattggcagcaaagatacagtctaaaagatggcatccctagtttccttaccaatgttgccgccacaatactgacaactggaaaatatcttaatgttatgagagaatgtgagtacactgtccaggtatgcatgattattttctgtggttgcatcactagatgctattttatatgtgtgtgttataagaacacacttgtcttacatactatgcttaggttcccttgtcagagagttctaagctgatgggctttggttcaaaccaccaatatcttgaatgcatcaaatctgcgtatgactttgcaagtggtgaactcttgactctaatgaaagataaggttacaattgttcatagcaaatgcactattagatttcattttcttctgtggtctggattctaattttgttttatttaccgtgtagtatgatctcattgggaaactgcgatccctcaagcgatatctacttcttgaccaagtatggagaaaattgtggagaacatttactctattatgtattattactccacatcagtactctttaaaatccacactcgctgggtatattctattaatacaatgatattgatagtgacaatgcatgtcatgttgtcaacttgagtttaaacacatccatatttattttccttgtattagttctccaatttgctttctttgttttgcagggtgattttctggttcactttatggatattgcccgagaggagcttacaaagaaaccagaagaaatatctgttgaaaaacttcaggtatcctgttgtgcagtattgtctgtctgtttcttgctatagtctcatggcggaaactgatttttgactgctctggtctaagctgatccttctccagtgatatgttattccttcttcgttatatgttcttttgaatgaattgccattctatgtttgcagtctcttgttgacatcgcgttgcgaagtacggcagctgcttcagatccaagtcatgaagacttgacttgctgtgtggtaaatatatcatctatgtctcgtcaaaccgtattgtgttttgttaatcaataatatttctttgtctatttttaaacaggaaagaagttccctccttaagaaattgagcaccctgaaagacttggattgtgcatatccttcagacaagcttgtggcagctgatgttgaccatcccatgccgttaagtgtgactggcttggaaactttctgcctgagctacaaggttctatcttctgatattttttattcgttgttctaccttctgacagagaaatgatatgccaactatatatttcaggttcaatggccactatctctagtaatttcaagaaaatctttgacaaaataccagttgatttttcggctgttgttccactgcaagcatgttagtcgacaattgtgtacagcatggcaaattcaacaagtatgaatgaaccttttcttcacccccattatatcagcttaattgttttctgtttactcgttgactgatgtagaactctcaaccagggtttccgttctgtcaaaatcctaggaacaccagtcctacggtcatcaattctttgccgcagcatgctcaagtttgtaaacagccttttacattatctaacctttgaggtaaagcatccatatcaccatactaactgttaccaaaggtgaaaaattgctaaagcattcttttgggtcatcaggttcttgaaccaaattggcatttgatgcatgatcggcttcaaactgcaaggagcatagatgaggttttaacaacgttcttatgatgaagaaagatgtattgcgaaaggggtacattaccattgctgttgatgttgtttgcaggtcatacagattcatgatttcttcctgcagaagtgtctaaaagaatgcttattgttgttgcctgaactccttgtggttcgtcttcttgctcttttatatacagaagtgtttgtcgctgctgtacgttatattttcctattatctgagctctttttggagagaaaagaattaccagtgttgcaacaactttacctcctcttgttccttttaaaacttgttgctttcttgtgaaagctgaaagtaatcactgattgagttcagaattagatttcttgcgatactggcattccagtaatggaaagttaggaactaggcaggtcagtgatcaggtcatctgactgcaagataacaatggcaacttgtctctttactgttaaagaagaaagtcactgtctttaccacactgtgtatccttagcttgatttgtgtgaattatatcacccggtgactagcagttttacccttagccctctgtttcaaaaatacatggtagtttgttttacactgaaatactgtagaagattcaatgtttattttattcttattattagtatatttgtcatgtgcagaaaatcgagaagctgaaagctctgtgtctccagtatgcgacttccatccagctattgataccatccattgatgttgctaagcctgaaaatacatcaaaatctagaatgccaagatcaaaaataaaagaaaccaaaaacagaggccagcaactgaaattggcatcggaaaatgttgtaatgtcagagtcaatcttgtatgattcacatattcagtctttttcacacaatgttaattttgtatcaattgaacatcatatgatacaatcttggactgtttgctgcaggaaattcgaggcagaattcaattcagagcttcaaagtcttattcctacgctgagtaacagttcacaggcagaaccatacttgactcatcttgggcagtgcattcttggtgtgggagttgatcaatgattgctgcgcgccatgttccgcggacttcagacgattgctaagtttgcatgtgcagtgtggaattcctcatccccgtcaaggcggtgttcttgtgaatgtattgaatattgatgaaatatgcatggtatgcttcaacaagatagatagtactgtaggatttatgtagtgttagttctcttggtggtgttgggccgtgggtagtttaggcgtttctagtttgttctgtttgaagattatgattgaactcctacgaagagaaactgccctgtggtactgctgccaccaatgtaacttgaactagatgtgatgaattagtgacaccactaacaatttgtcttgggccgttgtttccttggaaaatataaaatatgtagtggaaataactatcgttgaatttaaaatgggcgtctgatatttagtacgtacatatgatttgcagtagtacattatttcccttgttttccagccacgtgcgggccgtatggtttagggcccctttgaatcgtaggaatgaaaaaactaaggaataggaaaaacgcaggattctgacaggaatgcaggtgtaaaatagaggattgaaaaatacaggaaaaacacataaatgaccgtttgattggaacataggaaaaacgcaggaatcggatgagagatataaactcaaagtaattttttcaagaggttggacctcttgctaacttttctccaaaatccctataggattacctattccataggaattttaaaggatagtatagtattcaatcctttgtttcaaagggtttcataggaaatttttccatagaattaaaatccttcaaatttcctacacttttcctacaaatcaagtgggcccttaagctgaaacggattcgcagctactacaagcctgcatggggtgcccactatcgtgcggcctgcgacgtgttgggccggaacgggattcacgggaacgtgctgcgtgtaccgacggaccgagcgaccgaccaatgatgcggtcaggctgcaacgaaagctgccttgctacctaacgccgcggactcgtccaccagataaacgtcgggtccatctccgtatcacccgcactggatccggactagtggcaatttgcctaattcactccccatacaaagcataacaaatggcaagggcataaaaaaaaagttcaatgtgtttggtgaatgctgcccttttttgtaatgtcaattcgtggtccaagctgcactagttcaagtcttgaaatacccgtgtaaaattcgcggtacatatacaacgcacatatcatatgctattatgcttattaaccaatccaaactcaaataagatgcgattttcttcaagtctcagcgatcaataaccttattctgggttaatatctatactatgctatattagtatctctgtctcactcgactctaacgttacttaaatactactcagcccaaaatataactacttcttatcctaaagtatactccatccaaaaaatacctttgtaccatttgagtacagtttctggctccatcaccaattagcctaccctcatttaacttttactcaatcctacatgaggctgtgctcggaagatgatgttgggaacaaatcttatgtacatgtaaaaaagagtacaactcattagcatatatttaattaagtattagtttaaaaacttaaaaaatatattataataatttttaaagcaacttttgtatagatttttttagagaaaaataatatcgtttaacagtttggaaaacatgagtatgaaaatcaagagaggaaaagttggaaacctacactactgaactcgaacctaaatgatctcccatttgataatgggcatggtagtttttccctttataatattgtcagtttatcctacaaagtgtatttttcttacaccaaagtgttagcgcacatagattagagtccctttgaaatatacaacttttacaaatatacaatatcttcaacattcctcaatagctatgaaatatacaaatcttacaaatatacaattctttaaaattatttattagcaagttaggaagattttaggcctccatagtttggctaaatatggataatacaccattcgacgtattagcaaaatagtaataatttataggtaaaatttttatatatacgttcttagcgatttaaatatccatattgaaaaataaatttcgatcgaaaaaatttcaaaattaacgatggggaccttaatgccaacagcctgcacccttcgttccattaaaaaaataaacttgtgactacaaacctctggcgacgttccaaaatacaaccatcagtaagattttccggcgacggcgttggcccgccgttggatcgcagggaaatccgcgtccggcgcggcacacattacacatacctccgtgctccatgactccgtgtacccacggacccaccattttcctcgccgcagtaccgcaccgacccgcagttagctcacttcccactcgcccacttcccccaccccactctgcctccggccactgccgtctctcccattccccccaaccccaccaccaccgcgaaacaacaagacgaaaatcacacgcggacgcggcccggtcactcactcacacgccgcgggacgagacgaaacggtaaagaatccggcagcagcaagcaggagagcgcgagctcggcgtccccgctccgctccacacgcattgcccgctcgcccgcccgcccgcccgtgagcgcgagcggctggagcgatggggcggcgcgggggcgcggcggtggcggcggcgtgcgggcggtggtgcctggtgatcctggccgtggcctccgcgctcggcgtctccgggccggccttctactggcgctacaagaagggcttcgcctcctcctcctcctcctcctcggtctccgcttccgctgcggccgtcgtctccccctcctgcccgccctgcagctgcgactgcccgccgccgctctccctccagtccatcgcccccggtgagctcacctagtcccttccctcccctcccgtcagatcttgcaaccgcccgttcgcctgatctgcgcgcgcatagtttgttcgataaaaatccaatccgtaggttgaaacttgcagcctgcaactagtgttgtgtcagatcgatgcgggaatcattgcatatttgcagtgtataagagctgaaatcagtactaagtaataggaaaactgaactaatttgcgtgctctctaccttgaacgcttgtacatcgctatcaggccatcactgactggattttgcaattttattcctttgcagggcttgtcaacttctcaacttcaggtttgagctcttccttccttcatagtccctttagctgagctttatctttatttatccaatattcccatgaaatcggttgagtataattgttatctgatggaagggtggtagcattcgtgcttaagtcgtatgatgtttccgggactgaatggtttggtatgcaacctgttacctgtagttttgggaagtaacctcagcaactattttgatgcctgggacgattaacgtgactaattgagtattagggtagctctttcaattattgtgctatgtaaatgtggcactgttaaaatggggggaaatttcatttgttgctaagagcacccctcttcgcatacagataaaaggatgcgtttaaacatttactacacctctttggtgtgtagcactagtatttgttggcacgcatcacactcacagaagcttaggaccaaaaatctgcctgactctgcatactaaccagattttggtactttgtggcaacatattaacagtatgcacctttaagtggatttcttactggtatttccagaaaaaagaaaggggggtatgactcagtgtagtaatttattgtgttgtgtagaatagttagtgcagataaagctaaccatttctgtaatagttttcccctgaaatacttgagcccctaaaattttgtcttgcctggagccctggacctgcacatactgcttttatgatttctcctaacatctttggtacaatgctccattggatagggaaattctctcgtgttgctctgcaagtagttgttataccttttgtataaacgactacattgctccagtctttctgagctgtagctagtgaaatattttcaattcgctccttcccatggttgaatcaattttgttctaccccctttttcgttcacgacaactgcttgatcttattttgttgtacctcctttttctttcataaaaactgcctgaccttgctggtgccattaagcatttgacttgaaacatacaggttgtggcaaaaatgaccctgaacttagtaaagagatggagaagcagtttgttgatcttcttaatgaggagctcaagctgcagcagattgtagctgaggagcatagccatcacatgaatgccacccttgttgaagctaaaagacaagctactcaataccagcgagaggcagagaagtgtaacgcagccacagagacttgcgaggaagctagggagcggtctgaagcggcaatttcgaaggaaaagaaactcacagcattatgggagcaaagagctcgccaattgggttggcaggactctagacctagagtcacaaccatttgatagcttgacatgtcgttgtatttcctttttcttctacaggtaaaattatttttggtagctgctggattgcatcctgcagccaaaccgagcagtgttaattgtacggctccacttgtaatgtatgtctatgtattatcatcagctgtgccaagagcaagaatatcatagttaaatgtaactagtatacatttactcaatgttcggatttattgtgacataccggagatatgctgtggaatgtggatgacacactttgtttatgatgcaatgtacgcaattctagtcttagctaacttaagctatgcttttgttcttgtataacgaagtatataaatggcgcataatgcattcttccctatgatttgttttatgggacattagtcatcctgtgcatttgctccataagtctggttccaaatagtgatatttacatggttggaaacctgacagatagccaacatctgtgttatgttggtcaacagaagtgtattggaacacgtgtgtagcaaacttcattttagcggtgacagatgagttcctgtcttcctagaggaccttagacatcaattcgtttaaaaaatatttacacatttgcgttgcgtttaaaaaaattaaattgttgcgttgtagcaaacatcatcattgtgtgaaccagatgagttagttacaaggacggacaaattctcaatactcttttcaaaaaataaaataaattctcagcaacttttaaagaatggaaccggaacaaagttctcaacgaataaaaagaaaatctccaaaacaaaatggcaaaatcaaataaattctcagcaacttttaaagaatggaaacggaacaaagttctcaacaaataaaaagaaaatctccaaaaacaaatggcacaattcaaaagttatcaacaaataaaaagaaaatctccaaaaacaaaatggcacaattcaaaaaattatggcccatgcaggtctcgaacctgcgaccttcgcgttattagcacgacgctctaaccagctgagctaataggccaattcgataaatttgtgttatttactgtatgcaaggctattggccattatcctctctcgaacctacgttaccctgcacgcttgtgtattttcatcatcgaagccatgaagatcccacgccgagcgtaccggcctctgaatctcatgagccacatctcctcctcctcctcctcctcctccatggtaataacacggagcgtaataaccgtagtgccccacgccgccgcgcctctgaaactcatgagccacatctgctgttcctcctcctccattgtccggcggaggcacaggcaccagatgatcatagcaactcggaacgtaagcgcaaggcacaggcaccagatggtgatgatgacgatgatgataatacgggacgtagtagccgtgcctctggaactcgtgatgagcctgcgcatctgctcctcctcctccgccttccccgtgatcatcatcttcttcctcgagagccaggatctcgaccttcttcccggtcttcttcttgatccgcctcaccgccttctccggctcgaagtcgccgccgcccgtcaccgtcaccttgttctctcccctctccacctcgactttctcgactcctgcgtaagtgtagttggtcgaaatctcaggtaatatgctttgagctgaagattaaataggatgtgtcttttggtggttttggtttgttattaattagttaccgtcgattttctctatggctcggcgaacagatcgttcacaggctttgcaatgcatgtagattctcagttctagtttgatgctctgtacaaggaaaacaaacagtaagacggtgtggttaaacggaaatgatggtggtgattaaattggtgctttggagttcgtccatgtgcgtagtatgtacgagttcgcaacttggaaagaaaacttacgttcgtggagctagcattttcttcatccatgatgccggcctactgaacacggtacggtaagatgtagtatgaaaatcaccctgaaaatgtggaacatgtagtcaggtagaaagcaaattcagatgggcagaagtagtaaaatccataatatggtttcgacattccaatcaaagtcacatgtgaaaattcttcttttttttggataagaagtcacaatgtctttgaaccacaattataaattcccaagcgcatttcatgcagattaaccaaagacatacagtcaatcacaaccaatgaaaactcgcatgctggagcaaaattttcagaaaaatgcataattaagtttcatgcatgcaaagttagctatcctccttcacctggtcgtctcattcatcaatccatgccgatcgcgtgctctctcctggccaccgcaacgcctgagaaaacgcgaaagacctgacaattacacggattggtagaggtaataatctagctgttcttgcgccaatgttcagggaagaaagagaatctcttctattgtacccgctctcgctgtcctaagaattcgatcgaccctgtttgggaagtcgcattgaccatcaaaccacttctcggccgatcccgtcgggaccgggttgtctatttatgaggtggtaaagagtgataggactagaagtgggggagaagaggtcgccggaaagaataacctgctagcttcacgcgatcactcccggccgcagcctaaattcgcgtgtcgttgacaggaggctcctcctctgaaatcttgtggcagaattattcctctgcatgcggttgttgcggcattgttcctctgcataagaggcagcggagacggacggcgtcgccgcttctttggacgggcccgccggcgagagcgcgaggacggggctcgccggagctccgggccggtggtggtagggacggaggttcgggaggcgggggagaagaaggctgtacgtaatgcggcccatggttcctgggcctgaagtagttgtgccgtagcaggaggcccacaaccgcggcgacggggttgggccggaatgggggttttcacggattattttttttcatttttatttactttctaaatgtttttaaaaataaattaatttttcaaagttttgcaaaaatatactcctcccgctataccgtatagagcggaacatataaaacgtcctcctctcctacaataggatggactatgtgacgtagcacaatgcgaaaggacgtaccatggtgattttgcaggcggccctcttcgcgtcctcccaaaggcgatttagtttgcggacattagcaatagtgtgttgatgtataggatacaccatggtaattttgcatacaaccccctccaagtgataaatcgtcttaggggagggataaattgctctagagaagatcagaagagttataaggagccacctacaaaatcatcatgcacgcccctcttgtggagcatcacatcatatagaatgctttattgtacgttgatttatatgccttaccttacgatagaacgggtggaaccgatttatatgcaccacccaacggtaggatggaatgagtttatttcttgtaaaactttgaaataagaatttatattttaaatcttttaaaaaataaatataaaaataaaatgaatcgttctcacgtgtgtgacgtatttttttcagccagatccctagtttggatcgcgattattcgttgctatccttaatttcgcgaagaagccctaattttcgatcatggaatttttcaaaaacgtactccaggccagtagaccaggagtgctattaatcctgtaactttgcaaacgagaccctatttggatctttattattgcttacgatcctcagttcagacttcagagagagccatagccagcccgccgctccccgccgctgcctcttcgctcgtctccgtcgagtccgtcacgcaggtaaaatcccccgccgctgactcgcgcgctgatctcgtgtgtgttttggtcccgatttgggccgagtttgatcggcatgccgcctgggtggtgttgattcgggtggccttccgcaggggatagttggggggatcgatccactggttctcgaactgccatagtacttgctttagaggtagcggtttcacttgtgtgatcgaccaatcagccatttctgctcgattaaattcggccagacctgtgtaaattggggtttacgcgaaccgaggaggtgttgtagctgtgagtattcatgccacatgcccacattgatcaaattatgctcttcaaacacatgaatctactaaatttagaagaaagaaaaaaaaacagaggggctggcaatttcatagtggattcatttatttttgtcatctcatttttctaagttcttaaggaaatgttgtgcaaattaagcagaaactgtaataccccaatgtggtttcgtattagcacctgtttgtgtgacaggagattctcagattttagatttgaggaccatcaatccctcactacttcactagcatctacttgtcatgggataaatctgaagtcccaagacctgtataaacgaaatttctccaattctcatgcagatcgtagtaaactttggtctctttgtttcatccagatcgggagaggtttgacagtgcaatgtaatcgataagcaaaaccgacagatacaccaaatggcacgcctgtgcagcttcttgtttgcaatgatgtgatctggcagaaagaaggcttgttggttgagactgcagtagccttgggcagatacacttgatgatttattgatgcagaaattagtgcttagcaacataatgttgtctgtgtactttattaagctaaatggacaataaatatgctgatacaatcagcatgccattcctcgaaacgaagtactaaagagaataaatatcgaagaggtttttcagcaaatagctatgtcttcctcgatgagaagaggtaggagcattatctttcatagttgtttgaatcgagttattctgaatccctgaatgttgatgaagcttctatgcctaatctgcagcaaacccaggagttagagcagtcaggaagccctggagagaaagcagtccaaggctccaagctattagttttttcaagaagagaaacctgtgaccttttggtgcaatgtcctctttgggagatgttctgcacaacatcttgtgaattgtgatgctagatttcatttcctgttgcttgctttgcttccagctgactgtatatacatataggtgctggtatttctggctctgtgtgcagcagattgcttgtcatgtgctttttttttttcagaatgctctactgattacatatttacatcttcccagaaatcttgtttatcaaagtcagatttttgcacattttttttggagagatcctttgcacattttactcgtctactcatctgacttataattatttttttatcatttcagcttggtttcatgactctcatctagcacaagctcccggtctgactcaagccgagtgggctgggcctgggccgcatcacgcaggcacacgagctgggatgggatcatttggactcttccagttcgcgccttatataatgacctcacgcacgttggctcgtcaatcatcatcggagcagacacgagagcggcgatctcatctcaggcgcaacgctctgcaagtctcggagcgctgccggagctggtcgctgcacggcgagctattcggcgatggatcaggggagctcttcgtcgatgtcctcgtgctcttcttccacgacggcgtctaccgggcccgatcaaagaagattgtcggcggcggcaccgacgttcgacccgtctatggcctcgagttcgtccatggcggctacgacggcgggcgttccagggagctcgccggcaatggcgcctctgcttacctctgcgaggatgtcctcgggctcttccgcaagttccactacttcgttcgacccagcaggatcgtcggcgttggcacctgcgcgctccccgaggcctggattgtcggcgtcggcacctgcgttctacccgacgacggcctcgagctcttccacgccggttatgccggccgttccagggttcttgccgcagattcctgagcccaccgcttcttgttccggtaagcttcgaaaggagttctttgtgtatctttttgttgtttcgaattgtgattttcttcctggttcttgtggatcgatgaatcctttttgcttcgattcccaagtgcttatcttggctctcccgaatcttttgatctttgggttctgcggaatctttcatggttcttgttttcttgttttttttttggctcatcttggctttcctgcataatcaccttcttgttttcttggttctgggttttaactcttcgtgtttatttggaatccttttcttgaaggagacaaaacgtgatatttttttataaaaatgatattagcgatttcactgatgaatctttgagaattttcttggtcctgtatgaaaaaaaatgccatcttttgtttgatgttcggtagtctttcacattttccttgccttagatagtttgctgtcattttatctcgggcagcgattaattatcgtgatatcttgatcagactttcctccggagatgctctggcatcatccttgtggagaacagaagatcaaaggaggacggccggaccttcttggtcgtgagtttggtattcttgctgaacagaagaggttgattcagagacatttagatctgaaagaagaaatgcatttgcgccataacaaggagatcgagaatgccttcatttcggagacaaggctggcccggggtgtggagcaagatctgcttggggactgcaagaaggccgtgctagtgcagcaagatcaatctggaaaagaagaagaaagtcatcagtgcctgaggcagctgcaagacgtcaacggcgagcagcttgtgggggtgccgaagctggtaagtctggaatcaattgaactaccggtaatgttgaataggagggttattagcatgaattgttgaatttaggaaaaaaaacaacaactgcatctggagatattttaaaacataagtacacattacatgcttgagaaatatgcagatttgcaagtgagtcccctacagaaaagctactgttacactatcggtaatgttgaataggagggctattagcatgaattgttgaatttagtaaaatgacaccagcatttggatatactccctccgtttcatatttataagtcattttgactttttttcctaatttttttcgagaatgcgcaaaagatttgcgcatctttgtattatgattagggaattaagtcaacaacttacaaaccaacctgaacagaaaaaagaaacaaagagaaactttattaagtttgaccaagtttatagaagaatttagcaacatttaaaacaccaaattagtttcatcaaatctcattgtatatattatgataatatgtttgttttgtgttgaaaatgataatatgttttgctataaactttgtcaaacttaaaaaagtttaactaaaaaaaatcaaaatgacttgtaatatgaaatgaagggagtgttttaaaacaaggaagaagtacacacttgagaaatgtgcagatttgcaaaattgcaagtgagtctcctataggaaagctactgttaggaagtatagttgggttggcacttacagcttaagacatgctttgctgttatttgtcagggtcttcctggagctgaagaaaacgttgcatgcaacaacactgcttcccataaagaattcagtgaatttccaggtccagatattaaggtatatccatgtcacagaagtgtcaatgtcagatactgcaattcatggcagcttggaaatagtttaccgacattcatgcctcatgctgcttagaccatcttataaaatgctgcaatagtattcaggtcatcttgcaaggatgataaccatatttacgatacgcttctgactgcagtttgggagcatcaacatcagagatataccattgctgcagggaaggcaagctgcagttattctgcccaatcctcagctagatagaagaacttccggtttaactccagctggagccagttccctggatcaggagacagatcaggagctgaatgaaaagcttttgtagtagttatgaaatagttactcagatcgtgctcctgtggacttgtgcagttgtgttgtgctgtacttacaaatctgtcttaaattgggcatttgtcatgctgaaaagaatccgctgaagatagtggtaaactggtacacaaaattctgtcttgaaacacccattaggccattaggcccattagtcagcaagaacatgttgaaggcagtgtcaccctgctgtgcattatataactcagaatagcaagtattctttggctgtttgtactgaacaatagctctggtagctacattctgtaaatttttttgccttctggaaatgaaaatcagcaagaacatatactgtcaccctcctttgtataatgcaatgtagaaaagtgagtattctttgattgttgtactgaacaatagctcttttagctacactgtgcatttttttttgcctctggaagtaaaactatgaaggggtctgcagttcatcagtgttaactgcagcagtgcagcattgtaaaaggtggaataattaattatttgccactcttacgagtggtgctaaatgatttaccactggacccacatataatagacacatgagggtccacatgttatagacagcgagtggcaaataattaattaccaaatcttaagggtggccaaaagttaaatgtctcggaaaaggttgtttctctccctgataggcctataatgtatctgcctcgttaaggcccgtttttctcaggctaggcctggcccaatagccggcccatgctaccatccacgagttagatcgagcgcagcagcagaaggatcccttcccatttcctccaccttccttctcctcgactgactcccaccttcgtcagatctgccattaccgaaacccagcaggcgaggcgaggcgaggcgagcggaccccatggagcccggcgtgagcatcgagtccgggtcggcgatccgcgtggcggtgctgccggtgggcgggccgatctcgccggcgcgcctccgcgactacgcggcgctggtggcgcggcacgcgcgcgtcgacctcgcctcgctgcggccctactactcggagcaccagaagagccccttcgcgcaccagccgtggggcggcggctgcctccgcctcaagttcgtgctcggcggctgcgtgccctcgccgtgggaggacttccagtcctcccgcaaggtgctcgccgtcgtcggcatctgccacctcccgtcctcccccgatctcggccgcgtcgccgccgacttcgtcgacgccgcgcgctcctacccctccgcgctcgccagccgctgcttcgccttctgccccaccgacgcgcaggtaccttttgctaccgctgctgctgctgctgctgctgctgcgtctcttcccaaacctctggatcacgtggttgttttggtagtgcgcggctcagcaaccactcgtgaattgagttggccatttggttgtggagttgctatactgaatacgtgtacctatggcttgcgcattgggtagaacctggcagcttcagagtgttccgatgcttgttactttcgggtgagatctgagtatctgacctctcgatcatgcaatccacgctgaactaatacactgattctattgcttgagagttggcgattttgcatcacagcagctggtctcgtggtgttaattcagccatctatgtgttgttttagttgatgactaggctgtgctcagttttcttgtgatgcattccgctagcatttctatccttaaactaatgtgtacttgtttatatcatcatatgccagtctttcttgcataatcatattaaacttcaccaaatcttgtatctacattccttgtgtaaggaactagggaaggtcatgatttactacgcaccaagcttctatgtagtgttgctatgttgatggattatattcatagctcttgccccaacgttctgatgccagccttgatgaattgtttatttgatcactccatgatctgatgtgattattatttgcattgtttgttctgtagctggtgcagaaaaagagggataatattattatgttccctccttctgatcaacaatcgttggaacttcatatgctcacgatgatccaagacctttctgcttcgctgttgatggagtttgagaaatgggtcttacgtgcagaatcaacgggaactattctaaagactcctttggattcacaatccagtcttggctcagaggaggttcgtactttaggtgttccgagtattttgactagtgtatgttgatgacataatagtacaacatttattgattatatgagataatatgcttccacattttctaggtgattaaggctaaaaaaagaaggctgggtcgtgcgcaaaagataattggagattattgcttgttggctggatcacctgctgatgcgaatgcacattatgccactgcaatagagcttgcaagattaacaggagatgttttctggcatgctggagcccttgagggtagtgtctgtgcattagtggtaagcatttgtatgccttattaagctttgggattgaaagcattccttgtatcagatcatactgcatgatagctgtaatgttatacactgcatattcagtatgatagctgtcatgcttatacactgcatcttcagtgttacttgacataagatatctagatctaatgtgagaaacactgcacttgaaatttccaccagaccccactttaaccccacccaaattttctttgggtctagattctccaatgtctgaaacttttataatgtttaactccaaacaacatatttcgaggacttgttaaatcattgagaaagggatccaacaattacatttccatttctttccaatatgctgagaagtgaaaactggttcattctcgcttcttttcctcacctggttagaacattcccatgacaaggtttggcgataattttatgcttataatcaggttgataggatggccgaaagtgaccctgttttggaggacgaagtgaagtttcgttattacaccattatccagctatacagaagagcaactttacaagacaatgctcaaaggtattgaatttgtcatgtcattccttcacataatgattgctttacccttttacatgctcaaaagtatgtcacgaggcacaaatgaaagaattgaattatttttatcccttttgttttttcttcttagctttgctgaaaactggatagaggattgcactccctgaaatttttacttggtgaatttacttaataaactaatatgtcatttgcacttgttctttttcttccttagagtttcaccagtcagctttgagcttgaagctgcattgaagctggcaagatatttgtgcaggtgagtctccctattattatatgagcagcacttggttagccaggttctttgtgctatattaacaattgatttctatagaatgaaaatcccaatatctcctttggtgcttgagtagattcttatgcttctttagttataattatttgactggaaaaactagggtggaatgggggtctgagattgttgaaagtatactttacttaggtttgttttgtccattgaattttgctctttctttataaggcggcaatgtgccaaggaggtgtcagatttactaatgggcgctgccgatggtgccaaggctctgattgatgccagtgatcgcttgatactctatattgaaatcgcgagactttttggtacacttggttataaacgcaaggcggcctttttttcaagacaagttgcgcaattgtatctccagcaggataatgcatatgctgctatgagtgctatgcaggtcctaaccacaactacaactgcataccatgttcaaagcaggaagaccagcaaaatggatcatggtttgctcaaggtgagattttgagagcttgcagcattgagaattatttccattattcagaatactgcaccatattcatatgttctcctcaacttctccaaacatgcctcgcattttatcaacttggatactgctttactcagtgaaatcatgccatcatcaaaatgtgctttctttttatgctggaaatttcacggaaataaactttgctatgctagtcacgagttaactgcacaacattttgccttttattcatctttatatattagtactccctccgtctcattttaagtgcaaccatgagtttccatgcccaaatttgatcgtccgtcttatttgattttttttataattagtatttttattgttataagatgataaaacatgaatcgtactttacgcgtgacttatgtttttaatttttttcaaaaaattttgaaataagactgacaatcaaagttgggcacggaaaatcatggctgcacttaaaataggacggagagagtagttgctttccttttatttctgttgatgtggtgagcagggtagaataaatgtcgttgacaagaaatataactcaatttaagcattttaggacgggtatcaatggttaagaaagatacatgaaccccaatgcaaactgtattaatcatgttagtaaacattcctgctttattaaagagcatgtgagcactttgccagcatatattttttattttatggtgctcatcttgttataccagaaatgatcattcagatatcattcgtttaatcacacaaaggacgagcgtaattattatattgacaaattggtgttgagtttatattttattttacatataatgataatgacgtatattgaatagttttgcattcatagctttactggttatccttatttgattctggcaatactgatcctggaaaattgcatcctcagtctgtagtatcactatttgagtcacaatggagtacccttcaaatggttgttctaagagagatactgatgtcttcaatccgggctgcggatcccttatcgtcgtggagtgctgcagcccggcttcttcggtcattttacccactcatcaccccagctggtcagagtggcttggcaagctctctttcaaactcagctgataagcttccatcgggcacacgttgtgccgatccatgtcttccttttatcaggcatgtcaaattaatgaatactcttattgctatgtttggggaaacttaaaatagatactgtaggagtccttttattttgttgcaaaactgtaggaactactgttgaatcaggaagaagattttgatcgagcatgtttctttatttgttttctgagtttttatttctggtgtcctttttttaactcaggttgcattctttcccactgcacccttcacaaagagagatagtgaagcgcaatccaaataaaaaagagtggtggactggtggtggtccttctggaccttttatttacacacctttcaccaaggggggaacatctggaactagcaaacaagaggtaaattggattgtgggagagccagttcaagttatggtagagttagcaaatccctgcagctttgacctaattgttgagagcatttatctctctgttcattctggaaattttgatgcctttccggttagtgttaatcttccaccaaacacttccaaattggttctgttatctggaattccaacacaagttggacaagtatcaattcctgggtgcattgttcattgcttcggtgttatcacagaacacctattcaaagaggtcgattgtctactccttggagctgcacaagggcttgttctttctgatcctttcagatgctgtggctctagcaagtttaagagcgttaactttccaagcatttctgttgttcctcctctgccattattagttgccaatgttgtgggcggagatggttctattcttctatatgaaggtgaaatccgtgatgttttgataacactgacaaatgctggaactgtacctgttgaagaagcaaatgttgcattgtcagggaagaaccaagattctgttatttcgattgcccatagcacatggaaatctgcacttcctattaaacctggtggagaagtgacattcgcagtgactctcagagcctggcatcttagcccgacagatttggaagcagatggcagcagatctcctgcaaactcaaggaggatagcaagagaagggagtaatcctttcttggatattcactatgctggtgggttcttggtgcaacattcaattttattagtgcatcgaagtcacatcagtttaacatattcccatccatatgcatccctaccaactgtttttatttatcctagattcaaatgtttcagcaaaacacagtaggaattagctgtaaggaattaccatagcaggatagaaacagataggcaagtacgagtagcttgtttactactacatccgtttcatattataggttgttttgacttttttcctagtcaaacctttatgtttgacctactttatagaaaaatatagtaatattttcaactcaaaacaaatatgttatcaaaatatattcaatgttacatatagtgaaacttattcggtgttgtaaatattgctattttttttataaacttagtaaaacttaaagaagttagactaggaaaaaagtcaaagcgaattataatatgaaatggagggagtatgtgtgttaaagccccttgtcagttgttatttattctcttcgatgatgtttacagtatttctttctctgaaatggcgatgctcactctttagcctgtcttagaaatgcataaccaacaaccttggcctttctaagcataaacaaatgaaatgtggagagtattcttttttaatgatcagttaggctgtctacagtcttgaggaatgaggactgaatttcgactttctgccattacaggtccttcagggaactctgagagcaatgatgtttctctcccacctggaagacgtctggttgttccgttgaatatttgtgttgtacagggcatgcgacttgtaagagcacgcctgttgtccatggaattacctgcccggtttactgatgctcacttaagatctgtcagtagcaaggacaatctaagcaatggcagtgatgcgattcgtaatgacattagcttattgaagattgatccttataaaggaagctgggacctccgtcttctggaacttgagctgtttaatcctactgatgttgttttcgatgttgatgtctcagttcatctcgatggcacaagtgtcgagcaaaaaattcttccagaggataaaacggccagttcggcttgccacaaaactcgaattgatcgtgactactctgctagagttctcatacctcttgagcacttcaaattacctgttcttgacacttccttctttgtgaaggaaaatggaagtgatgaacctcttggatccagagctgccacgttagcagaaaagaatgccaaggcggaactaaatgcttcaatcaacaacttgatttcaaagataaaagtgaagtggcattctgggagaaatagctccggtgagctgaatattaaagatgctattcagacagcattacaggcatctattatggacatactgttgcctgatccgctgacattcagctttagacatgccaaggatggaacaacagccaaaactgactcttcgaaggagcctggtgacggttccagtcgttctgctgatgagagtgttctgaggtgtaaggatcctatatttgctaatgaaatgacccatatggaagttcaaattcgcaataacactaaggaaactattcggatgaacctaagcatttcatgcaaagatgttgctggagagaattgcttcgacgaaaatagcgcaactgtcctctgggctggtaatttaatgatgacattatctttcctgctatccttgtctgttttgacattttgttttctgaaggcagcaaatgatcacggttaaggaagatcacaatatttacattttgattagtttttggctttccattgaaccaatccgttaggttacagtttgtcattgcattctgcccttaatctgttcatctatttactcacaaatgtcctttttggtgcaggtgttcttagtgacatatatctggaggttcaaccactgcaggaggtagtacatcctttttctatctacttcctggtccccggagactactcgctgcaagctgcttctgttataattgacgcaaccgatgttcttcgtgctcgggcaaaggcagagtcgcccgacgaacctatactatgccgtggatctccattccatatccatgtagttggtacagcttagccggactttcttggatttagtctagagcgtgccctgtatcgtgcgtgagtttcgtgacatgtgcagctgcgaagatcatgtagaatttttatgcacatctgatttatttgagccgcatgaaggcttccctgtaacacagttgtgttttgtacagtgtaaaagcatagtgaaggttgtttcacagacgcgcgaatttgctggttctggtttcagcatctcgatgtaaattttttctgtcctacgaagaattccatacgtatgagctctcatttctgccattaagaaatgatggggatttaaaaatttcgatgcatcaatacaagttgaaatccatcaaccatcgattgttacttttcatacgcatggatagtcatttctgccgttaagaaattgttggggttttgaaattttgatgcatcaatacacccatcaaccagcgattgtttaatttctttgcaaacagtgacaaggacaataaggcaaaggtcaagttgtcaaagaaggctgcatccctagtcttgtgatcaaatcttttatatgcttcttttcaatcttttatgtttcttgggcggaggtcctcactggcatgcatttgtttgttgcttgaagtacagcctggcaatcgccttgaagagcaggagcttcaagggaagccttcgccggtgtctgagctactgaaggtttgtgtagaggcagataagaatgttttcaaattactaaccttgcatactgcagtcttatgttttgaaatggacatgataaaagttacgaaatgctctgattgtcttgacaaacttgagcagtggcgaagtcctacccctttttgtccgtgtgcaattgcaatttgtagcttgcacaaaactttcaatgggtcgtgcaagatgatgtgaacttctgacattcctttacttttgttttcatggtcataagtgtgcaggattttatgccctccgcaagttgcaaaaggtagttatagaaatagaacgaaatgaggctcgactggagaaaatcgctaatgttgcaagggcggctcttacgaggatgaacaatggggagacactatctcaggaggagatgaaatcgtaccttgaagaaattattcgtttggctagtatctaaggaactgatcccaggatagtgtaatttttcatcacctctgtaatactcctatgtcatacgatgcgtaatcaaacattgcaaatttgcaatcatatgcccctccagctagatatttggttaactgtttatttcttcaactctataaattagttgtacttataacatgatgcattctgctttaattctttaaagtaaaatattctcgtcatttgaattcagagagtaccagcctgtaggacggcttagctttggtagcacggtaatcaggcttaccaagcttacggagccatcgtttcgcttattcgcggaataaatgaaacggcatatttgcaaacgaaaaataagttgtgaataaaacttttatatacgtgttcttggcagtctagaagtaaaggctggaaaataaacttcgatgaaaaaaacctcaaaatcgactccaaatttaaggttgaaaattaaaattttgactgataaacataagcatagcttttgcttcgtgttcgtataatgtttgaactttgaagtgacagaacgaaacaaacatcctaatcgtaaggcactcgcatagtatagcgctcgttgtgccggtgccgttcacaatcacacacgtgcaggccatgtacttcctagtcacgattactgaaattatctcaaccaaattggggagacgagctttttttttttttgatagatcttcacatcgtcaagcattctacaaactatatgttgattgaatgggaaaacgatcagtacacagacagacatgggcgcagaaacttcttaagattttaagcttgacaagtaaagtcaagtcaaattcctagtacagaaaggtaaactcttgtctagtcaagatggtagacacgagaaagacatctaggtggcatcaaaatctcatgatcaaagctttcagaaccctgaatatctcctcatatacatcttaagcggctgtgaaaaccttcttccctgcaccactctttgaccctgccggaatgaccttcagcacattgaacctcacggtctttgacagtggcctgatattaaacagatagttgagtaatttgtggatttctgggatgaagcacacaaaataactgtactttacttggctaagattagaaaattcatgctcaaacattcaggtttgtattcactgaggtacacaacattcacaggtcaaagtgagccgtcacaaaaacattcaaaggaacatgacaagctttacctgcactggccaatgatcacgtgatctccttccttaacacggaagcacggtgaaatgtgagcaggaatattggagtgcctcttctcgtacctgcatcagcatcaataaaattaattttatgaacaaacagcccaatgaggcattatagaactgatacccagcaaccaggttaacttgcctctggtacttcttgacaaagtgcagataattcctccgaacaataatggtcctgttcatcttagcactatgacatgttccagctatgatacgacccctaattgatacagtaccagtgaatgggcatttcttgtcaatgtaggttcctgcaagaagtagcaaactgaggatatgcagaaacctaagtagttttaacagaggaactctagaaccaggcatctaaagatatcttccaggactagtaaaatgtcaataggaaacaataataggagtaaagatgatctcataagtcgtaactacacaataaatggaaattaccaatactctttagttttagtgaatgctaagcttcaagcctggcaaggtgaaagcatttgggcagctactacaaatgttttaagaaacaatcattcatgcttgtctaccaatgagcacaacaactataaatctgtcttcttaactacaatagaggcaaattggtctacaactagagcacacaggttaagacataagaacaagaaaactgcactgggaactaagatttattgccttaatttgaaaagagattggcatattactgagcgatcatcaaccagggtggaagacaaattcagagagcaggcaaaccatgctgctcctgttcaattggaaatgtgtacagatagaaacagtagaattcagtgttgaaatctaacgcgcaataactatatcaacctggacaaaccatacaagcaaaagatatgtttagttgtttacaagccaagaattaacaggaacataatcagaccttcgatggcttccctgggtgtcttgaacccaaggccaatgttcttccagaacctattcccgcccttgccaggcttcttccccttggtggttttcttaggactggattccataacagatcatgagccacgtaccacaaatacaaagaaacagacgcacaaaaattatgaataaagaacttgctcttaccagagaaaaaccttaggctgcttcaagaatgccctctcagtctgcaaaaacaaatgagcaaagacgtttaatttctgttaaacctacagcaactaataacataatagtccatctaccaatccatctatacagcgatcaaaattaccaccagaaggtaacaaattctagagcttaaacaactgatacaatctgtataatccacctagccatttcgcgctagcatgccattagagactgcggcattccaacagctatgcaccaaaatcacaacgctacgcagaaaaaaaaaatcaccaaccggactgcacccgcacgcactagatcacctactaccacaacgccgctaacgaaacgagatcttaaacacgcatgcaagagaaaaacaaacaggtcacaattgatagttgatacgagcaactcgggaagggttctcacctgctccgccatgatcgccgcgcgaggaagagacgcactggcgcgagacggcggcggcacgggaggagcagcagcggagaagaagaaattcccgaggctttagaaccctagccttcccctggttaaatccgttcactcattacacggtggcgtgaggcgtccaagcagagtgggccgagatgggcctgaaacatctcggtgcagggcctcatgctaacatgggccgcaacttgagttggaaataaataagttcactctaggtccctcattgacatcaagtttgaattaggtcgttaaactaaaccgctaccagatgtaatgcatccctcaacttgtaaaacaggtgtactcgagatcctatgacagtatattgtctgattttagttaacgtgacgagttaattgggatcgatctgggttccatgctgactcagtcggggtgacagtagtcaacttgtcacgttggccaaaatcggcactatactactctggaacatcgagtatacaattttctacaaagatgagagatccaaagtaaacttatttcagttcgaaatgcatcgcattgctggttggcccataactcttaccggcctactactatatttgatgtggactcggttctgcacagcaggaacgtcggaataagttcccttgtgacccttataagtgtcgaaatttaatccgtgaccataaactacaaaaccggatatctcgactcataaaacagatatgcttgtctaccaatgggacataaagatctggcaagacgacagctattggcctaccgctgcgtgtagatggccgcagggtccaacgaagtagcagagcaagcttggaattgagaagaaaacatccctgcggtccagcaaaggcgatgtcgcaggcttgctcgccgcggatcctgcttggtgcggcttggtcggatcaccgatggcggctgttgcttgccaccgcctggctagcgcaccgatgctgccgccgctttgaccctcgccgcccgtcgcgggagaaaaagagagagcggcgaggaagagaaggaactggaggaaggagagagagaagggacacgtgagtctcacaatttcttttgcgtgtcaatgataaatcggtcccacacatatttttaattctaaacgccacctaaacgccatgtcaatcccacgtgtaaaggagacccggtcaataccgctacgtaggcgtcacgtcagcaaaaccgtcaagggagttaaattgcaccggtcttaagagtttagaggtcgagatattcagttttgtagtttaggctcacggattagatttcgatcatttttaagggtcactaagtgaacttattccccgtaacgtccccggagtggggtggtggcccaagcctgtagtatgttttgtcgtactgtagcatctaacacaactacacaagggacaaacaggtttaaaaaaagaaaaaaatatgaaaacaccaggacaaacatcaccagctgcgtctttattgctcttggaattgtctcatcttttgcatcacgaaccgttgcatcaccagctccgtggcagggggatagtctagacatgacatcgtagtagtctggtttgctctgagaagtgagaacgcattttcgcgtccggtgccggtggaaacgaatttaattcctcggcgcacacgaagaaaaaagctacactccagcacgccagaggcagtagcaacaagccaacaaccggacaataaccggtgcgcggtggagcctacggatcgacgacgacgggtgcgggagcggtgtcggaatcggcgagattccaagaaagcgaggttgggcatgggatcttgcttttgcggctctcaatctcaccggtgtttctgcgtgtctgccttttttttaagctaaaacttattttaagaatgatttttttcagcgccaaatcgtatagtgctgaatttaaacatatcagcgctaaattgcacgacgctaaatacacgtcagcacaccgactcatcctcctatctgcggtggcacggcattcagcgtcagttgacgtgggatttggcgctgaacaaaaggatcatttctgaaataagtttgggccactgtttatttgtaaggccccgtttagtttcccaaatttttttcccaaaaacatcacatcgaatctttgaacacatgtatgaagcactaaatatagataaataaaaaaaactaattgcacagttaagaaggaaatcacgagacgaatcttttaagtctaattagtccatgaaattagtctagtggtttttaggcgagttatgaaattagtttttttattcgtgttcaaaaaacccttctaacatccggtcaaacatccgatgtgatatcaaaaaattttcttttcacgaactaaacgtaccctaaatttagttcttgtaaagggtcattgtcaaaatctgtgtgtctgccgcgttgcacttccaaaagggcagaaaggcgagagagaagtcagagaacttgggacaggtgggcgagaccgagacctgccgctgctggcacccgtggccccgtgtgggcaatggaaaggcaggcagacagcgcagcgtaggcacgcatgcgcgcgcgtgccggatcgccatcgatcgatcggaagaagcgaagctttctcgctcggcgccgcccagggagtttgttcaccgacagcatcatgtatgcgccacaatagcggaggacggcggcgccctgcctggcggagaggcccggccgggcgtggttctatgggtgcgtgctcttggtagtggcctgcctggcctgcacttcacactgtacgtttgatttttggttcccttgcgaggtggcaaaagataggtccagcttgttcaggtcgttctcgttcgtttgaaggatcacacaagccattaaggcatgagcttaaacattgaccgatatttttgttggagtatgacaaatagtcaaacatcacgttagaagccaatagcatcatatattgaaaaatgaaggaagtacaaaattgtttagagagtgtgctctataatagttgagatgataaaggctcccatcggatggcctaatcagccaaaaaaaaagctaaaatttgaattttcaagcttaattttgagattgattttgagatattttcaacatagtttctttttcaacattggctttcaagtcaccaagaacacatttataaaaattttacctacaaattcatttttattttctaataagccgttttgacttattaggaaataagccaaacgatggggactaaaggatctaattattaatagaaaatattttttattactgttgctttatttttctcctatcattatgcaaccaagtttacattttataaaatttaagagttgttgttttttttgataatggaatataatatcccggtctttgctcaaaaagaactacaaccaattattacaaagatccactccagaagagagtgtagttcaagacaagttgaacacaccaaacaagagaagagaggacctaaactgagaaaagcaaaataaaatgtggagctagaaggcctcgtcaaggcctaagactgaagttcgaagccaatgcatagaccaatgacaatatccttgcacgaaaaggtttctccaaagcggtgcccccaaggaggatgcgacgtggatcgccgccaccgctcgttcggaaccgaagcaaggttttcacccagagaatatggtagggaaaggaaaggggtatgctaaaacaacacctccaagaagtggaacgacgccaaacggcgtcgccgttgtcagccagccaaatagctcggcaaggctttcgcccgcgattccctgtccaaacccacaccaccaatccgcacaagaaggatcatcttcggtcaacaacattgtcctttcagcgattcggccaaggccaccgcccacagttgttcccgccgtccacggcgcgcccgcacccgaactcctccttccccgctgccagacccctttcccgccttcacataccgccgccgccgacgacgcaccatcagccggatgatggccttcaaccatcgccgccataggtaccattgtcgacagccaccaccgccactgccacagccaccaccgtcgccagccaccaccgtcagccaccatcgccaccgccaccgccaccgccacggacatccccgtccagccaccaccgtccagccgccaccgtcagctaccaccgtcgctagccagcgccgccagacgccagctgtccagatccggccggggtggcacggattagaggtgtagcgcgaagcacgggtcgccggcatcatggaggaaggcgtcacgggcacggcgttcacagcaggaacattgacgagggcgccgcgcctccctcgtggtggcgaggttcttgacgagggccggcgtcgcggcacgcaccgcagtccgccgtcgtcgtcgccaacttcgtcgccgccacatccgccaccatcgccgctgctagccacctccctgccaggtccgcggagcagcgccggcgacgaccgagcccatcgccgatcaccccggccaagcggggagaccagatctggtgacgccgtcgcccgtcgctggagccgcggagaaccgacaccgtagcgccccaccgccgtgcccaactccgcgccatcgccgcgccgtccccgtcgccacgatctcgccgtcccgccgccatcgtcgccacgcccgcgccagagcgaggtggagccgaggaggatggccccgccgccgccatcccaacgcgtcgcccggctttgccggcgacgagctccggcggcggcgaagcatggaggagggaggaggaggggcggcagcggcggctagggtttcggcccctagggtggcacaatttgatggtaatctgaatctctctccaaacaaatagtagaaaataaaagaaaaagaagttgttgttgagttgttgttaaccagagcaatgcccctactctctctcccttctacccagcaaactattggctcctctcaatatcgcacgaagggggcaacaacagttttctgccaaaaaagaaaaacttaaaagttagtgttggttaaagaaaaaaaagggttacatcgatcacgtgatttattatatgttgaaattataggcatataatgatttaatctattccataaataaatcatgacattacagatgaaaactagcatgaacgcatcattagatctacacatgtaaactacacagtataacatgaacagatcaaatatgcgcaacatattgaacacgtaccgaggtggtggaaagaccggctgctcggtcgaaacttttcgcaggcgtctacgaaggcacgcaccacgcgagcgaagaggaagacgagccgtcgcggacgaacagggagcagtcgcgcaaaacgcttcccaaaaaccttattgtcgccttctcccggtgcaggacgtcgaaggcagaggttccggagacctgctctcccgatcgcaggtgcacgccagcgagcgggatggagtaatctacgagcgacggcgcagcacagagtaggaggcaaaccctagattgatttcgcatgtgttgcgtgaagacggcgggtcggtttatatagagaagggtcgcttgatcagggcgcccacacgatctccactgcgcgtaaccgaaccggataagtcacgcgtaacttatccggactccacgccgtttgcacgcatcggatttttcggaacgtttccacgcgcgccgcctgccctgccctgccctgctaggccaggccaggcgagcgagcgcgcgcgtgtgttccccatcttctctccaccacacatgcttcaagtggctaggagggcatcctcccttttaaggaggtccccatctcgtagaataagtaaggtggtactaaactccacatgcatgccatcccatgaggtgggcttttgtgattttccaaagaattaatcttcgagtgggctaaggcccattcattaattccaacaatcccccaccaaatctcaaaatcccactgagatttgccttttccaatgtactgtttatataccagcggttcgatggagaccgattaaggttgaacatccacctagaactccaagctacacttcttactcacaacttgaacaatggactatgccttgaattgcatgtcttgtgcaagcaagtttcactcagagtcttatctggtactagaccgtctgtagactacccctcgggtggagcgtataagtcatactcctaggtctatagtaagcttcctagaagattcacccaaaatctccatagactgcgaccaacagtcaagctcacaaaggtgagttctttcaagaatgctctgcaggacaacatcttcgctaattaaagccaacagaactcattaaggcatagccaacctgccttgcagctcacgagagtacatgcatcttcacttagagagggtatagattggtactctcctctagtttactaatgatttgttcttcccagattctaattcacgggatctccgatcacatagactgggttaccaccatagtataactcacatgggtctcaaacccatctccttcgatgcattgtctatcacatttcgtgatagtccctttgtgaagggatctgccaggtttctagctgttgggatgtaatccaacattataactctggagtttcttaatttcacatgtctagacaatttcatattatccttagaactattcactttgacaattaccgtttgattgtcacagttcataaggatagccggcaccggtttttcaacaataggcagatccattaatagatcacgcagccattctgcctctacagtagcagtatccagtgccgtcagctctgcttccatagttgacctcgtcaaaatggtctgtttgcaagacctccatgaaacagcaccaccacccagtgtgaagacatatccactagtggctttgatctcatccacatcagagatccagttagaatcactataaccctccagtaccgcaggatacccagtatagtgaagccccaattccacagtatctttcagatagcgcattactcgctcaagcgcacgccagtgatcatctcccggattagaggtaaatcggctcaacttgctcacagcaaaggagatatcaggcctagttgcactagccaggtacatcaacgagccaatgatttgggagtattccagttgattcctagcaatttttcttgttcttgcgaagcaacaagctaggatcataagttgttggagaaggcttactatcaatgtagccaaagcgattcaagatcttctccacataatgggactgcaagagtgtaatcccattctcacctctaattagcttaatgtttaagataacatcagctactcccaaatccttcatatcaaaattttgagacaagaatgatttaacctcatttatcacctcaaggtttgccccaaatatcagtatgtcattaacatacaagcataaaataactccctcacccccaccatggcgatagtacacacatttatctgcctcattgactgcgaagcctgcagatgtcaatgttttgtcaaatttctcatgccattgcttaggagattgtttcagaccatacaaagacttcaacaatttgcacaccttgcctttttgaccttcaactacaaacccatcaggttgatccatatagatctcctcatccagctctccattaagaaaagctgtcttaacgtccatttgatgaacgagaagaccatgtgaggctgctagggaaagtagcacacgaattgtggtcaatctagcaacaggtgagtaagtgtcaaagaaatcttcgccttgtttctgagtatagcccttagcaacaagccgagccttgtacttttcaatagtactatcaggcctaagcttctttttgaacacccacttgcatcccacaggtttacacccatagggtcgctctgtcacctcccaagtcccgttagcgataatagaatccatttcactacggacagcctacttccagtagtctgcatcaggagatgcatatgcttctgaaattgacttaggagtgtcatccacgaggtacacagtgaaatcatcaccaaaagacttagctgtcctttgtctcttactccttcgaggagcttcactgtcatcctcctcagtgacatgttcatgtgtatgttcaatttgttctggtggtgtgattgaactgggaattatttcagatggttggctcgaactactatgtgtatccttcattgggaaaaagctctcaaagaaggtagcatcacgagactccataattgtaccaacatgcatgtcaggtacctcagatttaactattaaaaatctataggcaatgctgtgataagcatatcccagaaagacacagtccacagtcttaggtccaactttgcgcttcttcgttttggtacattgactttcgccaagcacccccatgtgcgcaagtaagaaagtgatggttttctcccaatccatatctcatatggtgttttgtccttatttctattaggaactctgtttaacacatgattcgaggtcaacaatgcctccccccaccatgccttaggtagtcccgcagtgtccaacatggcattcaccaagtcagtcagtgtgcggttcttcctttcagcaatcccattagactcgggagaatagggaggcgtcctctcatgtatgatgccatgttcctcacagaataagtcaaactcgtttgagaaaaactctccaccacgatcagacctaagtctttttatctttctatcaagttgattttcaacttctgccttataaattttaaaatagtctagagctttgtctttcgttttcaacaagtacacatagtaaaatctagtagcatcatcaatcaaagtcatgaaatatcgttttccaccctttgtcaacaccctattcatttcacaaagatctgaatgtaggagttctagtggtgccaagtttctttcctcggcagcattgtgaggcttgcgaggttgcttcgattgcacacaactatggcacttagaacctttgacaatggaaaacttaggaattaaacgcatgctggaaagccgagacatcaagccaaaattaatatgacataaacgtgagtgccaaacattagcctcatcatccacactgccacaaatatggttcacagacttattgcagaaatcagaaagggaaaagcggaacaggcctccgcactcataacctttaccaataaaatatccatgtttagaaacgactactttattagactcaaaaaccaacttaaatccgtctctagttagacgggagccactaacaagattcctgtcgatagaagggacatgctgcacgttcttcagctgcacgatctttcccgaagtaaacttcagatctaccgtgccaacaccatgaacagaagcatgtgacccattccccattaggacggtggaaccccgtgcgtcctgataagaataaaacaataagatgtcagcacaaacatgtacattggccccagtatcaacccaccaattagtagactgattaactgaaaaaacagtaggtaaattaccatacccgcttccatcttcagtgttgccaatggtcacattagcagacttagaagtctgccctgcaggtgccttcatccccttgcgctgtggacacttcctagctagatgaccaagttggccacacacaaagcaagtcctctcatcctgattaggattgttgttgttcttcttctgcttcttgaagttggtggtttgctgagctttgtatttccctttactcttgttctaggccttgtgcacaacattggcactggactgtccaccatcgcccttagacgcgacatctttttcccgagctttctcctcaacatcaggagatgctatcaacccctcaacggagtattcctgtctcttgtgtttgagtgcagtaccgaaacttctccaagatggaggtagtttcgcaataatgcacccggccacaaatttgtcgggtaagacacacttaaggagttcgagttccttagccatggtttgtatctcatgagcctgttcgactacagaacggttgtcagccatcttgtagtgatgaaactgctccatgatatacagatcattgctagcatcagtagcaccgaatttagtattcagtgcatcccacaactccttagcgtcggtcatatgcatatacacctcgaccagacgatcgccaagaacgctaagaatgcatcccacaaagatagtagtggcttcctcgaattgcttctgctgttcagcagtaagaactccttcaggtttgccagtactcacccagaagcatttcatagctgtcagccacagagtgaccctgatctgccatctcttaaaatgcacaccggtgaatttatccggcctcagtgcatcggcaaaaccagccatagtaaaatcacagtgcctataataagatttttggattgttgagattataggcatataatgatttaatctattccataaataaatcatgacattacagatgaaaactagcatgaacgcatcattaaatctacacatgtaaactacacagtataacatgaacagatcaaatatgcgcaacatattgaacacgtacctaggtggcggaaagaccggctgctcggtcgaaacttttcgcaggcgtctacgaaggcacgcagcacgcgagcgaagaggaagacgagctgtcgcgaacgaatagggagcagtcgcgcaaagcgcttcccaaaaaccttattgccgccttctcccggtgcaggacgtcgaaggcagaggttccggagtcctactctcccgatcgcaggtgcacgccagcgagcgggatagagtaatctatgagcgacagcgcagcacagagtaagaggcaaaccctagattgatttcacgtgtgttgcgtgaagacggcgggtcggtttatatagagaagggtcgcttgatcagggcgcccacacgatctccactgcgcgtaaccgaactgaataagtcgcgcgtaacttatccggactccacgccgtttgcacgcaccggattttttgaaacgtttccaaaacaaaaacgaatccgaatttgcagcaaaacaaaactgcaaaaggaggctgcatagaaccaattttggcggaccattcgacgcgtacatcgtgcacgcgcgccgcctgccctgcccaggcgaggcgagcgcgcgcgtgtgttccccctcttctctccaccacacatgcttcaagtggctatgagagcatcctcccttttaaggatgtccccctctcctagaataagtaaggtggtactaaactccacatgcatgccatcctatgaggtgagcttttgtgattttccaaagaattaatcttcgagtgggctaaggcccattcattaattccaacattatatacataccctgttttatcctcagttgcacaaaatatatttaagcagagacaaaccagtacagataaacagatatacatcgaaaatgatataacaaacaattatcagacaaagaaaatcgtttaggtgttttaattaaataagggtggctgagatgatagtagaatgtttaataggcgatggttaaaagaatagatagtactccactttaagggcatgttcactttgattccattttcaaacttaccaaattttggaaaagttgccaaaaaaaatagttacatttagtttgctgccaaattttagtaactatataagaaatcatgccaaaaatttaaagttgccaaaattttagtataattgccaaaattttggtaatgccaaattttggtaaggttttttttgacatcaaagtgaacaggccctaaaagtacacttgtcgtgggactaaggaagtattatttaataggtgttgaactcttcccgataaatagactcgatgggttcttttctacttctatttcttttcaacttcgacacacttgattttcaaacacacgctttctaaactatcaaacgacgccttttaaaaaatatagaaaacttgttttttttaaaaaaacatattaattcatttttaagttttagtcaatgcttaattaatcactctattttgcatgtagggaggtgaagttctcaacctctacctccgaacacaaccagtgtattagttttgagagctttttatagtttcaattatttaagaatctgcaactcctcaatcatccaaggttttgtttaggaaagtttaagattttagacgtagttatgatcgagaagaaactagcggtgttcaagttcattttcctaaattatacaactataatttcttagattttaggtgaaaatataaagtatttacgagagctgaagattctgggagaagctaatactatcaaaaactcccaaccacagtttacaagtttcttccacaatctacgacttctccaaacatatcatattttcacccagtcttgagatttgtagtatataatatagaaaataaactagaatcagaaggtgtaaaactaaaaattttcagatacttcttagctacttgatttttcaccagcagttccatatagaggcgcctaaaaattgaaatcatcaaccccatgtttcttactctcacataagttgggtgtggctcgtcgtttccaatccgtccatccgagagtgttggcatggacacccacagcccacaggggcaaacggagaggacggagcaaacaacgtccccatcgtttggcttatttcctaataagccaaaacggcttattaggaaataaaaatgaatttgtaggtaaaacttttataaatgtgttcttggtaacttgaaagccaatgttgaaaaagaaactacgtttgtcgaggggtgaccctctctagcgggaggctgtgaggcccccctttgagagttcggccgggggcagcgggtgagattcgaggatttggtgagcgaaactgtgtgtgatcttgatctcggaggctcctctaagacgataaaacaaaagaggtttatataggttcgggccgctatgaagcgtaataccctactcctgtgtgtatgattcttctgtgcttagaaagtccctaaatccctggtatgcaagctagggttagacaagctttggctcagggatcctcagtcccatcccccctcctcgctaggcatggtcctccttttatactctaaggagataccacatgtgttgcgagtgctacctagggagaaggaaaaatattatctatattaattacatgtcttatgccttagcccagaagctatctgcacgtcggttgcttcgcggggcccatcaaatcatgcagggtgcccttgtcattctccatttaatgaatgaggacttccgggttctcgttcacaccagaaaacgggaacccgggtcagttcagagtggttggaccagctctgaccgaggtaagaggctgtgaagccccttatcattatgatgggacgggacggagcacgctgctcgccgcctgacacagggggcgcccaagtcattcaccatttaatgggtgaagacttctgggctcctattacaccgagaaacgggagcctagctttgaccagagcgggaggaccgactccggctgggataagaggatgagaacctctcaccatcactatttgatgggacatgtcaggctgcacgccgcctgacacacgagcagcgcataggcgcactagccagtcccatcggtcattcgaccggtcacagaccggttgagtacactgcacgccgcatgcggcgtggcgcgaccgctcgggtcgtcataaatgcgggtaggtgggcacctgtaggcggacacctaacccaccgtacgtggtgacctagagagggggtcgggggagcccgacccctagtcacgggagggggccatcgctgcccgacctcgggcccgatcccccctcgggggagggccacgtggcgcttggggcagccttctccatctagtctcagccagggagtggccgccaccccaccttaggcctgactccccttgggggagggccacatggcattggggggcagcctcctccgactagtctttgggaaggagtggccgccaccccacctcgggcctgacttcccttaggggagggccacgtagcattggggggtagcctcctccgactagtctttgggaaggagtggccactaccccacctcgggcctgactccccttgggggagggccacgtggcattggggggcagcctccccgactaaacatgatacccccgggcctatatcaccaacaacgttgaaaatatctcaaaatcaatctcaaaattaagcttgaaaattcaaaatttgactttttctttagctgattaggccaaccgatggaagccaacgattttattggttgggggtggacctttcttttattattgggatgtcaaatatttagctggagataaaaatatattcacaccacaaatccgattatagttctatgaaaatataatttctgtatgaatttttgggcttacgctggggacgctccgacacactaggagagattgcgattgatccgtgtgctccgcatcagcaaatgtccttcgcatgcgtaagagtgtaagtggatcagccgcgaacccacttataaatcagcataagcggatttgcggcttattttagtctataagtgggtttcgcgggttagccacttacaccccggcatgcgtgtacccagcagtagcacattcccagcgtttgccggccacacgtcgaccggcgccgcgcgccagcccaactgccgctcgctcaccatccgctgtcatgtgtggatgtgccagcctgattgatcggaaattcggattgcatctcgtacgtggcccggtcgccatgatcatcgatcagactagtacactatactacttctgtctatatacatatatacatagtttcagaatgtgtcatatcccttcaaaatcgtttatattataagatggatgaagtagtatttagacgataatatccttccccaaatcattggccatacatgcaagttggcgtctattaattcctctgcctctgaccggccaaccttctcaaaccacatatacacgcgcgtgtaccgtgtgcgatcgggacatcgttcgggccgatcggttgctcggatgatcagctgggacgacgacgattttggctgttcaaatctgaaaaaagagcggcttttgagccctccaaacgccggctgattgattgacagatcgattcagcgtatgcggccacggaaggagacgatgatcgccgcgctagaggccgagatctgcaacaagccaacacgctgagtataactggagtagtagccaacaactgcaaaggatgtcgccaactgcgtacttgcaactactgtaattgattagttagtcatgcgcatagtatcttagcccataaacggagcaaaaggccggttaatctgctgcatcttgccctcttccttgccagctgccagctgccagctgcgagctgcgagggccagccggaaagcgatcgacgcgacagcgattctgtgtgtttttccgtgggagagacggccaacgacgacgcgacgtcagtcatcggctccccaggctttggagcttcacttttttgcgacggaacagaacacatcacacatgtttatgtttctggcgctgatactactttaaagagagaagaacaaaaggagtttcggaggagtgtccgagcaaaggcaggcatagagctgataggtctattggttctactgttctacacgcggatcaggatcccttgcagtaactgtaacttaaacagtttatatgtgcatcataacatgatctagaatggaaggccagcacatgaagcggtatcataacaaaaatactgtagcagaaatgcactgtacaatagtatgttcatactatagcggtcctctagagctgttagatccgaaaacaaatggtcaagattatgtacagttacagtaacaaatgtatttgatttcaatcctctacatgtttagctgggatttacttttttatagaccgcgggatctcagcaggacaatattttcgataggtttggactaaattttgcttgaatttactgatttaaatttgaatcatcaaaaaccattcaaaaactgccttgcaattgaattttgtcccacgttgaaaccttaaaattacgaaacgcagaggggggataatggtcaggtctatcaaagcaaccataatcagtaatcgcactcataaattacaatcttatactcagtgcccgaaatgaatagcaggtgcgctgaacttttcactacttcataatcagcagtcgatctggttcccgatctctaccctataattttccggttctataatgtcacatcctaattttcgttccaggatttataaattatctaataaattaataatagaatttatattaaatgttctttaattttcaagtgaagttaaatgtgggaaataaaattttctaaatttaaagcatggttggatttaatttttattaaattctccatgattaattatactctctgaaattttctctgattttttttttcagagctcaattccttaatgatacaaagaacagtttagtaattagtaatcaattaatgatctaattataattatgttaagtgcttttcttgtttaaaaatccttaatttataaattgttgcctaaaagggaattattagaaatgatcttaaaagcctagaagagaatatctaattttaatttgttaaatctcaatataaaagtgggctagataaaattttgttaaatacttctcttgtttctatagttcctagatttttctgggatttatttgagccaaggaagtatttttaataaatggaattgcatttcatgaataatttaaagggaaaaaggtttttaaaagtcttcttttggccccaaaaccgctctctctctccctcggcccaagtcggcccaagtcgagccgcccgcgcgcgcgcgtgcgaccgccgctgacaggtgggtcccacctgtcagtcttcgtcttcctcgcgccgctgccgtcgcccgagccctagcgccgcgccgccgtcgtctccttccaaatccagccgcccctttccgtttccggtgaaattaatagaggggaaatgatcttctcgatctcctctaccttttccttttggaatcgatcgccaattcagttggaaatccatggattcgagttcgattcggatcgatctctctcctccgaaccctaaaccttcctttccgtcgccggtcaccgtgggccttcgccgccgcctccttgcccctataaaaggacccccgagcttccctctacccgtcgccacccttgccttcgtctctcgtcgtccgtagcgccctagccccgtgagacctcgtgccgctgtcgtcgcagccgctccagccgtgtgccgccgtcgctccagtcgtcgccatcgctcggggaggtcgccatcgtggtcgccgtcgcgtcgccgccctcgtccacccctccgtcgttgctgtagatcgccggagcaccgccgtcgtcatcaagccgatcttctccgccgccttttcctcgacgccgtcgccgtccgttgatcttccgccgccgttttggtcaccggtgagttcgccgcgtcgctctctacgtgctggtgccctccgttcgtgccgtcgcgccgtcgttcgccggcgagcttgcacgctcgagccgccgccggtggtgacgtcaccgctgacgtcatcgtcgtcgtccatccgtgagccgcggtggatccgatggatcttggccgtccgttttggatggatcaatctcggccgttcgtttccgtgagccgtcgccgtgcacccggtccaccgtgaaccctagccgctgacgcaataattcctttttccttttcaaaaataattcattattgcgtcataattcaattaatacccatataagtattttaatccgatttaatctttaaaaattcataactaattcatcttagctcggatttagttggttcaagtctctaaatttttctaaaattgagatctacatgttaaaaatatccacatgtactgtttatgcttgtttttgtactgtttatttggtttttattagtctttttcttcgttttgcgtgttagcttgtcgtttccgtcgttgcgaaggttcgtgagtgcgccggaagtattcaagaagattaattgaagaccgattattgcaaggcaagtcacacagatcctaaacacaatcctttgagcatgttgatcctatatttaaattctctatttatttcaactgtgcatttattttcgaatgtcactgggtggtgtgaatctattcctttgttatggcctgtttgcattgattcctttattccttgataccttgggttattataacttgactagttgagctttatatattggttcaggtagatattagatatgattgcttagccatgcttagaaacattagcacactattgggataacttatgactcactattatttaatgatggcttaatgatagttcacgatggtcaatcgtgattggttaattaattacttgccaactaaaacttgataatggtgggttgtgagcacatggttttgagagtcgtgctcatggcaattaaggaccggttcgcgagctactgttgtgaaacattaaccgtgccaaccacaagccagcgtgggcaacggctttaccttttgtataatatggttcattgcggagcaccagactgagaagtggcggagataagcccacgggggtcgctggggagtccatgccttgttttataagggggtgattatgatccaggaatggtgcactgtggtgagttgtgttgtgcagagggtattgtcacagcctctattcgggtactttccagtatcgcgacacatggtagacatgatgttgaggctgtgtcttgtgggtacagcggtacacctctggccagagtaaaactattcgaatagccgtgcccgcggttatgggcgggttgagcaatgttttttgtgattagtctcacacctctcacaataattattgatgttatacctggtaataatttgtttagctcctggtttggagttagatctgtacagctgggtatggttgttcaggatggttgggcctgtgcagcatgggtgtgctgttcagtgttgattaaaatttctgattaattactccactgttttacttctcttaaatgttttgctaaatgctgcttttgcaaatgagcctatattatgccatcctttggtatccttgtgcacttgcatatttgctgtgtggcttgttgagtatgtcatatgctcattcttgcaataatcaatcaacctcagttgaagaaaaaggatccagaaggagaagacgtttggcttatacccctgttgagctgcctgtgggagtggagctgaagccatcgctagaccgttattccgctgctgttttcttttcttttgtaagtgtgtaacgttattattatgatggatttgtatattaaattgtcagtttgtgtacctcggctgattcctggacgaggattttatgcacaaataagttcggaaattattagtgaatttccgggcgtgacatataataacattttagaaaataacacggacttcaaaatatatttttgattttattttttattataatatatataataaataaatacttgtttacttttattttagtaacttaaaagacatatatagatctatatatgttgtttgatgttgttatagttcttttaaataaaattattttgaagttattgatagtcagaaaaagtttgccctcactttattcaagacgtaaagaattataaaaccggagtaagtagctatttttttttcttttgggaaatatcacatccagatatgtatggccaatatacataactgtggttcctgtcttaaaaaaaaaactgtggttccttatcatgtggaccataaattattgtaccttaattaacggcggataattaagatgcgcgatggagtcctatataatatctgcgacgatgattgattattataaggccatgcgagtgtcagtgtctcatcgagtccgtttacctgtattgttaacatctcttttattatagtcaaaccctaaaacagtttttacataaagaggtactcccttcattccaaattaatctatatatagttttttttatggtatttctaaataatctacatatttatgttcattcattaagtctattcgttatttatgcattagagtaaatagaaattgatgcatgcatccttgcacacaagtatttataacccatatgcaatatcttgatttgctattggctaggaaatagtggggatggtgcatgcattgagtttgttgctagagtaaatatagtatgagagagttattagcttttcttggtcttagtgtgcctgtgaaatatataaatcaatttgaaatgaagggagtatgcctgtgaaatatataaatcaatttggaatgaagggagtacgtaacaacacatgagttgtacccctggacaccatggtaataatagagtgttctaatgaaacactgttaatataattattcctccatgtggagcacatagatgtactagacgattaactaatggataaatgtccttatcaattatcacagaggagcacgcggcatcatattgtttatgaaaattctgatcttcctttcgtgtttaaggaaagcatattctgtaaagagaattttgatcttttccacggcgcttgacgtacgtagttaaaatgaaaaccataaccataaccattgtcatgatatatatagtgagtttagatactaaactccgttgttaaatattatataatgctatttttttttggaaaaacatataatgtcactgacttttacacaatacatttcaccattagtcttatttttttttaaaaaaaatataataactatttactttgatgtgacttgttttattatctactccctccgtcccaaaatataataagttttagctcttaggatttgttccaaaatataacaacttctccaccaacattctcttcccaaccaatcacaatcctccaccattcacttttcgtacctaccgccactacccatccaattacaaccctccaccactcacttctatatactttcttaataaccgtgtctaactctaaaacttcttatattctgggacggagggagtaagctactttatgcatggcttatcttatattattttcatgtgtacactaagttttaaatagtagaatttgctaaacgccacgtaaaaaaattcaatatcataccttttcaaaatggagagagtaatagcatggagtatgactgtatatgtttaactatatataacgtatctagaaaaaaaagcaaaggataaaaactctaccgcggataaaatcaaatatactttgagggagtaataaaatggagtaattgcaggctctccgtttatgtctgtctgcaattattatccaatatcccaactattctttctgtcacaaaataaatacagttttgtattgttcatatttaacgtttgatcgtttgttttatttgaaattattttatgactaatatttttattattattagatgataaaacataatagtaatttatgtgtgactaattttttaaaattttttcatacacttttttaaataagacggacggtcaatgttggacatggatactcatgtatttaacaatgatgagatttgtcggtgtactatgttgcatgtgcaatattgcagagatgaaatagtcatgtggttgattgtgatgttttggatctcataaaatcctgatgaaattaccacgaatatggtgacgtttatatctcagcactaaaacaataaaggagagtaagcagcaattcaataatgtataattattttgaaatttgcagtggaccggaggtcataggcacatctcaatacaaacatcctgataaaaatgccagcttacagatggataattggatatgttcttttagtaaattgcataagaccctgagtacacccccaagatgtataaaatcagagagattcttacatgtagcatataatcccaaatattatgatactattttgtacaataccacacaattgataaagtctactcaaatctgacatgtggtatgaaactcttagatgctctcacatatgggatgaaactattacatatatgctcacagagtatggtggatgaaagaactcacggaatctacatgtcagatttaggtatcgtttgtttggcttatggttttatggaacaccgcttctataatatttggagttatgtatcaggatccataatctctgagattttgtacaccttaaacgacgatacccatgattcaatgcaatttactttttgttttttactcccttcaggccttcattccaaagcaaaatataagcagccatgtacatagaaccgacaagagtcaattcattaaaatttccatagcaaccatgaaaataaattcttaaactccattgtcagtggaaattaaaaacagacatataaacgagcaacgagtagtaagtgaatactgtactctgtacacaggtacttatatcattagcgtgaccatattattcactctttctttgagctgatgactgggtttcgttattctctcaactttctcaatcattactttctcgtttttcatgtacagtgtattttgccaaaaaaaaagttctatagaaattatctctaccttttattataaaatttgaagatgtttccactgatactatggtacgtcgtccgtatttaagtcagcttttaagttcgttcgtttttaaaaatacaaaagtagtcgtataaaaattccttttaaaaatttcgcatgctaacttagaatgagaagacggattcctaatttatttagaattctcaccaggtcataagaaagcaaagtacaggatgtaaccatcatcctaataaggattctgaattagatatcaatactatcaaaataaaaatcccatatattttttaggaaaaaaaatctaacaataaaacgatttaaatagcttttacccgttacgcacggtcatcttttctatttttattaaaaaaatatatttaattaaatgtgtgctaataaatcatgtcgtttatgcgtacgtaagagattagttcccatcacatttagccgaacacagcacgaaattctatttcgatgggtgtaaagatgacaggaacatagccatgcgcatctctttcaggagcaagtagaaagaagaacaaaacgggattcctcgactgaactcatccacgatccatccaaattctcctcctcaaaaagagaacaaatttttgagtggcgccggctagtctgccaatatagaggccacaggccacagcaaccgaagcagccatcatttctgctccccaagtgagctctccctctcctaccaaaaagaaaaagaaaaaaaaatcctaaaggcagtgaaccaccggccacgtcggcagcagcttccccccattctcctcgtcgcgccaccgccgccgacggggaggcgccgcacgatatatacggtggcgcaagcggcggtgagctagctaggcgggcggaggagaggggggcgtggagggatggccggaggagggggagggggaggggg

SEQ ID NO: 6098 - DNA, 27355 bp, Oryza sativa
tgattacgctttctacgtccattgtacatccaactgcgatcctcttccatccttttttgctgcaaagaaatacaacgaaacaaaaactaagggttgattcatatattgaatttttgggaatgagaaagagagaaaaataaaaatggctactgctcacttacacagtgttctttcaggagaggccacaggctccagtgctccagatggcgatggtggccagcagcgtcgttgcggccgatgagggcgtcctgcggctgcgctccgcgcggaggctcccagcaggagaggggcctgcgactccgacgaaggaggctgacgaccgcgcaggccaagaaaacggggctgacggagggtctccgagaagaaaggtggctgcaatccggacggacggagaaggcagccgacggcgttgaagctggagaaagcagccggtcgcgttgcaggcaggcgccgcgcgcgggagaggaaagaggtgggcggcggcggaatcgattctagggttggctgtgagggagttcgcgcgaaaacaaaattggggaaagcgtgttcggctgatagaacaagctgcagtagagaaacatatggcggggggatttctgacattgtgggccactgtgtcatatttacctgcagtacagaaaaattacatatttctgtttctatcttaactagttctatttctatttcgttactattcattctaatcaactagtttgacttctacagtatttcattattatacattcccctgtgtataataattaatttgtgcctttgtaataatgattagataacatctatgatttatgagaacaactaaaaatgttttttatttgctaaaatatcatttgataagattctctaaatatatttattctaatcaactagtttagatatcatatcattgactaatttcgtttttgttatttagtacttatcaaaacccaaggttaacggtattgggatacgtcattatcgtacgatattatccgggtaaaacgacacgtgtcggttgtagtatcgttttcgggtggtatcgctctagtgtcgggatacgaagcatagaataattagaagcgcacaaaaatcagtatactgatagtttccatcgaaacaatattactatattttgtaggatcctacgagattttttttatttttgaacttatttctaaaatatgaaccttttaaccacgccaatctgcctggcgtcgcaaaacaacattgacacggcttacattgcgattgttacagttcaaaattttaaaaagttaaaaagaaaataaaataattcaattatacaattcaatactactttaggaaaaaaaaacaatactaactagaatctcgatactaacaactttatcaaaacccttttagatttttgcaactataactataataccgcggtgtcaaatttactctattgataacttgatcctcacattgaaaccctatggactctcctaatatttgtaactagcatggtggcccgcgcagattgcgtcgctagcatcattatattttctccgaatttcaactatttctaaattgtatttctatatggactctgtttttctttttctctaattaatatgagaatttctaggccgtgaaagcgaacgttaaggctcttttttctattccttaaataagttaatagatagatgttaaatccaaaatatagatatttataaattactttccactactttccacatttttctatactttctatagccacttggttaattgcaaattcaccgtgttcaatattcacacgtaaccatatttgtaaactatgatcaagtgtcgaattgaaaaccatgtcactgtgatttcagattgagccagtattgtgcagacaagtttgacatggtctcaacaccacatctggctatcaacattttccaaatcaatttacatctttctgagaatcaaattccatgcgcataacataatgaagttcataagcttcattaatactttccatcagcataggttcttccctacaaagtacttaagttaccaccactaaatgtgcatctcaccacagcgcacagcaccgttaggcatacacaaaatatacaacttcatcagctgataacgactacacaaaatatactacctcatcagctggtaccaattagtactgctcaacaaacctacagataattagtgggaacaaccaatgggtaccaacatgagcccatcacaacaaccaggacatacaccagaacaaacaggacttggcacagtcctacttcacagttacatcacaccaaaacacccacaagtttctggtatcacaaaagacttcccaatttctagttctttcggtgaagagcgattttcagatactgcacgcctaaagctgctgcctgctattactggcaccaacatccaggttaacttgcactgggatatttggctcatggaccagtcactcagtggtggtaactggatttccaatagagacttcagatccagatgtagcctgaattagcaatgtttgttagaaaacaaacaacaagtttgtattaatcatacaggacatgtctatcctgcaacattacactcaccggatgagtcaacgtaggtgtgcaaggaggcagaaagtttatgttgagctttctttgcagtacctgcaatttattcagacaatgttttaggttaaaattatcaccagttcaaggcactcacaattaattgattcagcagcaaacaatgcggacagttgtgtaaacaggatactaccagttacctccaaagcacatgtaaaatagcttgttttctcctggaacaactcgtgctcacgtacccgctccacacgtgcctgctctctctcctgctccatctccttgcgtgtccgctccatttcctcaagtgcccgctccctctcctcacgtgcccgctccctctcctgctccctctcctcgcgtgcccgctccctctcctgctccctctcctcacgctcacactgaagttgacgctcaagctcctcaatccgggcactatcatcagggtttggcctcagccgtctgctaggccgtggatcatcaagtgagcacctgcttctcccaacatcagcaagaacatctggtgtcttaaggagtccattaagcaggaagaagcgtccatgtttcttgccaccaccagccatgtgcacagccacaccatcaatgggttcagtccgccaattactgtcttctccgtgcctctcagtaaaagcgcgagcataggcctcctattacagattcaaatgaaaatggcagttaaccaaatggaatgtagacaatagagtagtacaacacaaatttcaatgtgtaaggcacttacgagcaacatattctgagatgaatcttcatcacagtagccctcgtctgggtctaccctattggcatgagcataagccttcaatacatgcactggtgtgcccattttcttctcctacattcaaaataaatagtttaacactattaataatgtgctgctgcaattcaatgaacaccgtacaattaaagtctaaagctatgcaggtcttggtattatgtctaagaaaaactaacgaaccaaattcttgtggtaacgatgaaggttagcactgccttggcgatgggctggcgttttcatctttgccctgcgttcgctacaagcacgggagtaagcctgccattctggattgcaccacctcaaatctgacaataatgcccacgcacgaccagcatttaggaaccaccatggcttagcctataacaaacaaacttgcgcttagtcactaatatgttcaaaagctaagcatctaataacattttcttgttcaagcgagcttactttcatatactccgcctttgtgagataagtcctgcaagcagttggccgatctatatctgttttcagaatcttcttgtgataagtaatcacagctaggatacgagcctcatagaatatatcaacaaagagtttcttgacgcagttgtgcacaactcttctagcctccacttctgtcccctctgcccacctatagaacccctgcaactaccaaaagttaaccaaacaatacatgatctatgtaacttgaaagaaactaagttggtaaagaaatacccagaattcttcctcaacgcgatggaggaggcttggcaagcgtgcttgattagcttttgcattatcaggtttaagcaagtaatgttccggagaccatgcaggctcatctctacccttgaatttcaccacaccagggaaattttcttttatcaatgtagtcaggataccattggggactctagtactctgaccataatcttgtacctcccattgcctgcacaaatcccaaccaaaagctagatattagcttcatacttgaaataacagcaatatatagcacaagcaacacacttacatatcccctattggcctaagcacaggtttatcctcctctcgtgtaggtcgtggtggcacccttgtagggccacaaaaccagaactcatcatcttcctgctcctcttcttgaacaggatcagtaggttgctgagaggaagatgaccttgtcctattcctagatgagatggcagcactagctgaaccatctgcagaactggaggcccctctagagcccgagcttaatcgtcgcatcctcctgcaaaacatttcagcatatttagagaacaaacaatttttgattgcacggctttaggaaaagcccaaacatagaccctttacacgaaaaggtcaaacaaatagaacaaacagatgctcggattgcaagctttctaacagcaggactacagatgtttccctccaccaaactcccaaaagtagacatctaactgaaacccaagcacataaccatcccgacaggatataacaatcatctcttgttacaagaagaaaggcaccaaaaacacatcctttaatagaacatcaggcaggacatccataggcaccaaaacaatctagaattgcaaggctaaataggaacagtatacaactgcaatacttcttcaacttcacaagtattggtaggtcagaattacttcagaaataacagcatgccatcacattaaaatcctaaagctaaaaagactgctagaggacacaagcattttagtctacgatctaaagcaaaacatgagattactgaagcaataatcaagagactatatttcttatttgataaatccagagaacaaagggattaatttctcctttcttatttcttcatcaaacatcaagagactatacaagctagccaacattcgacaatcacataccttgatgttgggcagattgcgtgcaggtgcggagagaagagggcggcgtgcaggtgcggcgagggaagggggcggcgcaggtgcggcgagggaagggggcggcgcaggtgcggcgaggaaggggcggcgcgcaggtgccgcgaggagggagagaaggagaagggcagcagtggcgaggtgtttgggactgtggcggcgtgggctgtgggagccggtggggttttagggttaggatttgttttcctttttcttttttttatccaatcgacatgtgggccatcactcacttcccgtgcgctgaatgaaaaaaaaacacgggaacaccccttctgtttcgcgccagcgaaaaattgggccgcgccaaacggagctaggcgcgcgccaaaagaaatccgttcgcgccaaagagaaaaatactactcgcgccaacagagtttgacgcgcacagacggaaagtaggtggattccggtgttcccgtgagtcatctctaacacacggtaagcgcttgatggttcccgagtttattgttctactcacggtaagttaccgtgtgttcagagaaacacccggtaatattcgcatgcacacgggagccttcccatctccagtagtgcgccattatcgcatgcatgcgccatgcaccacgcacaggatagagttaggttgtttcacagcccctcctgaaggaactgacagtgactttgtaaacccattagcaacttgatctcctgaaggaacaaaatcaatctctaaaagcttatgtgacactcgttctcttacaaaatgataatcaacctctatatgctttgtccttgcatgaaacacaggattagctgataaatatttggctcctaagttatcaccaaatcttgacagctttaggagactcaattcccaattctcttaacaaggtttgtacccacattaactcagctgtagtattcgccacagccttatattctgcctcagtgctcgaccttgacacagtggattgtttcctagcactccaggacacaagattagaccccacaaatatagcaaatcctcctgttgattttctgtcatctatactacctgcccagtctgcattagaatatccatgaacaagagtagacgcactcttatgtatattaagtcctagacttgtgcactgattcaagtatctgagaattctttttactcctgtccaatgacgggtagtaggagcatgaagaaactgacaaactttatttactgaataagctatgtcaggtctagtcaaggtcaagtattgtaaagcaccaactatacttctatattgtgttgcatcattaggtcccaagggtgatccttcatataaagttaatttttcactgacagagagaggagtactaactggcttgcagtttgacatattaactctttttaataaatcattagcatacttctcttgagtcaaaataataccattggaaactttagttacctcaattccaaggaagtaatgcaggtcacccaaatccttaagtgcaaactccttgtttaaatccttcagaagtgctgtagttgccttctctgtagaactagctacaattatatcatcaacataaaccaatacaaacataattatccctcctttgttaagaaagaataatgaagtatcggcctttgaagcttcaaaaccaagttcaacaagtttcttactcagcctggaataccatgcccttgttgcttgttttaaaccatacaatgctttatccaatttacatacataattaggtttagaggatgactcaaaaccaggaggttgttgcatatagacttcttcttgtaagaatccatgaagaaagacattttgaacatctagctgtctaagactccaacctctagaaatagcaatagacaggatgattctaatagtagcagctttaacaacagaactaaaggtatcctcatagtcaataccatatctttgtttaaagccctttgctacaagtctagctttgtatctgtcaagtgttccatctgcctttcttttaatcttatatacccatttacacccaataatattttgtcctttctcatacggaactaggtgccatgtattattttttatcaaagcatcatactcagcttgcattgcagctatccagtttttatctcctagagcctctctattattttgtggcctctctatcattttgtggttcacgagtagtgtggagattatggatatctcatatctacacggcgatgatatttggactgaatataggataccgaatatagatagaatatcttatttgtatctcgggtttgtttctcaacttgtacatcaaggaaataccttgagacttagtcggttacgactgtattttatctgtatctgcatattccgttagggatatagattatcttttgtaacacggactccttcccatatataaggggggtccgggtgcctctaggggcatgtgttgattttctccaaatcatacaatcaataagatactcggcggattcatccccggacaggagtagggtattacttcttgaataagaaggcctgaacctgtataaatcctttgtctccaaacccattcacttctccagcttgatagccacccccttttattattgccgaaatctagtttcgacagttggcgcgccaggtaggggggcgtcaagcttttcgccgatcagtgcaatgggttccgtctccggcatcgacgacctcgtcttcccacccgggcagacgtttcggttcggcagcctcgacttcgtcaccaacaacttcggcaagatctctctccttgactcggagtcagaccagtcgggagagaaccggatttcagtcccgtttggactcccaaacgcggctgaaagttacttcaagaccatctcaatcgagttggcttcaaaccactcgggcgagatcgcatcttctccaatgtcaccagatcaagatgatgaggcttacccaccgatcctgatgaagctccccgacgatttggcggccgtctccatcacgacagcgtctccatcccgtaggcctaggcggaagtcggcttcaacaccgatttcgcctagcttcagggaagtcggcgtcatcctccaaccactcggcacggtttcgacggatcagctggatggctactacagctctcccaccgtcgactcgcgtcccaccgacatcgtagagtacgacgagtttagctctcgctacaacgacccggatctcgacgacttcgacggaagcctagatgacaactacacccctctctacttcggcgtcttcatggccgataacgagacggaggagcaacgccaagcccgggaaaccgaagcacgtcgcgagactgagcgtcgccgactggaggaggagcgtcaagcacaagaacaagaacggctacggcgtgagcagcaggagcgtgagcgaaccgcgaaggaggctgaggaccgacggcagcgagccttggaagcagggcgccgagcgcgtgatttcaacggccaacaagatgttgaagggacaccggttttccgcacccctcaacagaatgcggttgccgcgatcaccctcctcgacaccctcctcaaggaaaacgagctcaatcaatctgatcacgtcgtcaacatcttgaaccagacaaagaccatgattgcggcttcggtcccagttaactccgaaagcgtccgcacgccgactggcagccgactcccccacttccgatctcatgactaccgtcatccaagcctcagcatcactggcgcaggatccaatcgcaggagcaggggtcacgacgagcggtccgttcattcgcctcccgaccatcatagggagcgccgagtggaacggcctcgctcaccacctcgtcgccgccccgtcgatcttcgcgacacaatcatacagcgccgagcagctcgaggccatcatcattcgccggaccgccacgacgacgaccttgatggagtagcagccttcaccgacgacctgcgtcgagtggattggccagccggcttcaagccgactggaatagagaagtacgacggtaccaccaacccagaatcgtggcttaccgtctacggtctcgcgatccgcgcagcaggaggagatagcaaggccatggcgaactatttaccagtggctttagcggattccgcccgatcttggctccatggattgccccgtggtacgattggatcttgggccgaattacgcgaccacttcatcgccaacttccaaggcaccttcgagcgtcccggcacacaattcgacctctacaacgttgttcagaagtccggagaatcccttcgagattacatccggcgattttctgaacaacgtaacaagatctccgacatcaccgacgacgttatcatcgccgcattcaccaaagggattcgccacgaagaattggtcggcaagttcgggcgtaaacctcccaggacagtcaaacttatgtttgaaaaagtcaacgagtacgccaaagccgaagacgccgtcaccgcatcaaagcagtcgggtcccagttggaagccaaaaaaggatacgccggctacgggaggaggtggaagtaacaatcataaggaccgcaagcgtaagcctgaggaacttgttgcaaccgccattcactcttctcgacagcgttcgcgcgtcaacacgttcgacaagatcatgaactcccaatgcccgcaccatcctaactccaaccacgtggccaaagattgtttcgtctacaagcaattcgcggagcaatacaccaagactacacggaagaactccgacgaagaacaaagcacgtcgaggaagaaggacgacggcgacaccccggtaggatttcaagaccaccgcaaggagctcaaccatatcttcggcggccccctggcttatgagtctaaaaggaagcaaaagttgaccgaacgggagatcaatgctgttcagcccgacacgccccaatatcttcgatggtcagagattgcaatcaagtttgaccgctcggatcatcctgaccgagtggtccacccggggcggtaccccctggtactagacccagtggtccgtaatgtcaagcttcgcagaaccctcatcgacggaggcagtgcactcaatatcctcttcgccaagaccttggatgatatgcagattcctcgctccaagctaaaaccaagcaatgcgccttttcacggagtaattccaggattatccgcaactccactcggccagatcaccctcccggtcacttttggcactcgggaaaacttccgcacagagaatatcagctttgaagtcaccgattttgagacagcataccatgccatactcggacgcccggcgttagccaagttcatggccgtcccgcactacacttacatgatgatgaagatgcctggtccccgaggagtcctatccctacggagcgacatcaagcaagccgtcacatgcgacaaggagagttgcgacatggcccaaacccgcgagatggcgtctgcccgagaggatatccgactggctgcagccacggcgagcgaaggagaagtgcccgctaccaagacttcaaaaagtggagaaagcgaagccaagactaagaagattcccctagatccttctaatcctactaaaactgctgtaataggcgccgagttagattgtaaataggaaagcgcgctcatcacctttcttcagaacaataaagatatctttgcgtggaaaccatctgatatgcccggtattcctagagaggtgattgagcactccttacatgtcaaagaagatgccaagcctatcaaacaacgactccgccgattcgcacaagacaggaaggacgcgatcaaggaggaattaaccaagctgttagcggcaggcttcatcaaagaagtccatcatcccgactggctggcaaacccggttctagttcggaagaaaacggggcaatggcgcatgtgtgttgattatactgacctcaacaagtcttgccctaaagatccttttgggttgcctcgcattgaccaggtagtcgactcgaccgccggctgtgagcttctcagttttttggattgctactcggggtatcatcagatccgactgaaggaatccgactgcttgaagacttcattcatcacgccctttggagcatactgctatgtcaccatgccgttcggactaaaaaacgcaggagcaacttatcaacgtatgatccagagatgcttctcaacgcagatcggccgcaacgttgaagcctatgtggatgatgtagtcgtcaagaccaaacaaaaggatgatttaatctcggatctagaagaaaccttcgcgagcatccgcgctttcaggatgaaattaaaccctgaaaagtgcaccttcggagtaccgtcagggaagctgcttggttttatggtgtctcacaggggtatccaagccaacccggagaaagttactgctatcctcaacatgaaaccgccaagtacccagaaagatgttcagaagctgactggatgcatggcggcgctcagccgatttgtttcgagacttggcgagcgggggatgcccttctttaagctactgaagaaaacagatgatttccaatggggacccgaagcacagaaggccttcgaagattttaagaaactcctcaccgagccaccggtcttagcctcaccacacccgcaggagccgttgttgctgtatgtatcagccacctcccaggttgtgagcacagtcttggtcgttgagcgtgaggaagaaggccatgtccagaaagtccagcgaccgatttactttgtcagcgaggtcctagccgactccaaaacgaggtaccctcaggttcagaagctgttatatggtattctaattactaccaggaagctatctcactactttcaaggtcactcggtaacggtggtcacatcatttccactcggtgatatactgcataaccgcggagcaaacggacggattgctaagtgggctttggagttgatgtctttggacatatcattcaagccccgaatttcaatcaagtcccaagcgttagctgattttgtcaccgaatagaccgagtgccaggaggatacccccgcggagaagatggagcactggaccatgcattttgacggatcaaaaagactttcgggcactggagcaggagtggttctaatttccccaactggagaaagattaagctatgtgctttggatacatttttcggcgtcccacaacgtcgccgagtatgaggcgctccttcatggactgcgaattgcgatctccctagggataaagcgtctaatagttcgaggcgattcacagctggtcgtcaaccaagttatgaaagagtggtcctgccttgacgacaacatgatggcatatcgacaagaggtacgcaaattggaagacaagttcgatggactcgagctcagtcacgttcttcgacacaataatgaagccgccgacagacttgccaactttggatccaagcgcgaggtggcgccctccgatgttttcgtcgaacacctttatacgccgacagtacctcacaaagatactactcaagttgcgggcactcatgacgtagctatggtttcagccgactggcgagagcccctcatacgattcttgacttctcaagaactcccccaagacaaagatgaagccgagcggatttcaagacgaagcaaactttatgttatgcatgaagctgagttgtacaagaaaagcccttcagggattctgcaacgctgcgtatctttagaggaagggagacaattgctgaaagacatacattctgggatatgcggaaaccatgctgccgcacgcaccattgtcggcaaagcttaccggcagggttttttttggcctactgcagtgtccgacgccgacaaaattgtgcgcacgtgcgaaggttgccagttttttgccagacaaattcatctaccagctcaagagttgcagaccatcccactgtcttggccgtttgcggtttgggggctcgacatggttggcccgtttaaaaaggcagtcggcggttacacgcacctctttgtggccattgacaaattctccaagtggattgaagctaaaccggttgtcacaatcacagcagataacgctcgagacttcttcatcaacattgtgcatagatttggagtgcccaatcggatcatcactgataatgacagataattcactggcggagtttttaaagacttttgtgaagactttggaattaagatttgctatgcctcagtggcacatcccatgagcaatggacaggtggagtgagccaatggcatgatacttcaagggattaaagcgcgagtttttgaccggctaaaaccctatgccggcaaatgggtggaacagctaccatcagtactttggtctttgcgtactacacccagtcggaccacaggccagtcaccttttttccttgtctatggggcagaagcaatgttgccgagtgaagttgaattcgagtctttgcgctttcgtaatttccgcgaagaacgctacgaggaggaccgagtggatgacttgcaccgactggaagaagtccgcgaagcagctttgattcagtcggctcgatacttacaagggttgcgacgttattataatcgcaatgttcgatcccgtgcctttctagtcggcgacctcgttttgaggaaaattcaaactacacgagatcggcacaagttatctcctctatgggaagggccatttatcatctctgcagtcacccggccaggttcctatcgactcaagcgcgaagacggtacactcgtcgacaactcttggaacatcgaacatcttcgtcgtttctacgcttaagcttatcactgtacttccctatcttgactgtcaacatcaagttttcttcttgaagttgtcagtcgggggctatcatcataataacggagtgtgattttttatcaattcaatttgcttccttggtctatcattgccttgtttgatttttctacttagtctgcgaggactgaaagtttttaatagcttctttgggttttaggctcaacaaagcttgataaaagcttttaagaaatcaaagacttggctagaattatcaagcacagcataaatacaccagtattgtacaagttatgcctccatttgctacatttatgctcagtcagaatcagtcctttcatcatcagagttattactactcggctgaaggtcggtgttgcggaattgatctacgacgtcacttgcaatcttgtcagccgcattttgagcattgctgataagatcaagagcagcctctacgcttgtcccgtctgcaaagccatcaatggcgtcaatttcaatcctcgggtacaaggatttggtcatcgccaatgccgtgctagctcccatacttccagctttcttgatattcttgaaatatacatccggagcaactctcagcttgtcgaagatttcggttgcgtcgagtgcactcggaccactgttattgaggaacatagcttggacgagtggtgtagcgacattagcgacttcatctcttgctccttcaagcctcttgatcttaccaaccaggacgtcaaattgagcttgagatttgattttgcggtctacaaaacacatttatgataaaaatctactgcattaaaaagagagaagttcagattgtcagctggcagtaccttcaacctccttcaaggccgagtccctttgcgcagccagttctaccttgtctctttccagggcttcaatttgtttctccatttgagccatcctggcggcttgcgctgtttgaaatccaaatggttgaggatacagttacgacagcgtaaattaatgggacagatctagagattaccttttgatgaaccactcagctcgaagtttgaatcctggagctgagcaattcggtcccttaattccttctctgtctttttggcgagctccttggcctcgtgtagctggtccctaactgcttcaagagttcccaaatgaggaaccagcttttctaaagttgcggtcttggcctcattgcgaagatggattctctgcatgatggttcatggtttagttttgctgaagagaaaacaaagtcatcaaaggcagtcacccggaagatttacattcacaatgcgagtggcttctccaagtgccttcttcaactggcacacttcctcatcttctttttgacgatttatgacgatgccggcagcttgtgagttctcgtcccaccatttgagcaagataggaggacgagagtcatcagctgcctttatgcgaggaatttcttcttcgtcatcgcctggtggtcctgatgtatttccaagatattagacgaataagctgaagttatttaaatcggcatcacttgagaagatgagttacttgaggatgttcctagctgagcgtggggtgatccttgttctttatctggagacccaatcatcgagtcgttaccagcctctggtccttgagaagttgttgtctgcgcttcaacttcgggagtttcttgatctggacctacatccgactggtttccagtcgggggctcttgggttgttgtagtttcagttgctgccgactggtttccagtcggaggctggtcactcggattggccttatcacctgaagtatgggcgccagtcggctggctttcggcagtcggctcagaatccttggatgaacttggttctgtcacagtcggatcaggatcttttccagttggatctatgtcggatggtttcctgcaaagtgttctttcaatattcagtattatttccatgagagaagcatgtcgaagtgaaatggtaccaaaaggtttatacctggaagatgttctaatctttggccttggacgactagccagttttttcctgggagtggtatgctttgggagtttattgggcgagcctttgtccccagatttgttgccgtcgtcgcctttgtcgtcattaagcaccagctttctcttgcgagaacctgtctgcccagtcggattggaggtttgaggttgcggatctgatctgattgtcggccctccacctccctgaacggtgtgctggcgaggagaccggcgctgagtgattggggggtcagacttcatcaatacatattcctgaatgagatgcctccacggttagttaactcaacatgaagacaagattatgttttggtcatgggttgaagatttcggatacgtacctgcggaggcggattgaatgcgttatatggcacaactggcagctgatgtgagtagctgacgacaatagcatttgagaagattttacacattctctccttcatgattttaaaatccagagaatctggttcttcacgattaggatcatgcttgccgtcaaactcgaatgccgtacgggatctttctttaattggtgccaatcggcatttgatgaagtgtcgagtaatctgctctccttgtaagccttgttctttgagttttagcatgcgatccatcagctccaaggcttgggctgcttcatccccaatcggaagagagttccaggcatcttggtacaccggaggaagacaagagtactcgggaagagcaggctcaggattctgaatataaaaccagtttgcatgccaccctttgtttgaggtcttgaagggcatagagaagtacttctggctcagagtccccctcagctgaaatccggcccctccgactacacatggcttactcttgtttggttggggcttgagaaagaagattcggcgaaacagagcgaagtggggcttaattcccaagaaggcttcacaaacatggacgaaattggcgatgtgaactatggaatttgggtttaggtgatgcaagctgattccatagaagcttaatatcccgcggaaaaattttgaggtcggaagagcgaagccgccatagaagaaatgggagaagaccacagcctcgtgtatatcgggggtcggaaaagcctcaccgcacgctggccgccacccgatgatttccttggcagggagaacgccgtgcgccaccatctccttcaggttctcctccgtcacgtcggatggcgcccattggccttcaaagctttccttctcttccgccattgattttttccgaatgcgctgatttgattcgagggatggctagggagaggtgagggattgaggcggtggatcacgggaaggattttgatgaacttttcgaaggtggattcgagtggaatggtgaaccctagtttgccggcgtagctctgtactgtagcagggagtggggaaaatggcgagagttccggcggggaagatgaagtgtcgcttggatctcgggatttcttgttaagggtatcggaggtgcgaatgggcttaggcctgaacagtacctcagcccagtacttttaacagcgtggcccattgtgctccttagggacttaggcattttttgctttggcaatttatgcgcacaatagtgttgcccaatgctgataaaatcctttttacgcggtcatataattctttggaattattgcaatgcaaattaaaaggtgcccgacagaaaggtgttatgctgtttttgtaagcttttttaggctacaaaagctgtctgggttaacttggaatgacttgtttttaccatagtcatttccttggtatgttatatgcctgttttcattatggtaaatagtcatagcctaggctattagacttattcattaccataatttttataatatttggtgggtaatctttagagttttctattcggatgcctgtcaagtgtgttcattcgtgaaccttttagagtgttaaccactcggattccttttaattatggctaaaaagcagtcggctaagaatgcttctttaggcgccgtgtatgcttttgtcatatgatgcacgattgtgctattattttgttctcaactatatgtttagtttgttaactaatcacatagttgggggctacacctaattaggtgcatctattcgatgcaccatattctttatcttttcgccctttacagtcttcgtcttcgctactcggcaggccttggcatgaaaagtttgaagcactcggattattatctttgagaaggctatgatggttgactgcaaaggtctcgggggctactgtggagattatggatatcccatatctacacggcgatgatatttggactgaatataggataccgaatatagatagaatatcttatttgtatctcgggtttgtttctcaacttgtacatcaaggaaataccttgagacttagtcggttacgactgtattttatctgtatctgcatattccgttagggatatagattatcttttgtaacacggactccttcccatatataaggggggtccgggtgcctctaggggcatgtgttgattttctccaaatcatacaatcaataagatactcggcggattcatccccggacaggagtagggtattacttcttgaataagaaggcctgaacctgtataaatcctttgtctccaaacccattcacttctccagcttgatagccacccccttttattattgccgaaatctagtttcgacaagtagaattaaaacaaccatatttaacagttcgatcaatatatatcttttcttttctaataccactcagcaggcgagtgtgtggtctcggtgcacgggctgctgtagctgtcacatcaggctgcaccggctgggaatctgcactgctagcttcgccacttgctgctgcgccatttgcttcggcatctcccagactgacactgtcccctccagcgccagaggctgcagcagaggctgcgccactgctgtcagcgtcctggtcaggcacagtgctgctgtcctgtagcgtcgattccagtgccgcctccccatgcacgatgttgccatgcacgtccccatgcatggtattctccatttcctgctcatgtgttgtaccattttctccagaaacaacatcatcagcatcagacacaattaaattattactaggtaatggaatattagccactggtgtaactacatgtgtgccccctggactagtcgtattataatttgtcatggaggaaggcaatagaagaatttcagacctaagtcttgctcctgcatttgagtgaagagtagaaaagggaaatatattttcatcaaagataacatctcttaagatgtagacatggcctgatgacacatcaagacatttaaatcctttgtggtgagtactaaaacctaggaacacgcactgtttggaacggaattggagtttatgtgtgtcgaaacatgaattcggcaataataaaacggggtagcgcacgagacctaaaagtggatggatgtggagacaaaggatttagacaggttcaggccctctcaatgagaggtaataccctactcctgtttggggatttgaatccgccgagtgtgtattgatctgacgatcaggttgtctcatgccctctagagggcctcctgcccaccttatatagaatggggggcaggattacaagatagaaaccttatccaatacggtatcggtttcctaactctactttacaatcttatcaaaccaggactttaggccgttccgtaatatacaaggaaacgtaatacccaagtcataatctgttacatattccatacatataagttatcccctataactagtcggataaccatgccgtgtgggtatggggtacccataatctccacagtagcccctgagaccttcacagtcgaaaagataatcttctctcgaaccagattactccaaggccgagtacttcaatcatctttgccatggtctcccgagtacttttaccaaatctgaagactgtggagggctgaaaaataaagtcaggtgcatcgactagatgcacctaataggtgtagccctcgactatgcggttaagtgaacaaaccaagcatatagtcaaggaataaataatccaaccaaccgagtggcttcgataattatagttaaccaagcgacttgatattaatatgtagcatatgcggtgtaaatccctgaataacatgatccgagtgatataccgactgctttgtaaaatatgatgagtgtaacctaaagttggctacattattgaaaattcacatagcaaaacagctataaaaaagcttgtatgttgtgaataaagaaatttccaaagtattgggcatacgccatgcgcacactgctttaacagatgtgcttaagtccctagaagacacatggttccaccacacctggaaatatacggcatatgtggtataaaatccgagtaaataaactcataaaggatttaccaaccgcctgaaaaatgaccacaatatataatcagcctaagccataatattggtcaataaaaatgcacacttacgtggcaaaaagcaacgatattgtaaccaatcaattgctttaaaacccaaacagcaccatgactatattaaaaagtcagcgggacagctatataaagctttactgtttgacaccttttaagatgcattgtaccaactcctaaaaagttgagtaactgcggtataaaaggattttaaggtattgggcacttgatcacgcgcactttggcctaagcaaaaagtgcctaagtccctaaaagaacgtgacaggccacacctgaaaatatgggctgcagacatattaggcctaggccaaaaaatatgccttcgacaccctttaaaggatgacgcatgtaacatgctcccgagtaataaatcttccgggtaatatagaccaagtgtagctcatatgaatagcttctgatctgaatgattatcccttatgggatactccaaaataaatataataattgaatcccgactggcgcaagtattcggttgatagcccttacggggaataataattggtccagtctttgagcatagaaaatagactcatgactatgaatccatgtggaatgtatccggaacaagtccaaattggagatataatcctcacgcttgagttgatgagcccctgagcatatagcttgttcttctgtcatagtcaaaattgtctattggcaatagctgacgcagtcggcatggagatgaaatgaccaacatgaagacgaaattgctcatcagaagtaacggaagatgtcagtggtagtaaagatgccaccaatcaaatgtaatgaagttgcataaccatggaggcgaagaaaccagtcggcaacagtcaggtcagctagcagtgaagatgtaggcgcccaacaacaacgaaagaacagtcggtggtgacaaaagcaaaccgacgatgaagatgtagacgcgcatcaacggtgatggcgaaatccaccaatcatgaagatgaagaaaataatcggcggcgacaaacgcatccgacggtaatgatgattagcggcaacagagatagccgactatgatgacgaagtttcccatcaacggcagcagagtaggctatgttgatgaggcttgacaagatgttgatgaagatgacgatgtcggtgatccagtcaatagcgatgtagcagccgatgataacgatgagatcctctatcggcagttgcgtagtaggccaaccgtgaagacaaataattggaggagagttgatgttgttgcccaactcgtctaaaccgaaatatttgaagttgttgaagtagaatgtctgttccgaagcaaagatgaagataatgactcctggagttgactcattggctgattaattgatttcttcagcttgacataaaatttgtcaaattttgagccttatatttgtgtagcccccgactctttggttagttggaaaacaactgaacatagagtcgagaattatagcttcttgtcgtcgagtagtcattgcttgattgaagatatgtgttgaaggtgtccaagtagaaatcctgaatattggagagtcacttgttgtagtaaaatatcatggcattgcatgccgagatgtcgaggttcacaaagacgtcgtggttggtgaagtagtaaaacttgcgaagtagcagcaatagagtttgccagtgccgaagataataaagaagaagtcgctccaccatgatgacaaagttgcatcgccgtgatgaagtgaacacgagtcggcagcaacagaagcaaactggtagcgaagacgcgcagttgtgaagataaaagcactagtcggcggcggcataaccagtcggcaacggaagacgatgatgtccatcagtagtggtagctgtataaaccagacgtagaggtgagggcactagtcagcagcagacgagacgaccggcggtgaagaagataaggccaatcaacactggcagaatcatgcagccatggaagtgaagaaaccagtcggcagccatggcaaacgtaggcagcttgtgttgaagatactgatgcctattagtagtgacagcgatgtagccagccgtgaagaaggtagcatcagttggcgttataacaggccagccgtgcaggcggtgacaccagtcagcggcggatgcggcggccggtcggtgaagacgtagacgcccaacaacggcagcataataagtctgccgtgcaggcggaagcaccaatcggtagcggcgaaggcaagccggtcggtgaagacgtagacgcccaacaacggcggcataataggccagccgtgcaggcggaaacaccagtcggcggcggcaaaggcaagccggtcggtgaagacgtaggcgcccaacaacggcggcataataggccagccgtgcaggcgaggacaccagtcggcggcagcgaaggcaagccggtcggtgaagacgtaggcgcccaacaacggcggcataataggccagccgtgcaggcgaggacaccagtcggcggcggcgaaggcgagccggtcggtgaagacgtaggcgcccaacaacggcggcataataggccagccgtgcaggcgaggacaccagtcggcggcgacgaaggcgagccggtcggtgaagacgtaggcgcccaacaacggcggcataataggccagccgtgcaggcgtggacaccagtcggcggcgacgaaggcgagccggtcggtgaagacgtaggcgcccaacaacggcggcataataggccagctgtgcaggcggaagcaccaatcggcagcggcgaaggcaagccggtcggtgaagacgtagacgcccaacaatggcggcataaaggccagccgtgcaggcggaaacaccaatcggcagcggcgaaggcaagccggtcggtgaagacgtagacgcccaacaacggcggcataaaggccagccgtgcaggcggaaacaccagtcggcggcggcaaaggcgagccggtcggtgaagacgtaggcgcccaacagcggcggcataataggccagccgtgcaggcgaggacaccagtcggcggcgacatatgagtgacatgagttcgtcaaagtttcacggatcggagtttactactcgggtacttttgcaattattaagagcagaaaataaatttatctcatctctatgcttttgatttattccgaataatacttagcaccttgcgttactcggtccatccaacgagcccccgggtgctaggaatcggcccaaaggcaaccatccattggcaaaccaaacggaaagcataggaagatagaactccataactcgataggtacttttgtactcagattatgtcgcaagcaatcaagataaatattataaaaaatatgatataacatctgtagcccccgactcactactcaatggaagaccaattggtgtagtgaggcagaggaaaaggaaaaatatcatataaagaataaaataaatgatgacttagctttgtaatattccccttggtgatggcagaagtagccgatgtgggaacgaagcagtccatcaatggtgacaaaaacgccagtcggcgccagtggaaccaagccagtggtgtagatgatgaagcccattaacagcggcgaagtccgtcaaccgtataggcaaaaacaccagtcggcagcggcgaaggccagccggtcggcgaagacgtggacgcccatgaacggtggtgtgaccgaccaaccgtataggcggggacaccagtcggcggcgacgaaggccagccggtcggcgaagtcgtagacaccgaacagcggcggcataataggccagccgtgtaggcggaggcaccactcggcggcgacggaggcaagccggcggtgaagtcgtagacgcccaacagcggcggcataataggccagccgtgtaggcggaggcaccaatcggcggcgacggaggcaggccggtggtgaagtcgtagacgcccaacagcggcggcataataggccagccgtgtaggcggaggcaccaatcggcggcgacggaggcaggccggtggtgaagtcgtagacgcccaacagcggcggcataataggccagccgtgtaggcggaggcaccactcggcggcgacggaggcaggccggcggtgaagtcgtagacgcccaacagcggcggcataataggccagctgtgtaggcggaggcaccactcggcggcgacggaggcaggccggcggtgtagatgacgatgcccatcaacggtggtgtgaccaaccgaccgtataggcggggacaccagtcggcggcgacggaggcaggccggcggtgtagatgacgatgcccatcaacggtggtgtgaccaaccgaccgtataggcgaggacaccagtcggcggcgacggaggcaggccggtggtgaagtcgtagacgcccaacagcagcggcataataggccagccgtgcaggcggaaacaccagtcggcggcggcgaaggccagccggtcggtgaagacatggacgcccatgaacggtggtgtgaccgaccaaccgtataggcgatgacaccagtcggcggcgacggaggcaggccggcggtgaagtcgttgttgctatcagcaatggcggtggcgaggacaagccggcggagtggactcgcggccgatcgaccggaaagctgagacgcctcgagtccatgaccagcatcaatcgcctcaatagtgccgcgtagttatatgcgaacaacaacaaaaaatagcaagaaattaatctgagattaaaaatcaatatgataaataatgataaaaatcagattgagtttccccctgactgatttggatcaagtcagagaagaggagcttgaagaagtggtcgacggaaaggaagtgaaaactcccaaagcgaaagcgaagtcggcgactcatgaaattgattccatcgcgctcgttgataggaaactcgacgcagcccctacctggcgcgccaactgtcgaaacatgaattcggcaataataaaacggggtagcgcacgagacctaaaagtggatggatgtggagacaaaggatttagacaggttcaggccctctcaatgagaggtaataccctactcctgtttggggatttgaatccgctgagtgtgtattgatctgacgatcaggttgtctcatgccctctagagggcctcctgcccaccttatatagaatggggggcaggattacaagatagaaacattatccaatacggtatcggtttcctaactctactttacaatcttatcaaaccaggactttaggccgttccgtaatatacaaggaaacgtaatacccaagtcataatctgttacatattccatacatataagttatcccctataactagtcggataaccatgccgtgtgggtatggggtacccataatctccacaatgtgtattgtaaggacgaagatgaggccaacaagcacaaccaaacactctcaaggatgagtagtcaggtttttgtttgaacaatttttctagaggtgtagaattttggatgattctactaggcacacgattgatgagataagtggctgcaacaaaggcttcatcccaaaatttaagaggcattgatgcataagataaaagagagagacccacttcaacaatatgccagtgttttctctcagctgacccattcagttgacgagtgtgaggacatgacacatgatgatcaattcctatttttgcaaaaaaaggaattaagtttttgatattctcccccccaatcagtctgcatggcaataatctttctatcaaacattcgttcaactagaacctgaaattctttaaacttctcaaagacttgagacttatattttagcactaaaatcatcaataaaactcacataatatttatttctcccaacagactctggggcagggccccaaacatcagaaaaaacaagttcaaggggaaattgagacacactagtagatctaacataaggtaactgatgactctttgcttcttggcaagcattacacacagactgatcgactgactcaactaagcatgggagattatttttgctaataactttcttaacaataggaagagacggatgtcctagacggctatgccacctggacaaggatagcttgacggtgccaagggcttgtttgctggttgatcagccaaaggagttagggatcaggtagagaccatgcctacatttcccttcaagcaaaatgtccttcgttaccagatcctttatggaaaagaatttcgagtgaagttcaagaaaagcagaattatcagcggctaactgactagcagatataagatttttcttagcttgaggaaaataaagaacattatttagatgaatgttacgactaggggtatgcacaatagtatgaccaatgtgactaatatccatacctgctccgctagccgtgtgaatctgctcgccgccgttgtacttttccttggtggtaagtttctctagctcaccggtaatatgatctgtagcacctgtatcaatataccaatttgtatctataccatatgagttagtagcagcagcggcaagcttttcatctgcgacgtagtcctcgtcgaagcgataccagcagtctgctgcggtatgcccgcgcttgaagcagacctggcaggtggggcacctgtcttggccctggatttttcacattttggtccttttgaaaaacttatttcgcaagtagacccctagaaaaacttatccaaaaaatggtcctttttgaggcgccagagtggctggcgccgtcgttcaacaggacggcgccagcctctttggcgccgtccccctgccgacgtggcggggtgatgctgaggtggctaagggga

SEQ ID NO: 6099 - DNA, 23319 bp, Oryza sativa
aatcaatctagggtttgcctcctactctgtactgcgccgtcgctcgtagactactccatcccgctcgccggcgtgcaccggcgatcgggagagcaggtctccggaacctctgccttcgacgttctgcaccgggagaaggcggcaataaggtttttggaaagcgcttcgcgcgactgctccctgttcgttcgcgacggctcgccttcctcttcgctcgcgtgtttcgtgccttcgtagacacttgcgaaaagtttcgaccaagcagccggtctttccgtcacctcggtacgtgttcaatatgttgcgcatatttgatctgttcatgttatactgtgtagtttacatgtgtagatctaatgatgcgttcatgctagttttcatctgtaatgtcatgatttatttatggaatagattaaatcattatatgtctataatctcaacagtaattttacaatatttcataagaactgatttattttatgtaaaatttctcgataccaaagaaaaccttagtagcagtaggtcagtatgcaggtgcagatgtgcagtcgcctatcaacaagtgatgttgctgcaacaagatctcgaaatacccgggaccatgtgctgcaaacttgcattctataccgtctaagaaaagtctttcagtaaaaataagctcttcacggtatatggacgacaagacgagagaaaataatatactctctccatctcataatataattttttttgcgatgtgatatccctgttcgtgatattagtaagtgtcacatcccaccaaaatcttttatactatagaacagagggagtattcattaagaatttattaaacttaactctgtcgaagtgaagggaaagtagcttgttagaagtatggacgttaggtcattttcacccggatttttttttcttctaggtgagaaagttttctttttagaaaaaacctaacattttcttgtgggtgcagggttgaattttcatgcctttctcaatcctcaccgtcgcagcagagaagaatagtcacagagcaatgttcacttgtttagagtcacagagcaatatcgaaatggttccctgcaataatattttagatgagcggccggccggtgagagcgagagtgagaggaaaatgtcaattcagtgtgacaaatacaataaatatataagtgagagatagatagagaagaagaaaattatagcaaattttattgctaatctattactaaatgttagttttaagattgattaatagtagtaaatgagctttaatattatccttgctcttactgatgtaaatactactcctactaactttcacctcctagaaacgagcccacgaaatgacaagtttataacgttgttgtctgcaaccgatgaccaataaggccgtaacacgcactctctttctcttcccttgtcgacacggtcagcacagtaactgtcgcgcttcacttccttgtctggttagcagagcacagctgcacaggagagcatccagtgccgtcaattttgtcaaaagagaaaaaaacagaggtaattaccggacgtccagggtgatctgatgctctaagtaagctaggctaaagtagctttagactttacgcttactcattcctcacatgatttgagtgccactataggcagtagaagagaggagcggagtaaagtagacagtgaaatccacatcggaggtgatgagcatacttaattaccgcaagtcactagctttaactagcccagataactttgcttcaactgctagtggagtagtacacgagtcgcgtagcaacgtatctggcgtaatcctcacttgctccactgctccacacaccattggcctaagcttatgggctgatcaaagtatggaaattagtagcagtgggaagaaatgtgagctcgaatcaagcgtggttatcaggttaagtcgcattcagcgccataattgagctgcctgcccggttggtttggcctggccaatctgaatttactgagtatgcagtacaccagtagtaccctttcaattctttcgcctgtctccatgaatgatctaaacatgaaccctgctctgcaacgccggaatagtgcgcacacggcatggatcaacaggaggagtatttactagcccaagaatgtgaatcaatgcaacgccggaattgcagctgagaaatggagataaaaagatgatttgtcagcgttttctgtttgcatgtagtagtccatcatcgttacaatggtcaacaaaagagggtaattgacccaggacgggatcactggtagaccaggtggtcaaagtatgaagtagggaaagcagcctatgggcctgtttggtatagctctaactcctaaatttagcttcaggagttgggtctggagtggagttgtggagctgcctaaacccagctccacaactctagttcattttgtgagagagctccacccagctccactcccagttttagtggagctgaaactgtttggctgagctccagctccaggaggggtggagctggagctggagctgtgccaaacaggccctatgtttcagtaatccagtctacgacaggttgatccgttgatgtggtacaccatctagccggccatactgagctgccgttgaagtgttgaacgcgatgcagtgctgctgactttgctgcgccgatcagtgcagcctgcagcgacggcatgcagcgtgctaacatacctttcgctttaaactcgtggagtactcttacttcctatccatgagacaagaaaaagccttaggccttctttagatatcactctaaaatttttcatcatatcacatcgaacatttgaacacctgcataaaataataaatataggctaaaaaaataattacacggattacgactaatttatgagacgaatctttgaagcctaattgctaaatgatttgacaatgtggtgctacagtaaatatttgctaataacagattaatcatgcttaataaatttgtctcgtggtttactcaagtattctgtttttttattagtgcctgaacacctcatacgataccctatataatatccgatatgacacgctgaaactttacatcccttatctgaaattggggagaagtttgggaaaagttgttagtctagaaaaaaaagttataagtttatatgtgtaggaaagttttggatgtgatgtgatgtgatgtaatggaaagttgggagtagaggtggatagcgagccagctcggctcggctcggtcgagctcattaagataacgagctggctcggctctgctcgttatcttaacgagctaaaaacctagctcgagctggctcgtttggctcgtgagctaatgccctgaaacactgacccaaacaattttttcaatggatacacagggtaagtgcgtaagtgcaatgaggtgctgaaactggacctataattgaagaactaaagtactgaatataagattaacaacaacaaatcgcgcatttgctctgggatctggttgaggtagctcctgatcctccatggcagccagcggcgcagccacacagccagcagcggaccatggacgtggatgatgagtggcgcggcgtggggcggcgtcgtggaatcatgggcgatgagcggcggcgcgagcgcatgacactcgctgctagagcgctggtgcctagcgcggaggtggattggcggcggcagagcgacggtggattggtggcagcggagcagtggagtgaagaggagagggagatccggagaggcagtggcgcacgggatggtggcgtcgtggtgggttggcggcgccgcacggagtgaagagaagaggaaaggggacgcgagtcgcgaactcgcgatggtgggtggcgcggagcgaacaggaagaggagggcgagactcatgtggtggtaggtcagctagggttgtccttatatgatgggccattcgtctatgggctttgtggcctttgtggcctgctgttgttgggctgttggctaatgaaagctcgttaaggctcgcgagcagctagctcgagctggctcgttatctctaacgagctttagagccagctcggttcgttacgaaatttaaatgagccgagccgagccgagccgagcgagctaacgagccacgagcttcctgtccacccctagttgggagttgagagaaagtagcttcctgtccacccctagttaggagttgagggaaagtttggtgtgaactaaacctaaaccgggccaggacacccctaaacacgagatgcaaatgcgttgcaaatccacctacaagggcgacgtaatatcacgcgcgaattgaatggcatttgctgcttcctggggagaaagatggagtacaaaaattaatgccatctattactactccctcgcacctcatgtgtttgctgcctggagcaaaggatttttaccggtccaattcggggcacacggacgagtagcatgagcttctgggactctcacacgcccatggcctcgcatgagtcactgacgtgtgtggtggtgcaagactctagctctaggactgtgcgccaacctgcaacagacgccgaagcgaagctcctagactgatactcctagatcctagcacaactccttgggatctcactgaccggtgggccccagcagggctcggctccaaagcagcgtcaaagaacgccgcggggcccgcatgacctagcgatcccgagatgggcccacggttacagaagcaaggagcgctcgtgaaaaaacagcaaaaagaaattaaaagccctcgaaaaagaaaagaaggccggtgcggggcccagaaggcaacggatcccactagccaacaccgtcaggtgggccccgcgtacgggcccaccacccacccttttctccccctcaaccttaataaaaccacctcccaccgcctgtctcccctttaaacgcagcagcacgaacacttccccgtgcccgcgcctcgcgacgggcccaaatccaacacgacgacgaggaggaggagatcgagtgcgccaccgaatcgaataaccacaagccgcggaagatttcccctccccccggtggatccctcctcctcctcctcctcctcctcctcctccggggtcgcctcctcccctccgatggagtccgggagcgagagcggcagcgggagcgggagccgaggggagatcacgctggccatcggcggtggcggcgcgtcggcggcggcgtggactcggctggtcagctccggcgtggaggacgtgctggtggtggggggcgcgggtggctggcgtggaggaggaggaggagatggagcgggtgggctgctgccgtacgggcacttcctggaggcctgcttcctctgccggaagccgctcgccagcaaccgcgatatctacatgtacaggtaatccctccctccgctcgacgccgatgcctgattcggttcgtgttcttctgctgggttagtttggtgtatttggtagcggtgggtcccgtggccgggacttctccggcgtcattggaagctttgttttgtatatgaagaaaaggaaattttgccgctgattccagctgaagcctgcgggaaaagtgagagttagtgcatactccgatggagtatttctcagggttttttttgtcgtctgcaccgtccgttttttttattggtgcgttaggttgctacgcttctgagctgaagggaagaaatttgtgcgagtatccttcaaaagagaaaattatgcgacttgttttttcccttctgccggattttgcgttggtgtaaaggttttgtcgttcatattgtgttcgtacaagcccttgtttactttggcgcgtgaatatattaaatccttagtgggtgggcttatttatgatcatgctgtcatcaagagtagataccaactactgtttgctctttgtttatgaagcgtctgattcgggagggagttggatgctaggcacggacgatttcttgctctttttcccccttccaacgaaaataatgaacgtttttgctgcttaaccatgttagtttcgaacaggtggatgaattgaaccgaactgcggctattttttgttctccgatcttttggtttctttcttaattgtgatctagtggtggtggtggatacagctatcgaagagagccgtccttttgaatttattttcaatttttcatgtaagaaaattaattgttcattgatgtgtgctcacgggaacttctgatgaaagggacctgcaacctaactggatctttctgaatcttaagactttgaatttttcctgttaaagaaaatgcttgttagcttatttaaactggatgttgtgacttgaacacaccgtgtacagcaatacagcatgatatatcatagaagaagaaataattcagacatgtaactagtgtgaagacttatcagttaaacagtaaaatgcaatttctttttttagataatggaatcgattctctgttaaatgaaattcttcgacgtaattgccctcgtccttttatagctggtaggctagtagctattgtcacattcatgtcactaagtttgctaattgatgatcctacggatcctttggttgagcaggggggacattccgttctgcagcgaggagtgcaggagggagcagatcgaaatggacgacgagatggagaggaaggagaagaagaacatctccaagaaggtggcgccacgtactcccgaccccagagaggtggagtccactccgaggcctccgaaagctcgcgccggctcgatcctcgccgggtgacaactgacaaggaggagggactgaaagtgaggaaactcctccgggattgtgctgctcgttttccggcaagccaagaccagatgatcctcacaccttaccaccagaaaactatcacttacaaagttacatatgggtttgtgtttttgtttaaaccccctttgctcttttggtggtgtttgttagcgcctccctaatatcggtgatcgatgatgtatagagacggatggaaaggaagatcagcgctggttattagtaggagtgactggctgactgcagctttctgtaatctgtgttatcaagggggggggggggggggtttcctgaccttcgtcttgggggtgttgtgaatttttcctacgtgtagctgattactgtggtaggtgtaaggttttttctaatgaatctgaggaaacatatgcctatagaagaaatagacatatggacgaatgaatccttgactttttttcatgtactgtaatcttttcgttgaagatcttgtatgagctgtgacaggaagctcaggaaagatcttgtgtgtgcttgttgctatggttgatggagcatgtgcagcagtttattgacccttaactcggtacaattctccaaaatcaattggaagcatatttttatcaaatgaccactgaactttcatggtagaaccatgaacctcataaactttcaaacatgtacttatgcacaatcacatactatttcaacaaaatacacaccgtaaaatgataggctcttaagacagtaaaatgatgttatacgtagtactacgagcacttgacctgcaaacagaaaaggcattcatcctctgatgtgtcaacgagacgaggacaaaaacaaatcaatcggcaattaaagaatactagcagtacaacgtacagtcatgaccaaatctagaaggacagcagagcagacgtactcacagtttcacagtgcaggctaaacgacagcctctcccaggctacgctccctttgacccctagcatctaccggtagccgagtactccctctatttcataaaaaaccaacttagcactgaatgtgcaccattgtaatttgtttttttttaaaacggagatagttcctatgtaccactgcactgtactagtagtacgagtagattagagtacggagtagaatagtagtactccgtattgtattttactacactactgcagctgccacagtgccacttcaattctctctttcccgtccgtcacgagccttgtggaagaataggaaaggaattgaatgccacttgacgcgaaggtgcagatcgagcaggtgaggtgaaggtgatgtgatgaggtgaacgatttcctttccacgaaccgcgccgactttatggaatggaaatcagagggaacgattcggccggccccacctgtctgtctcccacgcgcctggacaacggggaaagcttccggcgggggaaaggcagaggcgggcgcgcgcgcgccgacggccatgtgcttgctgttgctgcctcccgcttcagagaaaaagcgagcgtgcggtgaagtgaaacgacatcggggaggaggaggaggaggaggaggaggggttggtcacttggggtgtgttcggacctctaggttcccaacccaaatctctcgtttttcgcgtgcacgcttttcaaactgctaaatggtgtattttttacaaaaagtttctatacaaaagttgtttaaaaaatcaaattaatttatttttgaaaaaaattaactaatacttaattaatcacgtgctaatggattgctccgttttccgtgcggagtcactatgttcccatcatccacatgcgaacacagccttggttggttgcgatgctttgatcagagttcacgaggacgaagctttggtcggtggcagcgccccccccccctctctctctctctctctctcctcccttttactgctaccgcacgcccgcctcgctcgctacctcacttccgccgcggagaacgaccaaccaacgaaccaaaagtttgatcacatttgcgtcatctcctccggtttggggggagtacctttttctccgagtggttgggttgaccttttttttttctcttgcggacaacttgtttaaacgtttcggttgctttgcgaaacgttactgttgtgagtaagtgagttcgtgacaaactatattacattttgtagcaacgtcgggttgtcaaatactgccgtaggttctggagttttgttttaattccgttgacagcttgtttggcaacttgagggaaggggattgagagtttacacgagggaattgatggtgagattaagatgggaatttgatttttattcccaatatcttgtttggcagaggtggtgaaaattgacagggagtttagttggagattagtttattaatggaaacggttggctgagatttgtttagacagagtaaaggagaaattccctcccaattactactcctacccaggtattgaaaatgagggagtttcttcctcaattcctcatcctcatcccaccaaaattctcatgtctcccaatcaaacaaaacagttaatagtctcatccctctaaactcccaatcccttctaaaaactccctccaaccaaacggacatttggtgaactgaactgtctcgcgcgaatatacttgcagtgttcagcactatgctccattgctcctacggctacgttcgtggatgtggacaagtggatgggtgcctttttgtcaaagtcatggatggcgtcaaccatgactcggtagtgtgcaactctgccgcaacagcagggatggaccgatattgatggtgaggcccattgaccagggattggacaggctgggcattaaatggctctgaagtctaggcccgacaataattaattggaccgttcggagtttgttttctggcccaaaactcatggcccgtgtgagggattaatcggcaactaggactaggatgcgcgatcgcctcttgaaggcgtaaacttgagctttccacatccgtcgaaggcggaaaggggctttcccttaccaaccttgcctggtttgctctgccctgctctcccagcaacgccaaccccgatgctagccgccgccgccgccctccgcccgcccttccgccgcgcccgcctgagcacctcccatggaggaggcggaggagtgacgcaccctctgcgcccgcgcctgcagcggcgtgctttggcctgccgggctgacctgcagcaggacgcgccgttcgccgccgccatcggcgcctgcttgctagcctccctcgtgctcccgacgtcgagaggccgacgagatgacgacgaggaggaaggggagtttggcgcgacggacacgaggatgggcgtcatggggatcatctccttgctgccttacttcaactggctggtgagagcttaaggatagtcttgctgcccctctttgttccttctgcttagatttgaccccttctttttttttgtcttttacttcacgattagagctggatcttcgcgtggctggacagcgggaagcggcgttatctgttctacgccgctgcatacttggctccttatctgaggtttgaaattccaaactatgaactgctaatatggttaccctttgtcatgctggatgtggctatgcactgggattaattgagtttgtttgctgtgttggcttaatttgatcatgaccaacacttttgcaatgaccaattagacctccactttgtaatgtatggcgtcttgggtagctgttagtagtgttacttatcactggatcttctctggttgagaaaatgcttgtaataacgatccgattgtagaatctataaaaaaatagtcttgaggatcaataatctcttgggcctccttcgagtaagatcaaattgcttgagtgtttcatgtgaaattatggggaaccactgaaccatgtatgttggttgatcttgttttatatggactgttctacactttatggagttttcctgtcttattagatactggactcatgctgtctgctaaggtaaccaacaaaaactagcatcaattttcagaacaaatttatcactgtcgcccgaagagagctggttacctatagctagcatctttgcctgcattctccatgttcaggtcagtgagcaagcaattccagtattctggcaagctatagcttctttgctgatattttttcccttgcagctagaggcaagcatcaggactggtgatatcgagaccttcaggtttgttcagagagcttggaggcttattttccctagtgctctgaaggaggatgttcaacatagaaacaagggaaaatcaatcagaatggtacaatataaatgaactttataatctgatgttatgaatctctattcaactaaattttggcaatcttctcctacaatggttcagggcagcggtaacaggagaattccatcagcacatgaatctagagaaaagcttcgtaattcagatatcttcaaaaggagacttgatgagcccaacgacgagaaacaaaacaaatcagattggaactgaactcaaacagtgtcgtcctttctcttgtcaagctgtttaaggaagatccacatccttgtggaaaactcctgtggctgcttgcaaaaccgatgtgcagtatgtcaaattaggcttaggtgtagttagtttccaagttagtccacgaccacgagttgttggatcaagcaggcaaccaggctgatcagagtgaggcacctgctgttttcaggtttctgcaaattatgttttgtttgttgtgtgtagcattcagcaagaataattaacgttgcatgcttgctctatctgaaattctgaatgaaagtagctttatgcctggtttgtctctctctcatccgtggttagaactcagaacaaaccgctgcctgcttccctagcttgcttggctgttgctgattactgtgagcacctttgatcatacgttgtcatggactcctgaagcctcatctttccgcttatgcttatgcctatcaaccaaaatttaaatttttaaccttaaatttggagttgatttcggggttttttcatcgaagtttatttttaatccttgttttagatagttaaaaacacacatatatataaatttattcacaaattatttttcatttacaaatatgccgatggtagatgttagctagctttgttcatcggggagggcaggtctttggtacgtttccgcgtgttccgtttcacagcaaatcactgtgaaaactaaattgtacacagaatgatgcgaataccacgttttagatgaagattttttttcccggtttggaaggttcggaaaggaggattagtgaggactcagtgaggtgttggcatgttgccgtgttggagcatttgttcctggatgccaatcgtgaatattgatgtcgaaatgcacctgcggccactagtatgttcttccgttccgtccattttgctgctattgcgcatcagtttcatatcacactagccactgggtctcatcgtattcgttgattgacataaccacgcgacatctagccaattgtttgatgcttcaaaacaaaaaacagtttaaaatgcatacatcaaactcattgttcaagccaaattctgtgcttaccatccgattaatcaaccaagagtaaaatgcaccagcggtttttaaacttgtcataaggtttcacttaggtccacgaacttacaaaacgcacatcgagatctctaaacttggtttattgtatcatcctaatccaaagtctcgtttgaccgtggtctttcctacgtggcacaccatgtggacgatgacatggcccttttttttcctttttccccgttttctttttcctcatcttcttttatcttattcctccgcttagcacgacggtggctagggtgtcggcgacgcgcggccagaagacggtggcgagagggagcggcatggaggatgcgatagagggtacgatgagcttggggagttgggaaaatggtggaggggagcaggggtggacattatatccttgggaggctggaattgtgcccagggtgagcagatttgaagcgggaggggaaggcgggacaatatctcgggcggcttgggtcagccgccggtttgtgtggggaagtgggggaggtgggcgatgaccgtgtcccctgcacgtgcggacgagtcgggaaggcgcgaggacagtgacgtcgtggggagcgacgtgcacaggaggggtgtccatggcggttgccggtcggaggaggaagaaggccctgacaggtcggcggcggaagggagaaaaaataaaaaaaaaattacatgtcatcatccatgtagtatgccacgtaggcaagaccacagtcaaataaggttttggactgggatgagatattaaatcaagtttacgaatttcgatacgtgttttgtaagtttatggatcttagtaagtactcgccgtcagtaggggtggataaaaagctcgggctcgtgagcttagctcgggcttggcttgagctcgtaaagcttggctcggcttgaaaactaaacgagccgagctcgagctgcctccatggctcgcttctaaatcgagccgagcccaagctgctcgcaagccgctcgtgaagcttgtcgagcttgtgaaaaaaatggcctggcccattaacagctgatttggcccatgaaaaactctaacctcaccgttcctctcccactccctcgtcatttccttccctagaccccttctcacgccgccagcccgtcacaccgagtccaacgcctttcaacgcgcgcgcgacaggcgacaccgctcgaggcctagggcgcgaccgcgcgaggctccctgcgccgcctccctcccctatgctttcctccccagctccgctcgacgctccctgcgccgaccttccctgactcgatgttgttcatcacctcgccgagacaccaacccaccgacggcagttttcgctgcgacgagcccaggatgaagaggttttgggatgtgttttcttatttttcttatgcatgtagcaatagcatgttgtggtcttagcacttgtggtctattggtcttgtgattgtagagcaatagtacgtgtagtatgtgcgtgatgaattgataatagaaagattaaggcaaataaatcaaaattgtcgtaccagtagtgtatgtatgatgtatctgtgactttgtgttactgttagtgctatacttcactcttttttagttgttcttgctactgcattgcaatttgcattatttgaggcctacatgacctgtaggagtttgatcctgatgcatacttgacgtttacttgttgaaaattgattgctttgttgttgtagtgtttacttactgctagcatcacaagccggctcgagctggctcgagctttgaaacgagccgagccaagctgctgttttagttcgtttagttaatcaaaccgagccaatccaagcctgttctttgccaagctttcctcggctcgtttccacccctagccgtcagtgtatttcactcatcaattaaattaggcggttgatactgagtacgaatagccacgagtcagtccgcgtactttactatactttagccattccacatcagtccgtgccgctctctgcccattctcttctccacggcaaaccaccaccggcgtcaccagcccaccaccggtctccaccgccacccttttctccgaatcccgacatggagaggcctccgcgcaggccctccgccgcgcgcccgcgcccgcgctccctccagcgagccgccgcggcgctcttcctcgccatcttcgtcgcgctgcccttcgccgtgctgtaccgtggccccgtgtcgcggtcgctgcacgactcgtgggagtgggacccgctgccttcgctcgacgcatccgaggaggacggcgccgcccgggatgatgatctggtaatcctgccccctcccttcctactgatggcgttcgtttggttcccaatttttagtgtaactgctctggaactggaatgatatccactgttaaaccatgaacgaacaacgataaattttggtagtacttctgctcaaaaaggagaaaaaaaaacattggtcctctcctcttagttttgtgaatgtcaggtagggtttaataagttcgcagtgcggtgttgttcgtggattcatttatgatcagttcatgtggttggattttgcgatctcgtgtagtgtagtctaatttagagctgttactgccaatgcgtaatgacatattgtgttcacaatacttagtagtggctgcactagagatgtgttatcttgaagggtttatcttaggatgaagcaattctatccagttgggtttagatgttatagtaaacacacacgagtaaatgcagatggtgttgttgtgttaaaagacagaagaacagtgaacacatatgtgatagccagaaccttccaatctgtttttcagtttgaacatgggaatcacttccacctagtgaaatactccctctgtttgggacggtgggagtagatgttactgacgcggtagtgtctgctctaggtgtcattgacatgtggataacttcattgaattttgtaagagaagtagattactgtttttctccaccatagtaatgtcagaaagtttggtaccttacatatttgctttgtttcagctgattattaacggatgttttcacattgaacaattgactaggttggcaattgaaaggccaacatggcttttgattgcaggactttaggaaaatttaagaaagtaataatgaccctaagtttttttattgtttatcttagctgtcaatgttacatttcagatttcattttagctgtatgtttcatgtattcattgtcccctaggccctaatagtccaaattcagaataaccatcttaatttttgaactactttttatgtgatcatttgcgcggccactttccagttaactttctccttttatttaattgtatccttctaggacagtcaagatctgaaactcgagcaagtcctgcagaaagcctcaatgggagataacacggttatattgaccactcttaattctgcatgggcttctcctggctcagtgatagacctattcattgacagttttcgatctggtgttagaacaagttcacttataaaccatcttgtcattatagcatttgattggaatgcttacaagcaatgtctcaagatccatccttattgctttgctctcggaactgatggtgtggatttctctgaggagaagaggttcttgacttctgggtatctggagatgatgtggaaaaggatagatttcttgcggctggtcctggaaagtggttttagcttcatattctcggtaaattctgttgcatgcagttcagtcaccattgataaatagttattcccattttgcaaattccaacagcaagtgattcggctttgttactaaccatgatgagattactattttcttttgttcataatatgatcgctagttgtttcaaaacaatgatgaaatggaggtgtcttttggttgtcactttcatatacttattttccatttattttgataaatttcaggatgcagatatcatgtggtttcgcagtccgtttccttatttttatcctgatggcgattttcagattgcttgtgaccactattttgggaatgcaactgatctgagaaacattgctaatggaggcttcaactacgtgaaatcaaatgaacgaagcatagagttttacagtttctggtattcctcacgattgagatatcctggccttcatgatcaggatgtatttaatgtcatcaagcacgacccttatgtttcagatattggactgaaaattaagtttttgagtacttcatactttggtggattttgtgaaccaagcagagatctaaacaaagtttgcaccatgcacgctaactgttgcattggactgcaaagcaaggtacatgatctaagagttatgatggaagattggaggagttatttgtccttacctccaagcttgaaaagattgagtgcattggcatggagggtgccgcaaaattgcaggtattagaaccaaccttgaaatccaatttagattgtttcaaatggaaaatacaattaaatgaagttcaactaaaatctttctttcacattgttttcatgttgcatctgagcattttttttggcagcctttcttggtcacaccaataaaacgtccttatggacagcaaaaagaaatgaaaatggtgaagcccgccgaaagcgctctgccttccccccgaaagaaccttcagctaaacatctaaacagtgtgacgagattctgattgaaaggtcgcggtaagttttgccaaacacttcggagatccttgacaatatagagcggagttgccggaccgctctggaaaaatacactacaaggatggagcggccttagcactgctcctcagctccgctggctgtaccgaacgggccttcagacttcagtgacaaccagcttcatttggctacgagaaaaggagtgcctgcttcttcaaggaaaactgaagcaattacaccgtcttgaaaagcaagactgctgcaatggatctgtcaagagtaaaatggaaaaaaaagaatgtatatcctggttgatttcataggtaagtttgaaaactggatgctcttttttttcctgtgttagaacaattttgttagatggatagatgtatgaaatatgaaaaaaatgaatggcctagtctcgcgattttcaaatatgaattcaagttcagctgtgttagatggctagatgcacgccaagccgccgagtaccgtgcacctttgcaaagcatattgaaagctgcataactgggtgagccatccttgggccagatcaagtaattgggcggactctagaccgaaattgttgttggcgaggggtaatattttgggcctgtggcatagcccatggggccgaattacagacccattttccttcattctaggcctttgccttatggccctaactgacatatgggacccagttgccagtgtcatccgtcaataaaccccagaacccgcgtccgcgaacaattcctctccccagcctcgccgcccggccgcacctcgtcccctcgcctcgccgccgcctcctcccccacgcgcgcggtcgtccagccatggggagatcgtcgtcggcgacggcggcgggaagtaagaagcggaggtccaaaaccggagctctaaccctaggggaggtgaagacgcttggcgaggagctcctctcgtcgcgcgccaacctcaaccacgcccccaccctcctcgcgctcctctccccctccgcgccgctggacctcgcgctggaggcgctcatctcgctccagtcgttcttcgtgcccctcctcccttccatcccctccgccgccgccacggccgccgcggccgcgggggatgcagaccccgagcttgtgtttaggtcctggttgcggaagcgtttcgacgagctcgttgcggcgctcgtcgagctcaccgtgtctccgcacagtgatgatgcaatcagggtgagtgctgctgcagcacctattcatttgtgtgctcggttgatggtttgatggtgaatggttcgattagcatgctcctttgttcactgtaggatctggcacttgatgcgctcatggatttcgtgaagctgggcaaggatgggagattccagtcggcaatttaccacaagtttatccacaatttggtgagtttttatcctctcatgctgttgcatcggtgtgaaattggggaaatactataatactagcagtatttaggggtggtttggctgagaagtgaactcgtggactagtttttactgttcgcttgctgctaagtttgcctgtttttgtgcagattcatgctaccgactcaattgatcctttgctagagttgcttggaccaaagtacttcatatacactgatgtttggtatgtcgtggtcaccttttgagtaatttttgctgtactttagtatctggtcctgataatcttaccttgagtgctttgctaacttgttctgcagtatttctaccatgcatttttttaatgttttcttgtaatatacttaattgttttctccatttgcttctgtagttacttcacttacactagcttagacaagatcgccagcagtataggcaataaagccaccggtaataccctctctcgttaaaaaatataacttattacaaactagttacctcattctattcttatcaggttctgaaaagagtgtcttgcatagtggcgatgatgggccagaagacaggtatgcttaagctcttttacatgatacatatattaagattggatgattgtgatcataaattcatagtattacctatggtaagatccaaccaatataccattgtgcattgcattaaatgagcgtttcaaatgcctgcacgcaaatgttttgcagtattgcttcgaaagaaaaaggtaagctgggaaagctttgttgttgttttacatgttcatgtgatccatctctgcctgttaaggaacaattggtactctgatgtgttgcttgtacttcatgcttgcatttctgtgttggtgtgttcttggaaagtacaatggcatgtgcttttcaaagttttacccctgcaatatcatttgaagacttgcaggtagtgatctatgttgtgaattattttgatcgtgtaattgtttgatttagatatcccataaaacacttgtagtgtgatttgccaatgtttatacatttctagtttttaacaactttcttagtcccatttatattcttctgatcttctctcttgctataacagaggcactatttatgtacgcaatatatacaatactttggcgcatattcctgccttggattttcaggagtcaaagtttaatatgtggagtactgttggtgagtcttttaactcttttgaaggctctattttccagtatgtaaaaatacttacagttgtccttttatacattgcattccctttttcatgtatgtccttatctattgaagaaccttgagacccattttctgttaggggtaggcagatataaaccattaactgaaggctgaacgaacttaagtagcagtttgtctggtggcaggtttggtttttataattggctgcttcggtgtttggttggaagatcagtacttatctcccgtaaatctcctataaaccgagcctcctgataaaaccgaggacagtgttctcaacagatagagcgcgtgggagaccgtgccctttcgtcgcatgatttttgctgacggtggctccacgcacacgccctcgcatgattcaagcagcggacccttgtgggatctggcagactactgcccaatggccatcacacataggtggggcggaagcagattgttcggtcggtttctttagtaaaaaaaacaaaaccaaatcgaagtagtttggtttttccctgatgagatcggttggtgtttcttaaaagccaaaaatccaccaagcggtaaaaatcgaaccgaagaacctggacgcccacccctactttctgtaattgttgaattctctctcacaaagacacccacatgtctcatagtcattgttccttttgaatgttctacttgcctacttcacttatccatctccgctccttttcatttgttggtctttgctatgcaacattgttggaatagtgatgttattctgacttctcttttttgtttgtgaaggcctttcttccaaaggagaaaagaactcatctgaggtacttcatatacacttcatgaagtaaactgcaactttgcctagtgactaagctttaacgttctgcaggactgctctgctacttacattaacaaaaaactcaaatcaaagttcagcaaagcctggatatcctttctcaagctgccacttccgcttgatgtgtacaaggaggttaatctctaatttatcttaaagcaattagaaatgatgtgatgctgctatctctctctttttttttcttggcttgaaaccagaccttcgccctttcaacattctacaataagtagcaattggtctcaattgcttcatctttaactttttatgaatggtataagtgttgcatgagcactcttgcaacagcaatttttccgaggatgtaatttacttatttacatgtagccttatggacttagtttacttggagtactgtaataattcaatggccaattagggtgatgtaactatttgttcaacaaattttgttgtttgctgttgccacactaagaattttggtcttgttttgtgatactgccttcttttagtgcacattaactgcgagtactgagcagtgatgatctataaattgcaggtccttgcaacaattcataagaatgtaattccttcaatgtcgaacccggccatcttgtggtaggttattccatttgatctgcatatttgtttgacaccattaatagaattctcataacctctgtattttggtgttgaagtgatttcttgactagatcatatgacattggtggtgttatcagtgtgatggccctaagtggtcttttcattcttatgacacaacatggcctggaatatccaaaattctatgacaaactctatgcattactgactcctgctgttttcatggcgaaacatcgggcagttttcttgcaagtaagtatctcagtaaatatgatgtggcattatcatctgttaatcaagtcatgtcaagtgtaaactgattgcagcttggactgttactccaccaacactttctatcgtcttaataaaatgactgccacacccagcatcacgtttttgaaggcgttctgtaggatttctataaatctaatttttgtagatatccattttccagcaatctgtaatatacttggttaggtcttaggcagtaatcactcgtcaggcggtacagtagcagaatacccaatcttgatgtgatagctaaaaagagaattaatcatgcaaaaggtttataccagttatggcatattagacttgttgactaacctgatgcctgcagcctcccacatccaaatacacctgtggtctttttaatatccatcggattggataatgggaaccaaggaggggtatgtttgccacctgctttggcattgtttgtcactcgctttattctcttaagccacaacttgcagccattgagtgacattctataaattgtggttgtggaaaaagagatggcacttgacacccttaattcatgtagactcatgggtgcaactaagcgaatcaaggcactaaattgtcacccatatgtttgagctatgaaccaccaatcttcaatccatgaatcaactcgataatacaagttaatatgagattttttttgtgcatatttctttttttaaggattattttattattcttaccatctattatggatttcctttttacattttttgactttttttttaaaattgcagcttctggatgcatgtctgaaatcttcatatcttcctgcatatcttgctgccgcgtttgcaaaaagattgagtagactaaccctttcagttccacctgctggcgctcttattattattgctttaattcacaatctactgcggagacacccgtcaataaattttttggtccattgggtatgttacttgttgtaccctttggtgcatatatataatatatagtagctgctgattgatatccttccctgggcagccactttgtgccaacaaagtgaatggcatcatgttcatgtagtccacattctatgttcttttttgtgttgttccgtaagctgtttgtattgctcttctgaataattttcaggaaattgatgcaaatgattctgaaatctttaacgaagctagtcaacgtaagaaggttggcgctgatcctttcaacaatgaagagactgaccctgcaaagtctggtgcaatgcgtaagtgatacctgtatcaaacatatttttcttcatttcatttctttgcaatcctgaattcctaagttgtcagtggttttctgcataccatgtactaatacttgaaaatgcacaacaggaagttctctatgggaaatagacacactgcgccatcattactctcctgctgtttcaaggtaccgggaagcttgatgccctgtttctatgacatctacatttcttgtttgattgtttagctcatttattgtgatactgttaactattgtcagattcgttgcttcacttgaaaatgatctcactgttcgggccaaaactactgagatgaaaataacggactttagttcaggctcctacgcaacagttttcagagatgaggtttgtctgtccgataccttacactatactcaccctcgtatgtatgcctgtatgcatgcacatgtattttacaccaatgcgcaaaatattagggatatgttacatccagcgtacctttcactagatttcaccatgtgttctatgcatatacatatgaaccatgtttacatggttttttctattgaaatgaatccgacaaacctgcttgtttttggagttattgttaaaccaaagtttagtcttgtcacttgtcttatccgctgccatttgagtgtctattattaaataatcactgggaatttactaaaaatctaccaaccctggttttgaattgtaggtacgacggcg

SEQ ID NO: 6100 - DNA, 14622 bp, Oryza sativa
ccggtgcacgccggcgagcgggatggagtagtctacgagcgacggcgcagtacagagtaggaggcaaaccctagattgatttttcgtgagttgcgtgaagacggcaagtcggtttatatagagaagggtcgcttgatcagggcgcccgcacgatctctactgcgcgtaaccgaaccggataagtcgcgcgtaacttatccggactccatgccgtttgcacgcaccggatttttcggaacgtttccaaaacaaaaacgaatccgaatttgcagcaaaacaaaactgcaaaaggaggctgcatctgcgcaagggtgaggagccaatttttcggaccattcgacgcgtacgtcgtgcacgcgcgccgcctgcccggcccggcccggccaggcgagcgagcgcgcgcgtgtgtttcccctcttctctccaccacacatgcttcaagcgactaggagggcatcctcccttttaaggaggtccccctctcctagaataagcaaggtggtactaaactccacatgcatgccatcccatgaggtgggcttttgtgattttccaaagaattaatcttcgagtgggctaaggcccattcattaattccaacaatcccccaccaaatctcaaaatcccactgagatttgccttttccaatgtactgtttatataccagcggttcgatggagaccaattaaggttgaacatccacctagaactccaagctacacttactcacaacttgaacaatggactacgccttgaattgcaagtcttgtgcaagcaagtttcactcaaagtcttatctggtactagaccgtctgtagactacccctcgggtggagcgtataagtcatactcctaggtctttagtaatcttcctagaagattcacccaaaatcttcatagactgcgaccaacagtcaagctcacaaaggtgagttctttcaagaatgctctgcaggacaacatcttcgctaattaaagccaacagaactcattaaggcatagtcaacctgccttgcagctcacaagagtatatgcatcttcacttggagagggtatatatattggtactctcctctagtttattaatggtttgttcttcccaggatctaattcacgggatctccgatcacatagactgggttaccaccatagtataactcacatgggtctcaagcccatctccttcgatgcattgtctatcacatttcgtgatagtcccttcgtgaagggatctgccaggtttctcgctgtttggatgtaatccaacgttataactccggagtttcttaatttcctgacagacttcaatcgtcttttcacatgtctagacgatttcatattatccttagaactattcactttgacaattaccgtttgattgtcacagttcataaggatagccggcaccggtttttcaacaacaggcagatccattaatagatcacgcagccattctgcctcaacagtagcagtatccagtgccgttagctctgcttccatggttgacctcgtcaaaatggtctgtttgcaagacctccatgaaacagcaccaccacccagtgtgaaaacatatccactagtggctttgatctcatccacatcagagatccagttagaatcactataaccctccagtaccgcaggatacccagtatagtgaagccccaattccacagtacctttcagatagcgcattactcgctcaagcgcacgccagtgatcatctcctggattagaggtaaatcggctcaacttgctcacagcaaaggagatatcaggcctagttgcactagccaggtacatcaacgatccaatgatttgggagtattccagttgattcctagcaattctcttgttcttgcgaagcaacaagctaggatcataaggtgttggagaaggcttactatcaatgtagccaaagcgatttaagatcttctccacataatgggactgcaagagtgtaatcccattctcacctctaattagcttaatgtttaagataatatcagctactcccaaatctttcatatcaaaattttgagacaagaatgatttaacctcatttatcacctcaaggtttgtcccaaatatcagtatgtcgtcaacatacaagcacaaaataactccctcacccccaccatggcgatagtacacacatttatctgcctcattgactgcaaagcctgcagatgtcaatgttttgtcaaatttctcatgccattgcttaggagcttgtttcagaccatacaaagacttcaacaatttgcacactttgccttcttgaccttcaactacaaacccatcaggttgatccatatagatctcctcatccagctctccattaagaaaagctgtcttaacgtccatttgatgaacgagaagaccatgtgaggtgctagggaaagtagcacacgaattgtggtcaatctagcaacaggtgagtaagtgtcaaagaaatcttcgccttctttctgagtatagcccttagcaacaagccgagccttgtacttttcaatagtaccgtcaggcctaagcttcttcttgaacacccacttgtaccccacaggtttacacccatagggtcgctctatcacctcccaagtcccgttagcgataatggaatccatttcactacggacagcctccttccagtagtctgcatcaggagatgcatatgcttctgaaattgacttaggagtgtcatccacgaggtacacagtgaaatcatcaccaaaagacttagccgtcctttgtctcttactccttcgaggagcttcactgacatcctcctcagagacaagttcatgtgtatgttcagtttgttctggtggtgtgattgaactgggaattatttcagagggttggttcgaaccactatgtgtatccttcattgggaaaaagctctcaaagaaggtagcatcacgagactccataattgtaccaacatgcatgtccggtacctcagatttaactaataaaaatctataggcaatgctatgataagcatatcccagaaaaacacagtccacagtcttaggtccaagtttgcgcttcttcgttattggtacattgactttcgccaagcacccccatgtgcgcaaataagaaagtgatggttttctaccaatccatatctcatatggtgttttgtccttatttctgttaggaactctgtttaacacatgatttgaggtcaacaatgcctccccccaccatgccttaggcagtcccgcggtgtccaacatggcattcaccaagtcagtcagtgtgcggttcttcctttcagcaatcctattagactcgggagaatagggaggcgtcctctcatgtatgatgccatgttcctcacagaataagtcaaactcgttcgagaaaaactctccaccacgatcagacctaagcctttttatctttctgtcaagttgattttcaacttctgccttataaattttaaaatagtctagagcctcgtctttcgttttcaacaagtacacatagcaaaatctagtagcatcatcaatcaatgtcatgaaatatcgttttccacccttcgtcaacaccccattcatttcacaaagatctgaatgtaggagttctagtggtgccaagtttctctcctcggcagccttgtgaggcttgcgaggttgcttcgattgcacacaactatggcacttagaacctttgacaatggaaaacttaggaattaaacacatgctggaaagccgagacatcaagccaaaattaatatgacataaacgtgaatgccaaacattagcctcatcatccacactgccacaaatatggttcacagacttattgcagaaatcagaaagggaaaagcgaaacaggcctccgcactcataacctttaccaataaaatatccatgtttagacacgactactttattagactcaaaaaccaacttaaatccgtttctagtcagacgggagccactaacaagattcctgtcgatagaagggacatgttgcacgttcttcagctgcacgatctttcccgaagtaaacttcagatctaccgtgccaacaccatgaacagaagcatgtgacccattccccattagaacggtggaaccccgtgcgacctgataagaagaaaacaatgagatgtcagcacaaaaatgtacattggccccagtatcaacccaccaattagtagattgattaactgaaaaaacagtaggtaaattaccatacccgcttccatctccagtgttgccaatggtcacattagcagacttagaagtctgccctgcaggtgccttcatccccttgcgctgtggacacttcctagccagatgaccaacttggccacacacaaagcaagtcctctcatcctgattaggattgttgttgttcttcttctgcttcttgaagttggtggtctgctgagctttgtatttccccttgctcttgttctgggccttgtgcacaacattggcactggactgcccaccatcgcccttagacgcggcatctttttcccgagctttctcctcaacatcaagagacgctatcaacccctcaacggagtattcctgtctcttgtgtttgagtgcagtaccgaaacttctccaagatggaggtagttttgcaataatgcacccggccacaaatttgtcgggtaagacacacttaaggagttcgagttccttagccatggtttgtatctcatgagcctgttcgactacaaaacggttgtcagccattttgtagtcatgaaactgctccatgatatacagatcattgctagcatcagtagcaccgaatttagtattcagtgcatcccacaactccttagcgtcggtcatatgcatatacacctcgaccagacgatcaccaagaatgctaagaatgcatcccacaaagagagtagtggcttcctcaaattgcttctgctgttcagcagtaagaactccttcaggtttgccagtactcacccagaagcatttcatagctgtcagccacagagtgaccctgatctgccatctcttaaaatgcacaccggtgaatttatccggcctcagtgcatcggcaaaaccagccatagtaaaatcacagtgcctataataaggtttttggattgttgagattatagacatataatgatttaatctattccataaataaatcatgacattacagatgaaaactagcatgaacgcatcattagatctacacatgtaaactacacggtataacatgaacagatcaaatatgcgcaacatattgaacacgtaccgaggtgacggaaagaccggctgcttggtcgaaacttttcgcaagtgtctacgaaggcacgaaacacgcgagcgaagaggaaggcgagccgtcgcgaacgaacagggagcagtcgcgcgaagcgctttccaaaaaccttattgccgccttctcccggtgcagaacgtcgaaggcagaggttccggagacctgctctcccgatcgccggtgcacgccggcgagcgggatggagtagtctacgagcgacggcgcagtacagagtaggaggcaaaccctagattgatttttcgtgagttgcgtgaagacggcaagtcggtttatatagagaagggttgcttgatcagggcgcccgcacgatctctactgcgcgtaaccgaaccggataagtcgcgcgtaacttatccgaactccatgccgtttgcacgcaccggatttttcggaacgtttccaaaacaaaaacgaatccgaatttgcagcaaaacaaaactgcaaaaggaggctgcatctgcgcaagggtgaggagccaatttttcggaccattcaacgcgtacgtcgtgcacgcgcgccgccggcccggccaggcgagcgagcgcgcgcgtgtttcccctcttctctccaccacacatgcttcaagcgactaggagggcatcctcccttttaaggaggtccccctctcctagaataagcaaggtggtactaaactccacatgcatgccatcccatgaggtgggcttttgtgattttccaaagaattaatcttcgagtgggctaaggcccattcattaattccaacaattactgcgctatggactatgaagaaaccctaaacgctgtgaattgaaggtgattataagagctcactgttccaacatcgtgctgtcctagtgtcctaaatgaccactgtttttttctataataccattaaagactcttaatagctccctgacaaaactggactcttaatagttactaatcgtccttttaggtcggccactccagcgcaagataatgaccgtttgttgagcacattccttcatttttcttaggtgaatatgtttgttgttttatgtactaattctagagcaacgcccttttgttggttgaaatgttcaattagtatatcggacatgctcatgtgtcccggtggtccttttgatttgtttgattcgggatgcaaacaaagtttgggggacacctgccctgtattttagattgtggatccaatgtcaccgtcagaataatcaatttcagtttcggtgactccatatgaaaatcttttagtgattctaatgatatactgacccgtaagaaaaatatgggaaaaaaaagggtgttcccaatctcaaacttatgaatatccttttcactaaaaccatcgaatgatatttgctgcagcataagttgcctagttgcaatgcaacacagagcggagcaagacctttggacacggtgagaccctccatttttccacagagaacggaaagggacgcagcggcgaaagcaaaagggcccggaaaagtgcaccgcggagggcccacatgtcatggagcacgaaaccggggcttggaaaggacacgggacttttaaacgcgcagcggagcagtagcaagacgaaagcgacggtggagacgcgcagcaccggttccacgctccctttgtccggtgggcccgtggcctgtgtgcgcggtgggtacgccttgggtggtccgccatctcggtataaaacgacagccacagatattttgtgcacacacacacgtagctgtaccgctccaccatatgcaaatgcaatcctactctacgtgcctatatacgtgtaataaaaaattcgtgtggtgtatatatacacacggttgaaaaagtctctgctggtatatccgtgtgcataaaacatacgaataatacatgtttactgtaacacatatactctggtatttggtgcggtggtatgtttgttcaagaaaaagggatatgctacgagcctattgagtctatgactgttcctcttattgcttctttttgctggactcgaaaatgatccgagctactagtactttttttttctccaggtccacggatgcaaaccacgataattgaagtctgtgttcagtgacgacacttacttttttttttcctttgattcgataattgaagtctgtgttcagtgatgacacttactgaatattttccgaaaaagaaaatcacttctagaacgtttttaatctactgatttatgattgctagtttgctacgtacgtagttttatatccgaagtgacccgaattaggtagagttccaatatcccgtgaggccgtgaccaatcgccttcttccatggccattaaaaacttttaacgctacaaaacgatagaggtaagcactatctctcgatgctctgcgtatctgaagctcaagccatcaaaatggctgagacgcacatttgccatcagttgcttcgcttccaatcgcagtaacgtttcagagatttttgggatcaagccctttggcatgctaagtgactctttaaacaagggacaagacatcacacacaacgtaattcacctaactagttcatgtttgatttaacccttcatcaccattttttttccttttcgcaagaacatgcacctagacgagacgtacggagtactattgaatccattttctactcaccctgttcctagtctctgtacacgactgtaccgtattcgccgccttgaaagttgaaacactctacaggacggtaaattcaccatcatcactactagcgactatatctaatcgcgacctgtgatgctggctaccgtttaagtcaagcgagacaggtgccaaaaacaaaagcgacggtgtttgacaacgggatgtggtgagatcgccgtcagggcagtacagcgtgggagggagcttgccccagatgtaacgttacaattgtacactagctacatagatccctcccttccatgtcaaaacaatctgtggacagtgagccatcatgtagatgcagctagctaatgggttgggcctaatgcatcgatctaaagcctaaacccatggctaatcgtgactcaccagctaatcaaattttataatctgtagtaccaagaatccaagattaggtgatctaatctacctctacaaaggacattaaataaataaattaaataagtgggcgcagtacgtaagctaactccaatgccgctagtagtaagtacataattttaacggcattcacatttcataatcccagcattcattaatcaactgtgtgctattaccgcatgtactgtgtattcgggatttctgatggcatatgcctccccaacgaccagcaggtccccggtacagccagcagctagcattagcatggggttaagttttacgccgccggttgagcgcgtctccaggcactggcttacactataattttgctgagaccaccatcgagattcgtgcgtacgatcctgttacaaaacagaagaaatcgcagtgcccaacaaaagtgagcaaattattggtgatgggcagcactagttaattgtgtgtacagtaatcttggtggtattgtggtcacctttggacgctgtggcaataaacgtctaaagaaattgcgatcaaagcacggacctactacttgtactaggctagtagcaaggtcagtaaagtatcccatgtggagtaaaataaggacaagctgaccccaaaatttggtctcctggattccaaccgggccgcgtctctcgctggggagacattcagtgatacagctggatggacccaacgatctcgcgtttttcttttaagcagcacaaatctgcttttgccttgctttgaactgttcggtttggtaaatcgcggtaatattcgctcgtctcatacaaaaaccttgctgtgctagaaaagtttgtgcattgattcgtttgctaccacaagagaagtatacgaatctagtctaggaggggaaaaaaaaagttaaaattatggaggcacgtaaaaccaggatcggttgggacagtcaaagctgaagaagagctgtgcacttgtgctcctcgccatcgccggaaaaatgctcctgcttttccctgtcgaacgtggcaaggaaaaagatgccggaaaatcaggcaggaaatcccacacagaatcatgggctttggttgtattcctttaacaatactcgggagcatctaatcctacgcatctaatggaacttttaaaagtagctataatgtcagtttggcacaaattatatatctgtgtttgcatcatcaccggctccaatttgccggtcagtttttttattctgttgtgtttttctttctatcattgttgagctaatcctgttttgattgtagatcgatctcatcgacatgtatgtatgtagtagtttatgggattcctgattgctccgttccatccttgatctttcaatatgactcaggttgccatcagtgagattgcaaaggggacaggaaatcattcatttgagactcggacgttgccggatcgacagcatctcaattctgaaactgtggcaaaagctagcgaccaaacctgtaatttgcaggtaaaggatgggttacagctaaccgtatcagacttttcctgctatagagacccgctagtctgttgagatgttgagttgtaacggtggcgccactggtttgatttcctacccctgaagttctgaaatctgaacttcgcaagctgcagcactgcgagcgtgcttgtaatgttcaaacctaggttgcacctactagataagcgtgcttattatgtgtcacaactcacaatgtcacatacttttctctcattcggcacagtttcaatagaaagcatactaaggctgagttcggatgggggagatgggaacccaacttctgcgcacggaaaacggagcagtccattaacacgtgattaattaagtattagctaatttttttttaaaaaaggattaatttgattttttaagcaactttcgtaaagaaactttttacaaaaaatgcaccgtttaacagtttgaaaagcgtgcacgcgaaaaacgatgaagagaggatggaaaaggtgcatgcgaacacagcctaagagtcagcctaagagtgttcataaaacttgttgggtttcacacgcttacagttgagcccagcaaaagcaaaagtagggaagcaacaagtaaagcaagcctcttcggtttcaaatatgttggaaccggggttttcctctctgtttctaaagaacaagtaaataagcttgcatcgacatactaaagacacaactctgtgttctcatcataaagaaatctactccatgctaacatctagaaggaccataaccttaacttcaagaacttgtttttctgtcaggactccttgggcacttagattttgcagcttggcaaagggacaggcccttgatgacctccaaatccccctaacagcttcggcgaaacaaacggcttccactgttgcaaaaaagaaaaagaaaacgacaataccttgtaagccagctgcaaaactttagtaaaaacatttttctttaaaaaaaacatgtccatttcgctgcctataaaacacctaagaattgctaagggaagtaacaaaatgtacatgggggacagttcagttggagaaaaaaaacatatttcattcctcaaaagcagaacacagcggccaaaaaaacaggaggcaaaaatggaggagagcccatgaatcgatcgcctagctccaatgttctaaccttgagaaatgagaaaaaaaaaacaaaccaagactcgcccgaggaagctagggcccaactcggcccaagaccctcaggcgcgtgtacgcacgtagtactagtagcaccagtccccctacaaacagaaacagggtcgcgtacgttttattgttgtgaaaatgtatttgtctccgtcgtcctgcccgtgtcgcaccagaagtcccgaaaataaaaaagacgtggcctccccgcgcgcccgacgcgcggatgcggctcgatcggtctcacacgcgcaacgcggggcctcgcgcggtgccccacgggttggcgtcgatggccggccgcggctgtggctgctggtggtggtgccggtggtggtggtggtggttccggtgctccttccgcaccgacaccgcgtgcgccgccgcacgcttcttccgccggtgcttcgccctgtccacctcgatctgctgctgcctgcactcctcgctgcagaacggcgtgtctcccctgtgcacccacgccacaaaacctcaacaaacttttgcgtgcatgcatcgcggtgaaaggagggagaggacaaaaaaaaaaaaagctttaaacctgtacatgaagatgtcaccggagagggacttgccgcagagggagcactcctcgaggaagtggtggatttgggcgacgtccgcctcgtggacgtagaacatggacgacggcatcgctgcaccgctccccttcatgcctgcggcggcggcgttgctggctggcttcaaagctagctagcaagcaaggccccggcctgggcacgagcgggaagagggagcaaaattgcccccccgagtcttggcactgcactgtcaaggatctcggctggcttgacggagctccggttcgccggaggaatgtacaaataggtcgccggcacttcccatttttagcctcggggagacaaggagaggctgggaattggcagcgtccgacggcaaacctatgaatagaagcggacgccaatcaacggagcatgacacgcgtgaaaaatctgcgtatactttgtttggttttgtgattcttgtttactgcaaaatttggaacaacacactactggccattggagatttagtgaggaaatgggagccattaaaatcaaggcgtctgagatcattcttagggacaatgaacacgggggctaaaatttaaaaacagcgcatagaccgcaggttcagagagatgaagacatgaagtggatgcccccttggcacgtgattcttacttacagatagttactaggcagtatgtacgctgttttggaggttgtttacctacctcaacaatcagtatgctgtttgggcaggaaaaaaaagggattatggagttcaggcagtcttgtttacttagcactttcttaacgtgtaatgcttctgttttactgccgcttcaaaagttatggagtagtatattctgtcaatctgtcgtggttgcaagaaacattctccaatgtactacgcggtcggtgccaccctagcaatcttgttttcttcctttttctttcttgaaaatgcgtgtgcgtataatttactactaccagcatatactgaagtaggagcactattatgttattgacattggtctatagctcacatgtgtaacatgctagcagtacatgtgaatacatacaccacacctcgatcaacatgtctttcagaaattatacgtagatcctacctgtacgtatcccacttgtccatttactaccgaggtcattttcttgacaacaacgctctgaagaagaaaacatttctcgtcaccttcactggcgtctgttactattgacacgacagcaacagcgtacgtcaacctttttgaaaccggtgtgccgctagctaatctcaccgggaagaatcaccctctctattcatccacctttttcctccgctaggagagggacattttggcccaagtccagccgagctgaggtaagagcatgtacaatagcaggctataaaccagctgcaaacatattttaaggagataaataaggagagagaagaacagctggctactgatttatagctagttgtagcacagactccaaaacgcgatgtgtgtatgacagataagaccatatattaatagtgtagtatgtaactattgtataaataagctattagattgactatagattaattggagctattagttggctatactattaaacttgctctaacagtagccaacttcgccacagcaacactctctctctctctcgcgagccgtgcctgcatcattgttccatgcaggcgcaggccgtgtgtgagtagcatatgcaccacatggttcaccgcgacttcgctaaaccgttttcagttggcgtggttagtactagtagtgcaggttaatctagcgccacatgggtgagacttgagagagctatagtattgtgtggtctctgctatggttgtagcgagcagagggggcaggagcgcggcagccacagcgcatgggcgcggcgccggcacgtgcgtgcgggatgcaccccccgaaacaccggcacacggcgagatgcgctcgtctctcgctcaacggctcaagtgctcgtgttggttctcgctggctcggagaaggcgtaacgtggcgagggggaatcgggggaattctttttgtgtcgccaaaggccctagattgcctaaaaggattctctcgggtgcacatggggcgcaacttggggagccacagaaaacggtgaagaaaaaaatccacggcgtggccgaggatgattgatttgttatcgctggttgtttgggctttttaaagtccggagtacgcactaatgccaacatgctttgcgtagtttaattcggttgatggtgaacaacgttgggcgtgacatcatctgctgtagaaaaaacgttagtgtcctactatggctacatgtaccggcagattttgcccttaggtcgtatacgtgagactgtcatgtgggccctccgtttatttttcttttgtggaccgcctgtcaggcagtgttgttgaggaaacgatacggagaagctgtgtctgcaacgctttgagataaaaattgtccaactgctagtacttagtagttgctatagccatttacctcgtgtaagtttccgggaagcaaggctgcacgaatgacaatactaataacaaagcctgcgttgctttcttcctttctttattaccttcccgactttttcgtcgtggagcaaactgtctgttttactacaattcagggccgatattttctcggcgaggaacggaacgaacaatttacctctgccattgatgacggaccagctgctgcaggaggtaccaacatgtctatgatctactgtttgtacacggtatagcaggcggcgacgacattcaatttctgcatcgaacgtacagtatgaattctgttcagagggcaactgaataatggccgctttaactgtattttcatcagaaaaagaacatctaattgtagctgcagcgtgagctctagtagagtactcccttcgtttcacaatataaaactttctagtattacccatattcatatacttcatccgttctacaatgtaagtcattctagcatttcccacattcatattgatattaatgaatctagattcattaatatcaatatgaatgt

SEQ ID NO: 6101 - DNA, 70376 bp, Oryza sativa
aaatgctagaatgacttacattgtgaaacggaggaagtagatgttaatgaatctaaacacaactatgcgtttagattcataacatctatatgaatatggacaatgatagaaagtcttatattgttaaacggagcaagtagtaaaaaagctacgcaacgaacacagcatggagtactaggaaggaaatcgaccgaactaatgagaaatcggagagagctttttacgccactcactttttccatatcaacaggttgcattacaagcacacacacaatgacacaaaacgctgcaccggctgcacgcacgcaccatatttttttgcgaatttgcaaccgtgccaagaaagtaaaattcacacaccaaattgactcctcatctccttgttgcggagatcaggaggaaggaaccgaacaatttcatcgcgaaaagaaagacgcagccggtttgcttctgcttccccgggcttggctttcgttcccgtggaactgtttgatccgcgtgcgctcgactggatctttctccatccgcacacacggtcatggacaagctgtctctcgatctcctcctcgttttttcggttcttgagtttctctaagatctactgttccgtgaccaaaattgtttaccatgcccagaccgggatcctcgggtggctcgccttctgctgcctctgcctctcctgctctgccctccccgtctgcttcgatctctgctctctcgcctcgtcgatctcgatctgctcctgcctgcactcctcgctgcagaagggcatgtcacctctgcaagaacagaaggaatcacaacgccattagaaacacattcttccagagagatttaacctgtcaagagactgacgacagttgtgctgaatatttacctgtacatgaagatgtctctgtttcctccgaggggtctccggcagcggaagcagatgtcgaggtagtggtggtggccgaggaggtcgtcggcgtcgtcgcacgggtcgcagaagaggcggccgccgggccgccgaggcgacgccgcgggcttcacgggggaggcggagtggccggagaagccggcctcgatgtcgtcgtggatggaggtggggtggtagcgcgccatttcttggcttggtttgcttcggccttcggcaaatgagctctctctgttttctcgtttttccggttgggaaaggggagtgatggcggagcgggagaagcaactcgggttttatcatggagggagatggacgggaaggggagatttccgaattagtcctccactgttttgtgaatttctttatgggacttggtgtgttttggctttgtgtagttactgaaatctacatctacattgggctcttttgtaagatgggataattgtggaactttttatataggctgtgtttggaacttccggttccatcccctctctcgttttccgcgcacacgcttttcaaactgttaaacgatgcattttttataaaaagtttctatacgtaagttgcttaaaaaaatcaaattaatccttttttaaaaaaattagctaatacttaattaatcacatgctaatagactgctatgttttccttgcggggagatggattcccaatccacaagtaacgaacacagatgttccttgctcataagagcaggtttaatagtatagtcaactactagctccaaatcatttataactaatgtaatagccaatttatataataattacttactgcactattaatacctggtcccatatgtcatacattacgtcttggagtccgtgctaaagatggctatagatctatagcctgatgttttttctctcttcttttatctttttaaaatatttttatagctgatttatattctgttattatacctgatctaagtgcgaagttaacatctgccgagttgtttaggcacaaatctcaatctctattcgagcgtgtagagttgtatttgctccgtgacggcaccaaggaaaacaacaagcactagctatcagaggtaaaaaagaaatggcgcctgagacagagagaccaatagcacggcttccacatatgatgtgtttgatgcacttgtcagtcacacgattactaattgggccatggtcaaatattacgaaaaatatacgaattttaaaacaaattaagtggttctgttatggtgtgcgtcattgtgcatctctcccgtatgatcgaaaagaaagcaataatgtatacactaaaatttgtgttgttgtctaaaaatatttattatgtggagtatgtgttaccatggaaaaaacaacttctggttcagtgcgtgggcacctttcatacataatgtaaatatttaaaaagggtgtactattattgtgtgtctgattgtgcatatctcatgtatgattgaagagagagtaatattgtactacctcgttttttaatacttcctccgtttcatattacccacattcatatagatgttaatgaatctagacatatatatgtgtttagattcattaacacatgtatatatgtggacaaggctataaagtcttataatataaaacaaagaaagtacataacattgttaacttttgaatacatgtttaactatttatcctatttaaaaagttaagtaactgttatttattttgctatgagttattttataccaaaagttctctaatatgatttatctataccatcttaaaagattctggtggtggtggtcctgccacctccatttatctgacaagcaaggatcaccatctatcatatgggctcatcattttttatcagaaatgtactagagtaagaagctctattttcttcatgtacagtgtacaacgtactgtttatcctatcatcgttaattagagtttgagagtgatgatttagttttaatcagttcatttaatataattggagcccgctgtaacacacgagtttgcatcattttttatcagcaatgtacgggtattatacatttacacaatatttttttaatattttttaataagatgaatggttaatcctatgttcagaagtcaatggcgtaaaaaacaaagatagtgtaaattcaaatttgtgctataatctgtacttattaaatttgtcttatcatggaaagggtgtcttccgtatgatgcaaaaatgaaaagaaaaaaatcatctcaaagttcaattatacatatttgtatttgaaaattgtgagtaggacaaatatcgatttaaagtactcctaagttcacctgggcagcaaattaaaggggaatttattaatcggacccgcgtaacatagcgtacaaactcgctttctctagaaggcgtcaggtcaggtgaccaacaagttgcacggccgcaaggctgtcatcgttgagtgccgttgctgccgcgatgaatcagcctagtggtccgggcccggccgcactattgttctacttcccgtaccactgttcatctcatcaagcaagccggtgtccgtctcatgactcgaattatcaaaccaaccgtctgataggtgcacgtattttttttctcaccaaatcacgcagtttcttgttcacaacatgtcacgtccgattggacggactgaacaattcaggttcttctgagctgagctgagctgcctgcaagtagatcgccctagtggctggccggtggttggctcctggttttttggtggccgcattcgccttacgcatttgatcgctatcaggcttgggatctcatctcaccacccaaaaccaaaaaccaaacagcagcgcagccggtggtgcagctgcttgatttgacgacaattctgctcaacctgaagggaggaaggtgggggacccggcaaattgcgatctcggaggttaatttactcgaaagaaaccggccaattggagggcctggcccctactttgcgtcgccttttcttttctttttttgcttttctatcttgtcgtttttgatgtaccgtgtgctgtgttgatggcctcttttttaagcgtgccatgcaactagggcgataaaggtattggtgcatgattcgcatgagagaatgtgagactgatgagtgtggcgggggataggcactgaagggcaactatgcaagtaggagtagtagccaaaaggatcaattgtttttggttgcttatataacctgaaatctacgaactactccgtacttttttttaaaagaggttctacgagctacttggagtaacgtgacacatttgttcaagtatagaaaccgaaaaaatgacatgtatattgcagtgtttccactagtcccccactactaaaagttttattttgcatatggatcctggtgagtgctgtttttacaatttctatctctccaaattgtcgtcgtttgctctaggtctgacaggttgtggaaaaatatacaacgaaaccataaataatttatggtattgaaaaataagctacaatgataaacctcaaaactaactctaaaattaagtttaaaaatttaaattaattttgactatggttaataaactaacaagtaaacgataataagaacaacgcttatagcattgtgtcacataatttatgacatatatgcaacttacgacgaatatgtggaaaactagcgtatgtgtgaagcatcttgcgtggtagcttatgtgacacaaagtaaaaatggagtcacgatataaaagttgtattgttatttttgctgttttgaggggactatttctacaaaagttttgctatgaatatgttaaaaaaatgtttccaatttcaacccccatcagtcatgtgctcattcttcttccctccaatggttgaagctattccaactccttttagaacttaattttagaatcaatctaggagtctaagagtagaagtatgaaagtattgccctcgaaattatttttagttgatcgatcacgcatgtttggctacataagccatagctatagaaatacattctagtcaggctcttaatttattgttaatttactataccatacctcataccacatgaaactattaggattgttaaaaggctatatctttgataaacaagatgaaactttgttagtgtaaagcttaaaatcaagggcttaaatataaatacaagaaagttgaagacagattggaatacatatatatatatatatatatatatatatatatatattacatggacttccatgtaaagttccttttttttaaaaaaaacttattgattgcttatacatcatacatacggtatggccttgtcaaggtcgctttctttgacacccaatacattggatgacacctttcataataaaaaagaatctctctccatcaagctcttacaaacagtacgaaccggtctcaccactgataatttttatacagaaatcagaggcaactccaagtcatcaaccacctttattaagttggagtaggtctccatgttaatgatgtcaataattgatggattttttagtgctattgattggccagttttttgtgcttacttcactcctcacacacgaaatatataaaacgagagcctttaatttattcctacactaaaaattgtaggatttttttctgctcccagaattttctcccttttttaatcaaaagcgacatctgaatattaattagtcgctgctggtttcatcgacgagcttgatggatacgtgttttgtttcgacttgcacgtcagtgtcaccggcggaagccagtggccaccgcacgcagtataacgctagctgtatcgtgggcgtacgtcgccttcagatcttgccttttttttttcctttttttccacagtttgttttctgccgattgctggtgcttttacgacgtgtgatgctgtcgcgcgcgacggaagcctgaaaatcgctagattcacaaacagggaaaagggcgctcctgaacgcgcagaaatgcagcatgtcgacatgcagttgtgtatctgggcccctcccctctcaagcatggacggctctgaattttcaacatgccgaccccgtgctgtccgagatgaactgccaggttaagttttatatggatgatttggggacgaactgatcccataacttaacctggcacagttgatttttagtcacttaattactggacttctttgaaaccttctagtcacctagtcgcaagtggcagaggaggctagaatgcatgcagagagcaatattcgtggtttcattttcagtgaaagaattcatagaacaatgttcaggatgttgaacgaagctgcgtccttttgtcaaaagattggactatgatatgatgaaaacaattctttgtacatgcagtcacacttgaccaagcctactagatgactgaatggtgaagtactgccttgattattcaacagcaaaattattgcgatggcttatatatgctagattcttcttctcaaagaaaaacaataacaaacagttctggctgagtcaccagtgaccaataaagattcttaaattccgcacaaaagaacctctatattctccctcccaaaaaagaatatttagaagaacctttcgtacgaacatcagttacagaaaatttccacagtatattagtgactcaatctatgctagatgtatgtgcctacggaaactgtggccttacttaactatatcttctctttaaaaaatcaagtaaaatactcaagggtatcatccaattgtcgccaataaagattcctgtaaaaaaaaaagtcgatcggacactgcgggaacagttttctgatagtcaagaagaagggaagaaaacgtagcatctctagctaatttcttatgacaaccgacaagattttcttttatcttaaaaaaaaaatctaccgcaaacaatggattcagtttctcaactacccaacataaacttgatgcggtgttagctactcaagttagcatcaaccaaacggagaaaacaggtcaatattttgttctctggacaaactaattcaactcccgtacaatatttaattttaactacacatttatttatgtgaagaagaaatcccaaataataactactaatgttttaatatgtcgaggatgtcttgtagatagaagataaactaacacactgcagcgtttctcaaaataaaaacagacacattgcagcggtgtccaaaaattttagtacacaaatgtagaagtacgtgtatgatgggtagactattggtgcctcaaacttttccaattgtatgtagatatgtggtagtgtgggtaaaaatccgagctaaatgtttgtgccttgatgtacttaaaaagaaaacgaggattgctagaccacttaatgcaatccgaatgacatagttaataaatataatacccatacactcgcatgataaccatttccacaagcccgagctcaaatgcacaaaaggaacaaaccagcggtgctccaaccctgcctgtaggcaagaccaaggatccaggcacttgcgtcgtcgccctcggcggtgtgcaccccttccattcattcgagttggacacgagcgttgtcccaccaccgctagtatatgattgatgtcccctctctacagccacaaatgccgatgcactaagttcgtccccttgcctcgtgctcgaggttaccggatggatggtacgatcaccgccgccaaggtaccagacctagcatagtacctcgtaccaaacctgatatctctaggtatcagtcgttacctatagatatcaaatagtataggttaatgtggtgcaccgttacaccgccccactgcacaaagaggtgtgctgccgtgatggctacctcccatctcctcgcctaggatctccgtcaagcagactttgcctcccgcccctcagctccacccggtgctgtccactatcgaggtggcccctcgattgccttagggtggcgaggtgtgatcggcggtggtggaaggccacgtacagcgatgggtgagctcactgaaaaccagatgcacacggtggctattggcccggagggaacgaaagaggaagaggaggtagggaagcggagaggacgcgatgaagagcatgggggaagaagaggctagaaagttgagtaggcacaaacgtggatttcattaatctatacctgtagaagaacccgatattgttcttttgaaagaaaaataactactcgcctctaaatgatgactatgaatgaatcaacatttgagaaaattattagctaatgctagggcacatttggcaagggtgatttgaattagatgtgtcctcacttttcgtaagcatgttttccgacttgctaattggtacaattttttaaaattagatatataaaaatcatattaatctattttaatattttaaaagatagtactccctctatcccataatataaggtgtgcacacattccaatattcaactttaaaaacatttgaccaataattataataatataaattaaattttatttgctaaaattaatatcattggattgacatttaaatttactttaagatagttataattttgttgcaataatccttatagtatatgaaaaattatatgtcagagattaattttgaagactgtgccaagtttgactatgccatatattatgggatggagggagtacgacttaattaattatatggtaatcaatttttttcgtgaggctaatcagttcagccaacgctcatcttcatactcacactttagactgacatgcgggccgttgccactaaaaccactaacagggcccacatgtctggtggcattgacttttcgctgtatgattaaccagcatgaaccaaacaacaacagctcatcgtttcataagcacattgtctccagctacttaggcgggaggctctcactggctagtcctactcatgactcgtcgtacatcatactcattgctgactcagactcgtgcacatgcatgctagatctaagccggcacacgtgtaccagctgcttagccaacatgagtaatcaagcttctaccaattcctttctttacttgcacatcaactaatcccctctgcttaatttacttggacaaacaggagcccttgctgctgttttcccagcaaaggagaggagtatagaagaccacgaattaactatccatgcgtttggtgatggagtcatgtgctcgaatctacacgtacgattaggcagcctctaaacttttgcttaaaagccttaaactaagtaggcaaccgtcatacactcccaaatcataatgcttattccctccgtccttaaaaaaatcttaattcctaggttttcgtgactaacatttgaccgttcgttttatttgaaaaagttacgaaaaaatttaaaaagataagtcatgtataaagtattattaatgttttatcatctaataataataaaaatattaattataaaaaaatcatataagacagacggttaaacgttgaacaccagaaactaaaaattgagtagggcacctagatggccagccttttgcccacgaatcagacggcagcaccacatggttaggcacgcacactgcaacggtgtgtccagattccagaataggccaatcgtggagctaagctcctcctccaaacgacgggaatcatggcagatgttggtgctgcacgccatgtacagaagcacacacctagtgatgcggagacgcttgacgcatctgcagattccgggcgagacgcaagcaaaacaaccgtacacgtatgcatcaacgcacgatgggtcacacaactcacacacacagccttgcgctcgaagctgggcgggttttgtttagtcgagagcgtgccaggttgcgccttgggaaaaccgcgggtggagcttttgttttggcttgtgggagaaacaccggctagctagctccccacactcgagtggctcgacaaatactagtagtacgcctctttgcgcaattgcacgcctgcttttaatttgttgcacagagaaacgtacgggagccaatggggtctcgcgttgccggcgaggcctctttccgggaagcaggcagcggccattgtcgagattggtgcacggctttttttttaacctgcaacttcacggagaagcgcaaagcggattctggcgttattcacctcgagaggcctaagagcaactttaatagcataacccactgctagctccaaatcatctatagccaattaatacaatagttgtttactatactattaatacctgatcccatatatcatacacacattacgtcttagagtccgtgatgcagctggctatagctatagatctgtagtccgctgctcttctctttttctttatctctctaaaatatgtttatagctggcttatagactgctattgtacatgctttaacaggatggcacattggcaggaaattgtattgtatgagtggaatgcatcgaatggctgcataaaggagatggtttgaattgtcgctgccacgggcaggggcgggcatggacggtgcccgtgcatgcgctgtcacggcccccgcttcagcggtctgacacatgttgggttcatgcatccgtccgcgacgtgtcgcgctgcctgaatcgctgtgtccctggagttttctcttgctttcggtgaaagctaggcaacagaaactggagaacggatatttttgctgcagtaattccttgcgaggtgaacctaattttctcgtaaattagtctcgacctgtacacgcacaggcgagattgattgttctcgtaaatagttgaaactgtaactggggatgaaaaaaaaatcttaggaacggctccgttggggtagctatgttttctcatcacaactctgatgattcccatggccatctgatctattggggattttccacagcaaattgattcataagggacataccctaattgcattagagtacggtgaaatcgcgatcatatgttacttgaactcgtgattctgctaaaaaaattgcattgtaggaacttggaaactttaaagccttcccaactgctttggatttacaaagtgatgatacactcaggctctaacgcgcacgctggcgcacaaacgcgacacgacccgcaaaagggcgccaatctgagagccaagacaaggtcgacccgagcgacccacatggcaaagatctcatcttgccgatgaacttcctcagactcttctccggcgccgtcgggcatcgcggccttggagaaatcaatctccttcgtcgccgcatgttgatgcgtggcttagctcttgaaatctcgtctggattcaacgccaattcttctcagctgatcattatattatcgacgcagcttgattagctcgccacggacaccttcctggtctcccggtgcccgcgccgcgaatccgccctcccggagtactgctgctgctgcctccgtccggccgacctcgcgtacaccgcgtcgagctgcatctgctcgtagcggcactcctcgctgcagaagggcgtgtcccccttgtacatgaagatgtcgctgtccctcgtgagctgcttggtgcagagcgcgcaggcgtccagcgcgtgcctgccctgctcgcccaccggctcggcgtcgaagaagaaagcgcaggcaagagacgccgccatggtgatgatgtttatctgagaagcgttttctcggtggtttgtgcttttggctagtgggaagaagaagcgaggcgatgagttgttggtggagctcgaacgagtgggagtgcggggattatatgcgcagctcggtggggcgtcgcgtcgcgcacgggcgggtgggaggggagaaaaccgtggttccgcgccgagctgcgggcgagacggcacacgggtcggggaggcgggttcgcgcgccaaccggaggcgggatggtggcggttcgtcttgtctcacttttttttcaattcgggcctggaccacggtgccgtgtagtggttgggttgggttcggcttggctgccttgatgggcagcgtcaagtacgtggcggacgagaacgacaggaatctagagggggggggggggggggggaaccgcaccaaagacgtccctgttgttgttacagggacgtggagtcagtactcagtaccgcccaaaaaccgtgggctaggccattactcactgctctatcagcaagtggtgataatgcttgcggcttgctacgctttctgcagcaaaagcgaggtgcaacaatatattcgcggcaataatcaatcggaaagcacttggcgcggctctcttagtcggaatcgtgtgcatcagcatcaaatctacatcattacacggccctctaaacagcggcttataaactaatcatgtgccttagggttgataattagcgcgccagcctttttgccaacatatcgggcaggcacccgcacatggtttggcacgctaagagcaagtttaatactatagcccactactgtcttcaattcatctatagtcaatctaatagctcatttatacaatagttacatagtacactattaatatccggtctcacttgtcatacacacgctgcgtcttggagtccgtgctatagctagctacaaatctgtagcccgctgcccttctatctcctcatttatctgcttaaaatatatttgcagctgacttatagcctactattgtacctgctctaataattgagggcaattgcttcccttcccccactgcctggtttgccccacctagcaccatagtagtagtgagcatcgacgtgagctttcaagaaaaaaaaaggaaattcagggccttctcttttctttttctccttttttaattgtgtgctccatgggaatcttgggcgagtgtggcgcgtgcatgcacgccaggtagcaccgtgtgaacagcaagttggatgctccgcaagttggcacgtattctacgtactaattccccttctttgcaagcgaaccgtgcagcatcggtgatttttaatagtgaaccctttggagagaagcatatacttaggggtgtttagatggggttaaaactttttagcccatgtcacatcggatgtttggacgctaattagagtattaaacatagattaataaaaaaactaatttcataaataagagctaatccgcgagatgaattttttaagcttaattaatctataattatcaaaagtttactgtagcatcacattgtcaaaatcatgtcgttattagactaaaaaattcgtctcgcgaattagtccaagcttatggaatgagttttgtaattagtgaatgtttaatactctaaattagtgtctaaacattcgatgtgagagggacttattccaagtccctgaaaaccaaagagccccttaggcagatgattatatttgctgtttcattagccgttagatctcgccaggtttcgcctcggcaaccgagcacgtttttttcagcggtagaagtggtcagtgggggaagcacctcgcagactcgcggttggcacgccacgagattccattggtagtttacggctgctgccctcggcccgggaaaacgggagagatgggtggcatccatggcgttgccggccggtcaggcaggcaggcttcgtcctgggaggcagcttttctcgagatccgcgcgctgtttagtttaagtgcactaggcttagcactgaagcattgcacgtaatcatcggggtttgcgaggtaaatctcgtgatggagatacgcccgtactactaaaatcctcattagtgaggtacaaccagcataatttgtgctatcctcacacagattaagcagcatgcgtggtgagaaatgtttctacgtcgcggtagcaggacaggtccctccagtttgtcgattggaagtattcgcctctgggtcacagatgttgggcgatgagtggggatcacataataaaaagtggtgctgcatctgatgggcgtgggcggcgtcgttacgtgctgctgcatccgcaccgagtcacgctctgcctggtagcaatcggacacatgttcggtcctactacagtaggtccagccaaagccgtgacgcatcgctttatttggactcagcagcgtgactcggtgatgagtagggtgtgagcagaggagttgaaacgttcaatggatctgacgttggagcccctatcatttcctccactttggtcttttctttagttgtctaagtggttgttacctcgcccactgataatccaattttcttaagcagcagtttacgtggcgttttctacttaaaaaaacaacaattagcatcaaatcagctgatttcccactttcttggcacacatgatcagtactactacttcagtagtgttctcgtttactaccagttcatggaaacaacgccagactgaaggagaaaacagttttaccgctcgttcactaaaagaacagtttaaagtgtacagcttcaaagcagcagacgaataaacagacttgctcgaataacagacttgctttgagagcttgcagcgtttgacagattttttatgagggctcaaattatgaaaagtcacgggtgtttcatactcctaaaagagtagacacaaatatgattctgctcaaaaaattatggctcaatagaacttctcggaatgcctcgaatatttacagcggaattgctcttcacaccaactcagatcagctcctcatacaaaaggagccaaccaaaaggggaaaaaaaagagaagcacacatggcctaaattaaaccatggtgcctggtgaatctcggagtcccttcctcagatccgtcctttctctgcttcgactccgaccagatccatccatcggcacagcggccggccagacatgagcaagaacaactccttcatcacatcttgcaagctcacgctcgtctacctaaggtatgcagctcatcaacagctcgccacggacacccccgccttccgggacacgggcgccgccggcgcggtctcgtgcctgctccgctgcccctgctgctgctgcttccgcctggcgctcgcggcctgcctcgcgcaggcggcgtcgaggtgcatctgctcgtagcggcactcctcgctgcagaagggggtgtcccctctgtacatgaagatgtcgctatcgcggcgcagcggcttggtgcagagcgcgcaggcgtccagcgcgtgccgcccggtctcgccgaccggctcggcgtcgaagaagaaggcgcatgcgagggaccgtgccatcgagaatctcccaagcttttcttggctttgcaacctttttttgcttgtgcttcggagaagagagtgaagtgaggaggtaaccgtgaaggggacaggggcggggtatataaccatgcgggggagaggtaggcgacaaagcagcggcgggggtgacgtggtgcggaggcggaaagtggaggagagtgggggaagggggggaaaccgtgggtggttctggaaaaccggtacgcgagacggcccaccggctggggaataccagagtccagagccaccagcgtggcggagacgggacctctttttttttttttttgtacgagtagtggcttttccgtggcaatggcccagtggtgcagccgttgggcaggtgggctccaccgcgcggaaacgacgaaacagcgcgttggatccatcgtgccatggactcatcttgacgtggcacacagctggatggcttcacgagcagacatgggaacactgtactcctacagtcctactaccagcaaatctgttgttgctagctggagtcgcctggttcaacgagcgaagcttagcttccgctttgtaacacaaaacagccgggcctgaggctaacacgaccaacccacatagacccatcaaaaataggttgatgtgggctgcttctttcgggtgggttgggctgtttgcgtaacacctgtaataggaataagttcaccggaggtccctcaacttaacagtgagatttttttgagttccctcaaccacaaaacagaaatgtatacctctagactcactaaaaccgttcaccggaggtccctcggcagtatttttacccggttttgctgacgtggcatcctagtcagcaaaaaaaacacgtggggcccacatgtcagcttcacatcttttttctcctcttttcttctccttctctcctcttctcttttcttttctctctgagcagccgcgcgccgtggccgccgtcgtcgtcggctctccaccgtcgtcgtcgccgtgggcgaggctacgcggcgcggccgtccggcggcggagcggaggcagcgggcggagcggcgagcacggatgcgggcggggcagcggagggcgagcgcctcaacggagcagcggaaggcgcgagcgtggcggcgggccgagcagtggagcgcgagcaggccgcggacagagtagcggagcgcgagcgcggcggcggagcggcggcgagtgagcgcggcgaccagcgagtttgggagggagggggaggcggccggcgaccaagaaacaatcgcttcctctgcctcttccccttttcccgccagtggtgcctctcctagcatcgtcagccacccgcgggggcacggcggtggtggcgaccgagcacgggggagctcctcgtcccttccactgtcttccgcttcgcctagctcgccctccgctgctttgcccaccgctgcgctcgcccgccgccgctcctcggccgcgctcgccttccgctgcaccccctgcatccacgctcctccgctgcacgtaatggcatatatacatgtgagtgtgctcagccatatacacatgcttggctaatatatacgtctgcatgttatcgggcggcaaaccaacaagaagctagctaggctatagctggtcgtctccatgcatgcatatatatgctcatacgaagacgcatgtacatgcggccgtctgtacccggcgtatatgcgtatgagctacgacgtcaagtgctaccgcgaggtcggcgaagacgacgagggtcaccgcgcccgcgccgaccaccgtccacgacgccgatggcacgccgagcgtggacacgctcctgctgcagctgcgcgagctgggcgtccgggaggaccatgggatcaggctggcgacgctgccgccgccaccactgccgctgccgcggcataggaggagcgtgagcgactggggtgcatcatcagccggcactttgaaccacctatgcacggccactgcgacgcctggccgatgtcgccgaacggccgcgccgtgtagcctcgcccacggcgacgacgatggtggagagccaacgacgacggcggccacggcgcgcggctgctccgcccgtagcctccgctccgccgccgcgctccgctgcctccgctccactgtcgggctcgcccgccgtctgctccgcccacagcccgccaccgctctgctgttgcgctcggccatcgcggctgcgcccgccgccagcctgaaggagaagagagaggtgagaagagaaaagagaagagaaggagaagaaaagagaagaaaaaatatgtgcagctgacatgtgggccccacgtacctttttattttttttgctgactaggatgccacgtcagcaaaaccggacaaaaatactgccgagggacctccggtgaacagtttgagtaagtttaggggtagacatttctgtttttgtggttaagagacctcaaaaaatctcgctgttaagttgagggacttccggtgaacttattccaatgtaataacacttgtctatctccacattggacgttttgacaagaagtgggtcgtatgtgtgaggataacacttatctatctccgggtggaaggatatctttgtgtgaggatataacaagtcccaacagacagatcccgttaacttccaatggaagaaggcctagcaacatctcttctctactacttaaaaaatctatagtggtgacggtaactccatacacgcggaatatggatcatgggatcgggagatcagacggtgctgagggatcccatcgcacgcgctcctcccctccgcctgcgatgcatcccctccctgagggatcccctcacggtcctccccctcgactcgcttttctccccacaaggcagctcgcgctcgcgaacccgccgacgctgctcctccgttagcccccgttgctccgcatcacgcagcaccgcgcccccgcaacccatcatccctctcgtcgccctatctcctctcctccctttccctcttgcattgccgtcgctgccgccgtcatcgtcgcgtctcctcaccatcgatcgggatcggacgtcggccagtccctcctcgcctccatccccaatcccctcgccctcttgcacctccatcacgaccaacgcacgccacactagcgccgcctcgccaagcgccacgacctccgtcccgcgacgccgccacatccccaggtgcccatcttctgccgcccactgtcgatccctcgtcgtcgctccacctccatagcagatcccctccctggaaccccctccccttcccacacaccactccctcccattgacgcaccttgatgcacgtctccccaccttttgcccgatcgcccccggaacggatggatggatgcctccacggccacgctgccggtcatcgaagcgccctggccacctccgtcatcgtgtcttgcccgtctccttcgcgatcagccgtcccacccggcgtcgacgccgggagtctggagggactctccaattggtcctgtcacctatgatcttggtcctgtcgatgtccgcctctgctacaccacctatgattttgggtatggaataactgatttatcttgtgatggttagggattcatgttttggatttttttttttttgctttgattcccttcaagctaaggaagaagtttgtacttattcagtgtttcagtatgttgtatctagaactacaaatacaaatacatgatatggttgatgatctgcaattcttcttcactatatactgtctgtgttaatcttttagattgaccaatttgggattatcagaaaaatgtttctagattatcagaaaatgtcatgaagtcttgtatgtttctaaattatcagaaaatttccttcaaaaaaaataggggctattgcattcttacccctattttgaagttcaattgtgattttgccctcgctttttagggtttgcgtttttactcctacttttttgaaacgaagtagagatttgtccctggtttggatggtcaatttaacggggttaagtcgagcacgaaaagacttttatgcccttgctagctattgcatatttgcccctactttttaaacaacacttgtctttttacccttattttgtactgagctttcgtgaaatgattcaaaatccgtatgaaaatctaatggcgccacattgcatgaacatgaatgatgtctatgaatggtaagttcattaacatcctgtgtcttactgcataagtgcatagtatcagccacatcaggtatcttcatgttggtcaagtcctttcgatctgatgaacccgtcaagagcaggattcatcaccaatggtttgccgctccgaggagtcgctgccatcgcctgctgctcctgccatagcgctgaggatcgccgtcgctgccaggtactcctgccgcctcctgctgctcgcgacgccgtgttgaggagccatcaccgccgccttccggcctcgccgaggagttggagccgcagcttgctcctggccacgccgaggagctgcgccgccacctgctcccggccgcgctgaagagctgctccaccgcctgcttctggcgccgccgcgccaaggacttcgggatgggaatggatctgggggaaggaggatatcgaacatgtactgatgcacacccacatatattacttaagggtacaatggtaatcccatatttccaaaattatttttctcttctaatttctctttccttaactgaatattgtgggacccacctaactgccatccatagtaggggcaaacggcaacttcgttcagagaaagcgggggtaaaattgcaaacgctaaaaaactgagtaaaatcacaattgagattgaaagctggggtataaacacaattctcccaaaaaaatattatgagaaaatgaaagtgttgtaaacatgactgcttgttttccattgccaaacagactccattttggattttattaaccaatatagtctgtattgtcctggttattacaacaaatcacttgttgctctcaagtgcgagatttagccatcaaagctagatggagtaaaaagattttgttgtttccaccatcctctgcttttggtagatggagtaaaaagattttgttttaaacctttctgatggttaataaagctgttttttggtgatccattaagctagcagcacttaccgtggactgaagatgctgattaagtcttctcccgctcgcagacaacacaggtctggcttcctctcagccaatctctcccaacctccatctccaaggtagcatcactattttccctttctttttattttcttgtgtgttggctcctagcctcctacagacagctgcggaatcaagaggccctatggctgtgtatcttaatgtttactcgatttctgctcaaaatgtttcctcttttatttataagagactgcagccatcttgtttgatttcatttcctttttgtctattcatttttcagtgcctggtctaataattcagaaagatagctgggtaaacctgcatagaattttcaaattcatatgaattctaattttccttccgggggtactatggccgattcaagaagtgtcccacagaaaggtgtgcgtccttcactgttcaaggttcaaatgaatcctcacgaaatgtaaaaacaggtgacttacgacatcattgattggtgaccctgttagattatttttcttttattgattatggtgctgtagaaaagaggttttgctgtactaacattgtataggatataataccagggccaaacatttgggtggtttgtattaatgctcttctttttctagccaatcacttcattcagtttgacaatatgtatatcattttttgtccttaacattagaatggtaatgctttaatgcagccaacttttttacaaaatattctaagcataatttccaagattgccttaatgaaatgattgtcagacatagatgcacgtgcctttttcttgcattatgaaatgtcagataaatttatttcaagttactacttgcaaagtcgtcaaatcttagtcgagcaaaagtcagcagtacacaatctgcacatatacggtaccgttcatttcgagcaatgtctatacatgaaagtccttttttagcagtcaattccatggtccctgcaagtgtacattctatttgacaatgccacgtttattatgattttgcatgcttatgcatgatattatcaagctgatacttcgcaatttccagatttatcaagttttgagttaaatttctatcaaatattggttatttacagtgtcaggttgtctaaaacaaatacatgatttttctgattgtgtccacattttggagttgtagaagtgcagggaaagctaggcaaatcagttgagagaccgagaagctgagcattagatggatttagggcactacatgcctttggcacttcttaagccatagccacagtattgatcaaggagcagccaagcggactgtggcttgaggtgatgtcctctgtacctaataaagaactcagctccagatttgatacagatcttctattgcataaaatacttttgtattcaatttgatttcatgaagcatactgatcaggaattaccatgttatgccaattgttgaatccatttttttttgggtgcaagtttcagtttgtcaaaccttttctcattcttttcatgccagagcaagaaagcatatgagatgtggataaacaaatgcacgcacaatagtattttggtgactttatttggatgtaatatatcttttaatcccaaggaaagaggatatattattcttctgacatttatcttctttcacatatggttatagttccttttttttgcgccattaacttgtgaaggtttagaacttagaaggtcaaggttttcttgatccataggctgccttgaacttcatagatggcatgactatccaactttattatcctaaacaataatatagatctgtttcgagcatatcctggtggcactgaacagtgtaagagattaagtgctcagctaggcgttcagcagtagcattgagtgtaagttgaatagcttcatgttttgcattcaacttatttgttgtattgcgtctaaggagtgagtgttagttctttatatttctgaagactagggtatggattatctggagattgtcaccaaagtttagcatattttaataaagtttataatcaatttatatgagatgtgatatcgttgttctcttttactatggtaggggctaacgaaagagagtggatttcatcctattatacttgtgcttagcatcagctcacagcatttgctacagttatcaacaactggctcagtaagggagggccggcggcacgtgaggcggtccactgctaggcgcaacaagctcacgaggaacaggcggcaaggtatgtgcatgatgcggtctgcacggcgagccacacagtttgctcgaatgggctggcgctgtgagctgcagggatgcgagctatggaagaatggatgacgcatgattatgaatcctgaatatcggtgatggtccaatattcaatgtaatcaaatgatgttcagtttctcacgaaatccattgctttttacattttgtatttttcttctgtcaaaccagatcaagctgtacaagaaacaaagtaaggcagattttttttttcagaaacttctttgcagcaacttacaatgtcgatataaagttgtcttgctgaaacttttgttgatataaagttgtcttgctgaaacttttgttgttctagttggtaatgtatgaaaaaaatataaaagatggacatagttattgtttttgttatatcaaggttttctgttgcaatcaaattatacttaatgcttatataacatcattttacccggtgatttgaaattaatgcatatttttttcccgttgcaaagcacgggcacccaactagttaatgaaagaaataagttcactttgactcccttaaatagtaaccgaatctgattcgtatccaatactagctcgcatcattgctgcttcatcttttttccccacagtaaaatcagcgaagtgacggtgcaccgacgcccaattcctcagcgtcatccgcccgccaccctgtaatttcccaccctccagaaccgcacaatctagcccatccaacgggcaggcccattagcacagaccaccacacttacactttcgctatccaacaggcaggcccattagcacataccaccacacttacactttcgtcctcgtttcgtgtaatatggttaacttgatatggttgaagtgttgatgcagttggaggtagaagcccttataagttgcttgcccgtaaccgctcgccctccagaaccacgcaacccaaacccatccaacaagcgggcttatttacacatatcactttacttgcactttcattcttctttcattaaaagggttaatatgatatgattggatggataagattttataagttgtttacattattgctaaactaccaatgcggtactaaacatgcacacacaactctcatgggctatgataccatatgtaatgacccaccatccagaacaccttataagttggttacactaatacaaaaccagtaatgtggtattaaacatgtcctcacaactctcatgggctgtaataccatttgtaatagcccaccctccaaaaccgcacaacccagcccatttgatggacgggcccacttacatgtaccattacatgtacacttccgtcctctcttcacgtaaaaggcttaactcaggagaaatgtggtactaaacatgtgcacacaactttcacaagccacacaatccacattctaattgggtcaagatgacatacaccctctccttctctagccgatggcactgccctatcctctcacgtgcatccgcctttcctttctggcttctaatagattgagttaatagatccaatcctcttttttaagagataaactcaatattttgtttgccctccattatcttaggttcccacaacccaagcaaataaaagtattgcctgactttgacatagataaataaagaatgatcacagtaagttctatctcagcttggtattatcagatgctttggttgttttttaacttgaccaagctttaatgaatatatagcaacattttcaacaaacaaatatagtattaaaatatattcatcttttgatttaatgcaactaatttgatattgtactcgctttttttataaactatagtcaaatttaaaataaaagttgattaggagaaaagttaaaatgtgttataatatgaaacggatgaaatacctaaaaacctaaaatttacaagccaaacagcagcctaggtaacacaaaacaaaatattccttgaaacaaaaactcgtcgctatcgctaaaatagtttcgcttgaaaatttgtttaaggcgctgttattttctccaacaaaagttggataaacttttggatatttgtggtacgcttttcaaactgataaacgatgtgtttcgtgcgaaaactttctatatagaacacaagatcatacgttaaaactcaattaatccatttttcaagtttgtaataattaaaactcaattaattatacgttattatcacctcgttttacatgaaaacttaatttttatcttcatgttcatcttcacgaccttcaaacaccacctaaatacagaaccattagtagctaagaaagcacattctttgaaccagctacagaagactaagataagtcagcatcgaactaccaagaaagaaattgagcagtcagcatcggagactcggtcaatgatgttccgctggtgatgaactgtatacctcttagctactggaggctacttgttatccataagttattttcacaactactcctaattgacacggtgagtatgatcgttggtgtgttccgcggaggattcggcgactattttagcatatattttttttcggctgctgcgagttggcgatcctattggtctgtggaaatgggcgcaggattactgcctgcacaggtacaggtgcacacacgccgtggaaaaaaattagcatcagcttggcagcttggacccagtaagacaaatcatgtactacctccattccaaaataagtgcagccatatatatccgtgtttagcgctttgatcatccgtcttatttgaaaaatttataaaaaaatattaaaaaaatagtcacatataaggtactattcatgttttatcatctaataacaataaaaatattaatcataatcttttttcaaataagacgaacggtcaaacgttgaatataaatagtgctaaaactgcacttattttaggacggagggagcacaaagtacaataagccgccagttttttcttatgctgttgtttgtaactagattcattaacatctaaatgaatatgaacaatgctagaaagtgttacattatgaaacggagggagtagtacagtaagtttcttgctggaatgtcaaaataggagtggacacatttagtatcagtgaaaattttcttttgggacagaagcggcgagggactgtcacgtaaacttatctcgcgtggaacctcccaataaactgcgaccattcgtactattacaactactgaccatgagagatcccaaagtccaattgaaactgaagggcagtgttccttctcttcaagctaaatatattttaaattagatttaaatagcgaaaaatataaaaaaaaacaagttcagatatatatagtgcatgcacttcacttaccttgattttcctttcataattaaatttacttgttcttcaggggacaagagtgaacatcccactaggtttagaaaagattcaatcaatcaaatactattaaagagaaccgaagtggttcgtttcacctgtttattttgtccttaaatcagtagtactcctagcaaacgccccaaaggccaaaaatctatcctgggccgaacggcacgtgccaaatcgttctgcgtgtactgcagggccgaatccgcgtctccgccgaatgagtaacccgaagcacacggcatagccgcatgggcgccagggtgggaaactcggtgcaccacagccgttcttgttccccccgcgcgatcccatcagctcaccactacaaaaagttttcacgcactcacccaaccagcaagaacgaaggaactaccacgctcgatcttccgctgcgcgcgccgatttgagctttacgccggcctacccaattacccaatccagcaagaacagcatatactcgtcccgcccatggcaggatcgactctgttccgatggctcttcttactgctggccatcgtgtcgcttgccgcggcggatagcggcagcggcgaagcagagaccaccgtccccggacaaattcgcctgagctgcggcgcgtctgcctccgccaccgacggggacggccgggcgtgggacggtgacgccgtgtccacgttcgcgccgtcggtgaccggcgtcgcggccgacgcgtcgtaccaggacccctcgctgccttcccccgtgccgtacatgacggcgcgcgtgttcagctccagctacacctactccttccccgtcaagcccggccgcgtgttcctccgtctctacttctacccgtccgcctacggcaacctcggcgccgccgccgccgccgcggacgcgctgttcggcgtcaccgcgggcggcatcacgctcctccgcgacttcaacgcgtcgcagaccgcgctcgcggtcggctacgcgtacatcgtccgcgagttctcgctgaacgtcagctccggcgccacgagcctcaacgtcaccttcgccccctcgccgcgtggcgcccccggccacgggtcccaccactacgcgttcgtcaacggcatcgaggtcgtgcccacgccggacatgttcacgacgccggtgcccgccttcgccaacggcgggcgcccgaacccgatgcccctccgcgccgacacggcgttccagacgatgtaccgcctcaacgtcggcggcgaggccatcaccccacgggacgacgccggcggtttctaccgcacgtgggacaacgacgcgccctacatcttcggcgcggccttcggtgtgaccttcgcgaaggacagcaacgtcagcgtccggtacaacccgccgtcggtgccgaagtacgccgcaccggaggacgtgtacgcgacggcgaggtcgatgggcccgaacgcgcagatcaacctcaactacaacctcacctggatcctccccgtcgacgccggcttctactacctcctcaggttccacttctgcgagatccagtacccgataacgaaggtgaaccagagatcattcttcatctacatcaacaaccagacggcgcagtctcagatggacgtgatagtgtggagcggagggatcgggagggcggtgtacacggattacctcgtcgtcacggcgggctccggccagatggatctgctggtggcgctgcacccggacctcagctccaggccggagtacttcgacgccatactcaacggcctcgaggtgttcaagctccacaagtacggaacccacagccttgccgggccaaacccgccgatcccgctgaagcaggtattcagcacggtggacggaagcagatcggagtccaggaagaagagcgtcgtctgcgccgccgtcggcggtgtggccgccggttgcttccttgcggtgttggttgccttcgccgtcgcgtgggctgttcgcaggaggcagaggaaggccgcggcggagaaaccggctgatgggcttcttggcccaacaaaaggctccgccctttatgacccggtccaaaaataaacaggccaattttttaagccttttgttttgataatattatagggtatgtatagctataattgggttaacatgaaagaattataaatgggcccaaaaacatcacatgctttggcaatttttcaaggagagaactatatattacctcccttaactatagcatgagctcaaatatttccctcaaccgcaatatcagttatcgcacatctctcaactaccaaaacttatttaattgagataatccaagaaataccattgacaagcgtgcaaatactagaaatgccatcgacaagtgtgagttccaagaatgccattgtacaaacaactctataccaaaaatgccatcgatcttaggattctgtccattccgcgccgttaagttctataggatgaacagtgtatttaatggcgcaaaatggacgaaaccttaacggcgatggtatttttgggacaaaatcgtttgtacgatggcacttcttgaaactcacacttatcgatatcatttatcgatatcatttctggtacttgaatgcttggtaatggtatttcttggattatctttatttaatttgtctccccaagcgattttaatgattattttattttattttttttgcggggaataattttatttgacatgacgctggcatgatattactttttttttttgggtacgaaacgctggcatgacattacaattagaaagaaagaggaaaaaatgggtctcagttgtcaatgatgaatgatccactcctgtcctaatttttatccctctgttttttttccctccgaggtctgtataactaaaattgggccgtcctgaaagaagtatattaatgagcccaaaaatgtaacatgctcttgcaatttcatctccatttctgtgtagcgtaactttccttctgtctcaacggcacgtcaataaggtgtgagccagatgtttggattaggttgtggtttgcctttcgcttgtatgggcgaccaaccaacaggatgctaacaaatttggctggtttcggttcagcatgcctcacaaagttggcacttgccacaattcctggtggaccaaccgaaatgcaaaagcccggggcaaaattttccgtgtgtatccaagcaagaaacctcctgcatggtgacagcatttgcctgtgatgtcacaggcgaattaggtcacttacggcaccatcaccgagatcgcattgtgatcatcctgggtaatcaatattagtacacgtacattggctggattttcctgaatagggcatagtgcttagtactagctctagctctgttcagtagtgtttctgaattgactaatcatcggtactccatggcagagaagtcttttttatttccatggcccgtcaagcaatcaagttccatgtgacgctcttttaccgtacgaaacaatcccgtttcagtgaaaattaggcaacctcaagcaatggtttcggtatggtctcgatgtaattttggtgtaactgaaactctatggcagtagtcttgaatactgtatgaaaggaggaccgttcaagttatgcctttttggattttggtagtgccatcctcagagtaggagagctactccattggaaagtgtaaggctcaacatcatcatgtcaggacaactctagtaagatcagaaagagtaaagtgaacgaagggaaagaaaaatgcaggcagctcatgctcatcataatttgggggaggggcactgaatgccatgaggcagcacgacacagaggcaggagaaatggagaattcatcgccacggcgccaaaacaaaccaaagtcttcgatcccttctccagacatggcacccagactgtgtgggtggccatggcgatagaaatataacccattgagaaaatccgcatgctaagtgtgcaaggcaagcaacactgcttgcttcctttgctttgggttaaaaggcacgggcttgattgatcttttgcactaacaaaaggggcctcgccacttgccaggatcggtgccaacacttcactctagtcggctgcgtactccaatactccatgcatgcctggatgatccattgatcctgctctcactgacagaaaaaacagggtagtagcagtcacaagtagctctgaaactgtttaattagtttccttctaaaatactcctgctaatagcctgtcattacctgtgatgctcaacaagtgacaactagtactgatatttatttactagttagcagtacaaacatcagtactctgtactcatactctcagcactgacgcctggtgggattaagagattgacctgaataatcggagatgtagccatgtttctacagatcattatcagcaacatacacgttgatttatcatgatgttaacacttgctgagttaggacatcgaagtatgtttgtttccctcttggattagtttctcaaattcccatgctgattgcacgtcataggtgcatctagcgaagcaagggacccacggtccgatacgtgtctcatcatagagttgataaacaccggacacgcaaattaatatttggtgccgcattgcattacagcatttttgtacaacaacgggtttgcgctgctttacgttaccctagtacttcaccccttgatccaacggcttttaattggttttacagtttggtgaaaggtacagcatgaacactgcggtacaggggtacgtgctgggatgcagagtttactagcatgttcaggtttcatgctaatctgctctgcaaacagaatcactgttgctgctgtaatgcagtatttttactgcggatttgattctttgcacgtacttaagttcactaaccagtgtacaacattgtactattgtgcaacaaactatcgaattgcaaacagttgagctgctgtctgctcaactgctatgcgaaattttccacgtagcagtagtagcagaatttcaggttgcaaagggcaggcagaggtagaaaagtagaaaccgagacgtggattggtttccaaggctgacctccaccatttctgggatctctccatcaggagagtgcaaacccgccactatttacttccggcctctgcatccgcaccaccaccaccgcgcactccaaagaaacccggggataaaaggcgcgagaggtctcattcccgggcgggttaagttaaaccattctcaagctaaggctaagcctcgccatggcgtccactctctcgtctccgtcgccgccgtctgccgatcccgtcaccggatcctccgacgccgcctcgtccttcctcccgtctctcctcatcatcgctgctcttcttgccttcgttctactagcgtcggtctcgatccacctacttctcagacttctgtccaggtcgtcgccgccgccgccgccgccgccgccgctcccacggacgcgccgtgaggtgcacaacgtcgaggcggcggacgcttctccggtgcggcgtaatggggtttgtgaggggaagaaggaggtggtgggcgacgagaagcagcggctgatcgagtcgctgccgctgttcacgatggcgtcgtcgctggcggcgctccccaagagctcaccggactgcgccgtctgcctgtcgccgttcacgctggacgccgagctgcggctgctcccggcgtgccgccacgcgttccacgccgcctgcgtcgacgcgtggctccgcaccaccccgtcctgcccgctctgccgcgccaccgtcacgctcccgcacccctcgatctccgccatcctcgccgccgagcagccgccgccgccggagccgaggagcagggaccgttccaggagcttccgcgtcgagatgggcagcgtcagcaaccgcagcgcgtcgacggccaccggcggcaacgcccgccccacctactcgctcggcacgttcgactaccacatcgacgaggaggtcgaggccgtcgtctcccgcgccgcgcccatgacaaccaggagcgccgccgcagtcaaggaagacaagccagcagccgagcagtctccaccgcctcccggcgaggcggtggccgaagcggcgggcgcgacgcgcggctggctgcgggagtacgtggaacggctggccacctccgcgtcatccctatcgtccttctccgggcggtggagctcccggtggagccagagctaccagagccaccatagccacagccaggaggagccatggctgtgggacgcggaggcggtgaggatgtcgccgccggggacggaggaggaggagacggcgttcatggtgctgtaccggtggatcgcaggggtataaacgtaattaccataaaaaggcacaggaaggctttcgtgtcaaattgtcatcttcagatagatagccttcatcaggtactcaggtgaatggtgaatccaatgttttggatgcttctgtgttgactcgatcgggtacaaactggtaggcgtaagcagtttgcaggcctctctttgcacatagttatcctcggagttcggattttggaaaccgaggagagcataattagcagccagggtaggaaggaatcatgcatgcaaaatattgttcttttccgtggacgagtttgatgcatcttgtttattttcccagagatgtagtagtagttgttgttgtgtactttgtgtgacttcatcatgtgtgtcacaacgtgtcagtcagagcaccaccatggaggcgcctggtgaaatgggaaagagtgccttggcatgccatgcgtggcggtagctatgaaacgtgaaatccaatttcagagttccggtgcatccatgtataatccagctagttcgctgatgctgcttatttacatgtgagctgcttgttgctttggtggcaatgccagtgcactgcacgggcagcccgagtgcgagcggccgagtataaattaagcggcagaaaaggcccaaatttgatcggtttcacccgtttctcgtgcacacgccgagtcgctgtgttgacggcagtcaatgtgtcaaatcgcctgcagcagcagctagctactctatctagctcgctgatgtgattcgggtcaccaactctatcgcccatgcatgacgagagcacaggtctcctggtggtcaaaaccacggcacaagcgttgctgccttcacgcaacgacgcacagatccgacgacctgcctgcccttcgatccgtagatacgatttggttttggtgcaacgattgcatctcgagcgaccgaatagttttaccatcagatcttgtcgtcattagctgcatcctgcatgctgaattgctgatgctttttgcttagcggtgccgtattagctaggtacgttacgtagcgaaatgcgcatgcgcaactttggtacggatgcaatttactgacgtacggtgtgagtaccggactaccggtgctgtcgaaacgagaagtgcagacaacgtttcggtacaggtacagccgtacgtacagtgcgaagtcacatttatattcgccggtgttcccgtacatactacatactgcatggctcgatcagtacggctcgtggagaggtccatgactttattgttatatacatttactaacaaaagtgttcatgcgttgcacctggtgattacggagcgtgtatattgaccaaaagtattgtttggtttagcaaaagtgcctctgcgttgcaacggaaagcgtacagatgagaagaatatgcaattaattaaaatataaattcactgaaatatttggtatctttaagtaggtatgtatacaattaaataaatttacaagtaaagtaagtgtgagaaataaaatgatatggttaaatttaattttattaaattctccatgattagtttcgctctttgaaattttattggaattttcagagcttaattgctaattttaataatacaaatatcatttaacaattatttaattggaaatctaatttaattttttgttgggccggccgacctacgtgcggcccatcactgatgcggcccgatgatggaggccagcccaacacgggacggctcagatcggctcctaatctatcaaaacccccaacccaaataaaccctaaccctaatttcattcttccccttcctcccctccacgcaggccgcctctctccctgctggcggccacgccacacccccaccggcgcacctctccacgctcctccccaaccggcgacgccttttgcccccctccccactgccggcagccttccccaccgagcagcggcgacgacggcggcagcggtggcgacggcacactccctcgcagcgggcggctgtggcagcacggcgatggtggcgccgctccctctccccactgccggctccttctctcctcgtcgggcggtggccaccgcaccactctctcggcagatccggaggtggcggcggtcgcgggccggtggcggctccctcctcccctctcgcctccctcctgcccctgatccggcggcgatggcggtgtcggcgggtgggtccgtggccgacgacgaggtggcgaggagcagcgcgctgcagcctccggtccggctcgcccctccctctcctagtcatctcgtgttaatatgatgttttctaatgattccgatttagatttggactgggattttgtgtttgatttggatttggattgtgatgatttgagattggagagaaggtgtgctcaatgtgggattctatttgtgtgatgatggaattccaactgggttttttgaggggggatgaaaaatcaccgtatggatgaggtgacgaccagaaaaatccgaatatttatattagttatagatatggctcgtggagataattatttttggagatggtctcaacataaaaaggcagtgttggaattgttgaacaacctactatatcccgctttgctgaccacatggaatgtcctctgggctttgaaggtaaacaatgcctaccggccttttttggtctagaaacagaggggaataagtccactttgactcccttaaatttgactcccttaaaagtaacccgaatctaatatgtgaccctcaaccacaaaaccggatagaacgactccctaaactattgaaaccagtgcaatttgactcccttggtggttttggagggtggttttgcttatgtggcgctgacgtggcgatgttgacctagttttcgtcccacgtggcgcttacgtggcattagaattaaaaaaaaaatctatggacccacatgtgattcacacataaaaaatattgtgggccccactgacatgtggccctacatgtcattcactctctccttccccttccctctctccccgttctctctctttatctctgtcacaccctgaagttctcctcctaagtctaaaattgaatttataaatcaccctaagaaaatgccggtgcaaatcaagagaaaaccttaataaattaatgcaaataataatcgaaattggcatgtggaattttttttttgagttctacatgtcgaaatacgctaacaagatttttagtggaattttcagagctctcgaaataattttaaccaattaaaattgagcacatgcaattttaatcctatgaaaaatcctttttccttctttttcctttttctttcttttcttttccccttttcctttgaataggccgccggcccattcctcctttttctccccctcctcccgctgggccggccgaaggccaaggcccagctaggccgcgcgggccggccgcccgcctcctctcacccgggtcgctgacaggtggggcccacctatcggacccgtctcccacctcgcgccgcgccgccgcgcccgcaaccaccgccgcgcccacgcctccgcctcctccgggccacgtcggccacgcccgcgcatgcgccgcacctcccgcacccactcccccctctccccgcgtcttccggccgcgcccgcgcacgagaagggcaggattcgattttgaatcgtccccaccttctctctctcctcccccacgtcgccggcgaaatcggggtgcctcccggccacgtccgcctccccctccgcctataaaatgctccccatgccctcctctctcgttttccgctctcaccgctccatcccgtgccccctaccgagctcgcgccgccgctgcttgcgccgccgcactccggccgtgtgccgccgctgctagagccgtcgccgcgctaagccaccgccacccctagcttcgccgccgcaagacctttcccggccgccgctttgcgtcgccggaatcccaccgaaaccccatctccctcgtgtcgccggtgagttctctctcccctccgactccggccggcgtggatggtcgccgtgagggtttcccttcgtcctaattcctcctctcttttccctaggtgtcgccgtcgctcttccgcacctcggcatcgccggtcttcgccgcctccctcgttttccgccgccggccgttgccgccccccccggtgaggtctccctccccttcctttccttccttttttttcccgtgcgccgccgccctcttcgcgcgctcgccatcgcgttcggccgtcgccgctcgcgccgccgcccgccgtccacgccgccgtttgccgtcgccggtggtcacatgcgcgcgccgccgctttgccatggccggccggtcggcttgatgccgggcctggccggtacatcggcccgtggagccggggccgtggggcccgcttgccagccgtgccctccccttgagccgctgccgagtggggcccacgtgccgccgccccttcccctctctcccgagccactgaccagtgggacccgcccgtcggcgccacccccccttgatgacgtcagccctgggagttattgcgcaataaattatttaaggactttttttatagtaataaacacagtgaatcttctaaaattcataactaattcatccgagctccgtttaagcccattcaagtctcagtaaatcaagaaaaatgtgtagaatccattaaaaatagttttgttctctgtttcagtagtcttatagcctgtttgcattgtttgctttgtatgtcgcttagattccggttcttccgacgctccggtgtacttcgaaatagtcgccgaggttcctccagcagcagagcaaggcaagttatgcttgtcacttgaacatgttgatcctatattgcaaatgctctattgtttttcttcaaatactgcatcgttttataatgttattatgggatgtttacctattgttacagccatgctattttggtaccttgctcctttgttagcttgggttataacatgaatagacattggactaggagttgcttagccatgcttagttcaactagtacacaatggggaaaatcctattaatgtttagactgttggttctaatggtattgttggattagtgccaccgctttggtgttggttaattaaaataaatcacatggtgggctgtgggtgcatggttttgctggtcgcacccatggcagttaaggaccggttcgcgggatgccctggaagaacttatcgtacttaccacaagccagcatgggcaacggctgggcttgtagtgtagctttcctctagctgacgcatccaggcaagggtgggcgtgatggagcgggacgggccctgcgacggcctctgtcgcttccggattcacctaggcatgagaggggactgcccgctgccttgcgaggagtgggggtgaaacctgaggtgtggtgtgcttggttagagggggttatgcgaaaggtcttgtcacagcctctttacggtatgttgtggtggcatgtcggcgcacggaaacgtgtcgtggggctgtgtcttgtgggtacagttgtacacctctgatcagagtaaaactattcgaatagccgtgcccgcggttatgggcggtcaaccagattcaccgtgattagtctcaccctagtttagtctattaaaattggatagtataggtggatggttgggcctgtcgcaacgtggtatagcgttggacagtggatgattaatattgattaattattacaactgttttcttctttaaacttctgtttataaatgctcgctttatgcaaatgaaccactctagctctcctttgataattccctgcatcatacccctattccggtatgacttgctgagtacagtgggtagtactcagtcttgctctatttttcccaaccccagagtacgagtatatgtcagatggaggtttctccgaggagtaggcttcgtccgtgccgtcgaggatgcctgtggagtggtgttcccgctgcagttctagtcaaggcttagctcctgttgtctttcatttttccgctgcatttatgtaatacgtttatgatgtttgtaagacgtggatctgaatgtcaacattgtcgtttgtgtactccggccggtcctggacggggattttaatgcacattctgcttggaattctattcgggaatttctgggcgtgacaatctcccccctttctcttcaccttctctctcgtagcgtaatctgcaggcaagggcggcgacggcaagcgggagccggagtggcggcgacggcgatggctgacgcggcagcagcaggcgggcgccagcttccccatcgccatcgacctcgacctcggcgtatccgcatgcgtgatggcggcggtctctgtcacgcccagaaattcccgaatagaattccaagcagaatgtgcattaaaatccccgtccaggaccagccagggtacacaaacgacaatgttgacattcagatccacgtcttacaaacatcataaaagtcttacataaatgcagcggaaagaaagaaagacaacaggagctaagccttgacttgaactgcagcgggaacaccactccacaggcatcctcgacggcacggacaaagcctactcctcggagaaaccttcatctgacccgaactcgaactctggggttgggaaaagtagagcaagactgagtactacccactgtactcagcaagtcataccggaataggggtatgatgcagggattcatcaaagaagagctgaagtggttcatttgcataaagcgagcatttaaaaacagaaattgaaagatttaaacagttgtaataattaattaacatcaactatccactgtccaacgctaacccatgttgcgacaggcccaaccatccacctaaactatccaaattaaaagattacactaaggtgagactaatcacggtgaatctggttgaccgcccataaccgcgggcacggctattcgaatagttttactctgatcagaggtgtacaactgtacccacaagacacagccccacgacacgttttcgtgcgccgacatgccaccacgacataccggaaagaggccgtgacaggacccttcgcataaccccctctagccaagcacaccacacctcaggtttcacccccgtccccagcgggcaacgggcagtcccctctcgtgcctaggtgaatccggaagcgacagaggccgtcgcagggcccgccccgctccatcacgcccacccttgcctggatgcgtcgactagaggaaagatatactacaagtccagccgttgcctacgctggcttgtggtaagtacgatatgttcttccagggcatcccgcgaaccggtccttaactgccatgggtgcgaccagcaaaaccatgcacccacagcccaccatgtggtttattttaattaaccaacacccaaacggtgtcactaatccaacaacaccattggaaccaacagtctaaacattaatatgattttccccgttgtgaactagttgaactaagcatggctaagcaattcctagtccaaactctaatcatgttataaccccaagctaacaaaggagcatggtatccgaaaagcatggctgtaacaataggtaaccatcccatagtaatattataaaacaatgcaatatttgaaagaaaacaatagagcatttgcaatataggatcaacatgttcaagtgacaagcatgacttgccttgctctgctgctggaggaaccttggcgactatctcgaagtacaccggagcgtcggaggaaacggaatctagcgacatacaaagcaaacattgcaaacaggctataagactactgaaacagggaacaaaaccatttttaatggattctgcacagttttcttgatttactgagacttgaatgggcttaaacggaactcggatgaattagttatgatttttagaagatttactgtgtttaaaactatacaagaaaaaccttaaactatttattgcgcaatatattccagggctgacgtcagcacggagggagtgcggcgccgacatgcggggcccaccggtcagcgacccgggagagggcggtccacggcggatcgggtccacggaccggggaggagcggcgccgacatgcggggcccactggtcagcgacccgggagagggaaagaaagggcggcggcacgcggctcggattggctcaaggccggccaaccgaccgcggcgacggcgacgacgcgcgcgcgaacgcgttgccagcgacgcatgcgaccgacgacggcagcgaccggcggcacgcgaggcggcggcggtcgaaggcgacagcgcgcgacttgaagcggcggcgcggcactaagaggagaggaaggggaaaagaggggaggggatgcctcaccgagggtggccggcgcggaggaagacgatggcgaacggcgacggcaagccacgggaggacgacgtcggcgagcggacgagcttcggggtgccctaaggaaggaggagagagggattattgagagggagatgagccacggcgaccggaagccatggccgaaggcggcggtagaggtgatgctcactcgagtgcgagggaacgagggctccggcgacgaacctcgacggaggagaggtggacggggtggatcccggccacgcgaacccgacggcggcgatggcgcggcctggcggcgaccctaacggcggctagcggcggccggagtagcggaaacagcggctgcggatgggcgcacggcgtgagagcgatgggaggctcgagagagtacggcggaatggggaaaaagtgagaggggacgacggcgatgcttaaatagggggagagaggaccggacgtggccgggagaggcgggaatcgccggccgacgtgggggagtgggggaagagagagaggcgggattcgaaaatcgaatcccggccatctcgggcgcggacgcgagcgggagagagaggagagtgggcgcgggagacgcggcgcacgcgcgggcgtggccgacgtggcccggaggaggcggagacgtggacgcggcggcggtttcgggtgcggcggttgcgggcgcggcgtcggccggaggaaggggaaagacctgacaggtgggccccacctgtcggcgaccccgggagaggagggaggcgggcggcctggctgggcctcggcctgcggtcggcccagcaagggggagggggaaggaaaggggagaatgggccggcggcccattcggaaaaaaaaaggaggaaaaagggagggaaaagaaaaagaaaaaggaaaaagtattttccctggaattacaatattgctggctcaattttaactggttaaaattatttctagagctctgaaaattccactaaaaatccagttaatgaatttcgacatgtagaactcaagaaaaaaaattccacatgttaaatccgattattatttgcattactttcttagggttttctcctgatttgcaccggtattttcttagggtcatttataaattacaattttggcttgggaggaaaacttcggggtgtgacagtctccgcggatgcagtccataaacccagcctggcaatccggccaacccccacaatgctccacgggtcagcctcggcagaatcgagcagcagtacaacaaacacaccaatgtagcagcataggagaaggcgagcaagcaagaggatgtgtatagctgtatagctcgattacttcctgctcatcaaaaatcatgtcgagaaggtgatgatatgcctcgccttcgtcccaaggcaggcatcgctacatgcataccatcatggccaaaggcgaggatggagctcggcctcctcctggcgcttggcccaggggcttcgacctctatggctgggcgtacagtgagggactccatcggcaccacggtggggatactctttggcgggtgtgctcgttggcgccatcgccgccgctgtcggcactgaacgtgagctggcagatcaccgggacgctgaccgacttgacgttgcacgccatcatgggggagtgcggcttccggtggcatgaggagttcctggagacgctgggcgaggcacagaagaaggcgactaggttcggcgtcgctgacctgttcccgtcgtcgaggctcctccccgccgtcgggagccggagtggtgacggccggcaggagctgacacgggagctagctggagcggcggtggaagtgggctggagctgacggaggctaggaataatccagcgcgctagtcagaggcagccgcagccgcagccgcctcgttggaggtctgtggcgtggggtggtttccaccgccgcagccactcaagcccctcctgtcgccgcctccttctcctccgcctccacccgcattagctccaacccgccgccgcttcagctcccgctggccgccagcacttcggcccctgccccaccgccgctccagccgtgctccccgcggacggtggaaagggagagaaagagagaagggagaaagtgggggaggaagaagaaagagagaggatgacatgtcagtgggccccactttttttatgacaaatgggtcccacatatatgtttttaattaaatgccacctaagcgccacatcaagaccagagtagatcaacaccgccacgtaagcaccacgtcagcgaaaccaccatccaaaaccattaaggaagtcaaattgcaccggtttcaatagtttagggagtcgttctatccggttttgcggttgagggtcacggattagattcaggttactttttaagggagtcaaagtggacttattccaaacagagcccgagtacccaaccatacgccctctacatgggcaacggcccatcagcgtggccagattgcagcggtcgcggccgaggccgagagcccgataatactcgtgggccttatccgctaaacgctcatggggatcacggtagtctaagcccatagaaaacggcccatctgagtgggctaaatcgctcaggtgctggcggtagcccatatggtgatctgagctttttgttattattttttaaacaaaaaatacataaatataattttcttttacaaatttacaaacatcatactcctttcaccctatgggagagtttttttttcataaattgcctctcaaaaggcggttctgatggagattatggtggttgaatattgcgtacatgcctttcccatgctccttagaggcgacttttatatgccacccaacccaaagacagtgaaattaaggcctatatatgcttgcgagaaaaataacggtcatgagaaatttgcatagactacttttgttctctaggtgggcgggatatttaaaattattctctaggagtgtgataaggggctatacgcaaatgtcccatgcctaatgccacgtcatcagatctgccctctagaagggctgtttttaaagcaaatccctaaaaaaacactcccacggtgaaggagtattttttaaaaaaatttacagaagcgaaaaatatattcctgtaatttaaaatatatattaaaataaaaaataaatatttgagcttccatttgttagttaccatttttggaataaaaaatggttggatccataattttcttcatttaatgtatttcaagcatatcatgtatcgttgtattttcaattatatttttcaaaaggagttttataaagcaccctatgtatcgttgtatttttaattgtacatgcctaatttctcttttcgagggtacaaaaataaatcaaagacctataagaggaaaaggtgaaaaatacaggcatagggatttatgcatcagtctaatcccaaattttgtagcttccactcccattaatgtttgggaatccgataatgacatatccatgtttatgtatttattgtctttttttctgtaaagagatttagaagcattaaattaagcaaaacatatatacacgtacttcatttattgtggtgaagccaatagtgtgcacacacactcctacccacaccatctatatattcatgcactccttggctagatcacaaaacacacaccaaacaatcgagcacagcaaacaaaggtgaggactgaagcaagaacaccatggcttttctgagggcactctctcctctcgtcttcaccctgctcctcctactcgccgcctccacatccgacgcctccatcttggaggaaacctgcaagtcgctcgccggtaaccacacggccatcgactacccctactgcgtcaggttcttccaggccagcaaggagagcgccaccgccgacacgcacggcctcgccgccatcgccgtgaggatcaccgaggcggccgccgagggcaccgccaagcgcatcgccgccctgcgatcctcgcacaaggaggagaagatgcaggagtgcctccgcataagctccgacctgtacgcctacatgctggccgttctcggcaacgaggcgaaagccgccgccctggtggacggcggcgcgcagcatgcggcggcgtcgccgccaacgcccgacgtcgcgcggtatgtcgcggatggttgcgagggcaggttccgtgggaacaaggagaccctgccgctggttgcggagtacgccgagtttagacagagtgcgtccattgctctcgcattgatagaggcgatatcaccaccgagtgatcagtgaatgtgtgtttttactctcagattttgtaagccaaacaatgtagatgaataaacatggcaattatcaatctattgttttcctgttactattatctttgtttattttctatttcatttttatggccgagttttgcgttgaaaaccggttatgcttttgaaaaaaaaaagatgaagtcaccctttgctactttgtttagaaaatagtcattcatcgtcgcataagtagaatagttatctttgctaatttacttataaattaataaattgtgtgatttgataaaagtggattaatcttaaaatatgctccgctagctaatttgatctattgattttaactactccgttaattataccgtaaatcatcagttgagtgtgtttggcaaaaaaaaaaaaaagcgtcaacaatgttagtagtactttcgatgcaaagtataacagccaacaagcacttgaaatatagtgatatgctacctctacaccaaaataagtctatttttgagatagattaatacaaatacaaactaaaaagtggactaaaatacaaactattttatcaaactaagaagactaaaatactttgcacttgagatagactaaaataactctaatttattaaatatcaatgcaattatttcttattttatccacttccaatgcatatatcaaacaaatactttcacaaacttcaatgcaatgattactccaaaattaacttattttactagaaacggaaggaactaaaaataaacgtatccttctcttgagatagtatctatcaccactgttggcgtttgcaagatttgtgtatctacatcatatctgttacgggccttccagcccactgcccacgccaaattcacctctccaaactgcaaacatccggacaacggaatttaaggcccaggtggcaactatcagttattctcttatttcacgattattaagcagactctgtttcgtaataagagattttcgaatttcgaccatgaatttgtaaagggaccttttggaacttcccccgattaagactctggcagttcgacatgtggtgtctaaacatttcgtcatgacatgaaactatatagattagatttggctcgaaaggaacagggaccctgtcagcaggtggctgatcctaatttctgaagaagagcgatcctggttcctggatcccgagactcgcggcaggcgtgaagagactgcgagacacccgccaacgtttcagcaggcgtcatccaggaaatcctcttgaatgaatgaatgaatggtgtaatatctcgtaatgattccagtgcaatcaacagctggatcctcttttattgttcagagattaagatgacgatacctgctagtataaagttgttggttctaccacgaaaaaacacaccaaacaagtaaccaagcggcaccaggacaagaaaagccatgacgaccatgaagcttgtgcgatcgttctctcctctcatcgtcttctccttgctcctcctgctcacctcctccacgacgtccagagcctccctcgtggacgacgcctgcacgtcgttcgcggctagccacgcggacatcggctacgcctactgcgtcaggttcttccagtccgacgagggcagcgccaccgcggacaggtacggcctcgccgccatcgccgtgaagatcagcgcggcgacggccaggggcaccgccaagcgcatcgcggacctgcaggacctggagcgcgacaagaggaggaaagattgcctgagcgcgtgcggggaggtgtacgactccgccgtggacagcctcgacgaggcggccaagggcatcgcgtcgcgcagcgccgacggcctgcgggacgcggtgaccgtgctcagcgccgcgctggacacccccgacacgtgcgaggacgggttccgcgagctcggcctggcctcgccgctggtcgccgaggacgaggagttcagcaaagagtcggccatcgctctcggtgtcacatcggccttatcgccgccgagctaggatgacgtcacaagagttacagcgtctgtaatcctataaatcctttgcgtaataaattaattactctggaaaatcacaggacaaaattacattttctcactaattccgttgtcatataattttccatttttggaagaaactggttggattccttgtgcacctattctgagaccgatccggccattagccatgagatgcacgtacgattgttgtttttttcccagtggaacgcacacttaatttacggcatatcttgtgaagaaattattgcatttcagctaagatataatcggccggcatctttgcttaaaaaacaacaatctgctgggccgttccaacggagattggcagctacctcgccctgtaaacgtcatgcacgtctccacggatcacgacgtgacggcgtccgaggctccgagccagcggcggcgcgagctttggtgatgcaatttgttgggctttctgcttgccttacctgggccgacctgtatgcacgaattgggctaaattcccaaaaggaatccaaatctcccttcaaaaaaaaaggaatccaaatccttttcgttcccgggggagagggataagggatgaagatttgttgaatacttggagcaagttttatagctaatttcatgcataccatataatagtaagaggtaatatgtatttccacatttttattgaagtttatgtaggagttgtttcttccatgagaggtggtactttctctcttcactcttctctactctatctacctcaccattagtccaatgcgatatctttgggtttgtagttagatgcctgtagtacttagcgacaacaacagcaagctcttccactttttcggtgttgacgatgatagatatttggattaggatacgggtgggagaagaattaaggtgagggaaagatgcagtttttcgagcttagagaaatgactaaggagcagggagatggtaaacctgtggtgacatatatgacgtgcgacgaggcggtgttggcatcatagccatgagattgatggtatggacatgggatctagagtagttaggagatagaggcaatggtagcatctccaatgctaggggccgctgaagacaaaaaaaaaaaaagggcaaggcaagggcggcaagggcgcctggccgccgcttaggcttagagaggagaagcgaagggagagaaagggggtgaaagggaggaggacgattgagctgggctggttagcatctagatagcgcaagccatgcaaaggggggcaagtgggtgaggatgggtgggcagtggcgcaagggttttatccaagctttgcgaggagagatggtatctctagtatgacagcacgaatcatgaagtggtattggccattagaaacgaccgaaatttaggcatcttagtgtgaccaaaactatgcaccaaaccaccaaaggaaaaaaaaaaccattttattttccgaactatttcattggttaatggaatagtaaaatagacttttttttcctaccaagtattgtcagcctatggcccaggtcatactgaaaagtggattttggcccacccgtcgtggaaagctaaagattcggcccatgcacagtaagacgagacaaatgtggacgacgtcaacgtgcacaaaaccttctcttctgtatcggccgcttgaagtacaactttccgctatcgcggtgcgcgcggaaggccccgctgcggcacgtaaacgttcgtcgtgtatcgcgctttaacccggaaaccgtggaaacccgcaaaactctgcatctgcataccgctgcaaagcggaaaaggaaaaactccccgaagcgcgcgacgacgacacgagcgcggccgcggcggtgaaacgaacgggcggaccggttcttcttctcccgctggtctccggcccctccctctccaacacctctgcatgcccagcccccatgcatgccctcttgttctctccaccgcgaaacatgagcccccgcaattctcctttgccaccacaccctgcgctcctctcgcctcctcctcctcctcgtcttcttcctcctcctgtcctggatctcacagggtggcagttcctcgaataaaaaaatggcggacagtaacgccggcggcaacaacagtagcggtgccgcgaacaacgccgaggtccagataccgatcccaggtcagtctcagtctggtccgctctggtcgctgttatgtttccatttcatcttattgcatgaagggttagggtgaaaaaaaaacatgagaagcgggctatgcttttgcgttccaatcgtgctgtgcacctgggaagcacctgtgctggattatccgtgaacactcgtgcgaattgatcattccgttggtacattggggaaatttttagggatgatctgtttttagcctttgtgagtacgatttgttacacttaaactctgttgctcttacatggacctctattgcatcgtgttcagaaactttcacccactgatgaaatgtaaagcatcattaaaaaaattttacctgttacgtttggtactaactttctaccatcttcattacaaatcacagctccatccaaggctgaagctgcagcagctccggaaacaccagcaggcaagccatttcgatggtgggcgatggtggcagtggacgtcttcttcctcatcgccggtcagacatcggcgacactgctgggcagatactactacacccaaggcggccgcagcaagtggatatcggcgttcgtgcggacggccggcttcccgatactgttcttcaccctcttcttcttcccctcgaagtcaccgtcctcctgcaccaacactcccatggccaagctcgccgtgatatacatcgtcctgggcctcatcatcgccgccgacgacatgatgtacactggtggcctcaagtacctccccgcttcgacctactcgctcatctgtgccagccagctcgcgttcaatgtcgtcttctcatacgtgctcaactcccagaaggtcactcctctgatattcaactccgtcgtgctgctcaccatgtccgcttcgctcatcggagtcagcaaggagtctcagggggtcaccggcgtctcgggagggaagtatctgctcggtttcgtgctgacgctgggggcgtcgtgcacctactcgctgatcctcgcgctgatgcagctcaccttcgagaccatcatcaagaagcacaccttctcagccgtcctcaacatgcagatctacacggcgctcgtggcgacggccgcgtcggtggtcgggctgttcgcgagcggcgagtggaggtcgctgaggggggagatgaacgcgttcaggtcggggcagttctcctacctgatgacgctgctgtgggcggccgtgtcgtggcaggtggccaacatcggggtgctcggcctcatcttcgaggtgtcggcgctcttctccaacgtgatcagcacggtgtcactgccggtcatcccgttcttcgcggtggtggtgttccacgacaggatgaacggggtgaagatcgtggccatgctgattgcaatttggggatttatttcgtatctgtttcagcactatctagatggcaagaaagcgaagaaggcttcatcgggtgatagtgcgcaggggtgatcagattaggtggccacagtgatattatcgtggtagagattgattgctctccgccaataatcttagctagttttgttggctgcgaggtactagatgttcgttacttatgttatgttgcaggttgttcgtcagataaaaactagtacgtactttgtttttttgtgttgccaacgtgttcagatgtacaattttgctggattactagtagttttcttgttcttttcttcatgtgcgtttgtgtaagggtatgacgcataattgtatatcacgaaagaatagaaatagtagtactagactagtaaagaactctttatttgcttcgtcctgtcttatgtcaggttgatcctggtggctgatggacacgaataatttggtactacttctatttcagttgtggaaaacaattagtatctgattaaactacatctgaatctgacacttccgcagaatcttgggtgaagaacaataattggcaatctttgtactcttttgtcaaattggagataagattgattccgtctggatgcagcgatcgacgttgtcctcacttggaaattttggcatcgcacgcattgaattttccaagaggcaggacataaacattgactcgccggagtagttttgaaacgtttgacggcaaaattagccccttgcgcatgccctatcaacccttttatctttttatcgtttcattgattgatgacgactccaagttggcaagtttcagccttccgctgctgctggacgagtggatgacgagcactaggcccatcttgttgtttatcctttttctgaacctcacaatgagcgatgctactgaaattcagctgcagattacaggtctctctcggtcatgaactgccaaatcgatcacagtttcgaattgagatgtgatgtgagatcgatcgaaactagtccagtttttatactgatgagacggatgattcgtatgtgcaggtgtccgaggccaagaagacgtggtagcagagtctgacaagagcacgtctcgagcagatggaactgcggcggcggcggcggcggcggcgccgctgccgcctgtgtccagccagcggctgcggtggtgggcggtggtccttgccaacatcgtgttcgtcctcggcgggcagagcgtggccacgctcctcggccggatttactacgaccagggcggcggcagcttgtggctggcgacggtggtgcagtcctgcggcgcgccgctcgccgtcccactgctgctctacttccggcggccagaggcctccccggtggcacgtccgccgctgctcaagatcgctgccatctacgccggccttggcgtcctcctcgccggcgacaacctgatgtactcctacgcgctcctctacctgccgctgtcgacgtactccctcgtctgcgccacccagctctgcttcaacgccgtcttctcctacttcctcaacaaggagaggttcaccgcgctcgtgctcaactccgtcgtgctgctcaccttctccgccgcgctcgtcggcgtgagccactcctcggaggagaccaacagcagcgtcccggagggcaagttcgcgctggggttcgtcctggcgctgtcggcgtcggcggcgttcgccctgatcctgtccctgatgcagctcacgttcgacacggtgctcaggagcaacgcggcacacgccgtgctggagctgcagctctggagcaacgccgccgcgtcgtgcgtgtcggtggccgggctgttcatctccggcgagtggagctccctgacggcggagatggacgggtacaagaagggcgaggtggcctacgggatgacgctggcgtggacggccatctcgtggcagctcgccacgatgggcatggtggggctcgtcgcgacggtgtcgtcgctgttcacgaacgtgatcagcacggtggggatgccgctgtcgccgatcatggcggtgatcttcctcggcgaccggatggacggtgccaaagtgatagccatgctcattggcatctggggattcttgtcctacgtttaccagcactacctcgatgacgccaagagcaagaacacagctgggtcagctgacgtcacacaaacttcagaagcaaaactctgaagcctgatacgcctgatagtgatacccagagtgaattttactgtacttgatctcttttttttcacggaatcaattggaaatttggaatactggtcttatcttccctggaataacggggtcaatcagagtaactgcagaataacaggaactcgataatcgctttttgctcaaaaacattacagcatcgaggaagatccccgtcttcatcagtttctgaaacgacactgtagttgtcaatactttctgacagtagagggtcatctcaggtaaagactgtttttcattagtttcaccgtgtgacgacagatgaaatcttaagggattacagcgggaaatctgtctagatttgaacgactgatgttgccgacttgacattagcaatcaaaacgtccatggtccataggattggtcgaatatacccagaattttgcttccttaagccaagagataaacccagatctcagggtgtgtttagttcacgttaaaattaaaagtttggttgaaattagaacgatgtgacggaaaagttgaaagtttgtgtgtaggaaagtttcgatgtgatggaaaagtttgaagtttgaagaaaaatgtcgcaacaaattggccctgtttagttctaaagttttttttttccaaactttcaactttccatcacatcgaatatttcatacacaacttttttatcacatcgtactaatttcaactaaacttctaaacttcagtgtgaactaaacacacagccaaaacacggcctcagtgtaatattccgcctaacgcgaatgcgaccgattacgattggtgccagcagcagcactgctcgtgctcggcgtgcaaacgatactgacaggcaaaaactgtactgctactagctttacttttggatcttcactgaatctcatgtaagatggcgtgtatggtaacttggtccgtcctactagctgcaacaggggggagatgaacttgtcaaactgcctctttttcgtatctgatcgctacaggtatcatgaacctgacgtagaaatgtcacactggtacagtagtctttatcgacatcatgatgcaaattggaagaacgtctgtttcatggttgggggaaatatctatctgcagccccggggcacggctcaaagttatgcgggcgatccgtcgtctgctctcgtactcgttgtcgatttcttacttgttgagttcggctgtgtttatttcagcgcaaaatttggattttggttgaaattagagatgatgtgactgaaaagttgtgtgtgtatcaggttaatgtgatggaaaggactggagtttggatccaaaaacagccttcgttcaatgtcccaatatgatactgctccggtcacgaatatttccaaggacgcctggtcgccccgctccagggcgacgcgggcggcaaaacctcgccgtcgcctcctcactctcctcctctcccccacctcgccgccacccgaacagccgccggcaaagccgggcggctgcgaagacggcgacggcggggctcccttctccctcactcccggtcagccggttggggcaccgacgacaccagagagcgagagcgcggccccggcgatgacggccaaatccggcgccgttgggtttggatctggccccttggccggatctgggctgggacgcgcgggtcggcggcggagtgcacggaggcggcggccgcggcagcggcgcgggaggcgcccgtgcgaaggtggggggggggcaaaggtcggcggctccgacgacgggcaggcgccagatccggtcgccccgcttggccggggtgaccggcgacgggctcggtcgatgacggcgccgctccacggacctggcaggggggtggctggcgacagcgatggtggcggatgtggcggcgacgaaggcggcggactacggcgtgtgccgcgacgccggccctcgtcaagaacctcgccaccacgaggagggcgcggcgcccatcaattgtacgccgtgcccgtgacgccttcctccatggcgccggcgacccgcactgcgcgttgcaccttcaggtctatgccaccccggccggtctggacggctggcggctggcgacggtggcggctggacggtggtggctgacggtggcagttggacggtggtggctgacggtggcggctggacgggggtggcggtggcggtggcgatggtggctggcagtggtggctgtcgacggtggtgcaaggccatcatccggggctgacggtgtgtcgtcgtcggcagcggcatgtggaggcaaggaaggaggagtccgggtgcgggcgcaccatcgagaactgtgggcggtggccttggccgaatttctgaagggacaatgttgttgaccaacgaagatccttcttgtgcggattggtggtgtgggtttggacagggaatcgcgagcgaaagccttgccgagccgtttggccagctgacgacggcgacgcccgtcgccgttctcctccttggaggcgttgtgttagattacccatctcctttcctaaccatattctccgggtgaaaaccttgcttccttccgaacgagcggtggcggcgatccacgtcgcgtcctccttgggggcaccgctttggagaaacctcttcgtgcaaggattgtcaagggtctatgcattggcttcgaacttcagtcctaggctttgacgaggccttctagctccactttttgttttgcttttcttagtttgggtcctctatttttctgtttgatgtgttcaacttgtcttgaactacactctcttctggagtggaactttgtaataattggctgtagctctttttgagcaaatgccgggatattatatatctatctcagacggtcctccatgtcccggcatggaccgtcagcactgctgcactgcacatggctggttatgtgagtagaaaaacatgttaccagaactgataattaatcgagtgatgcagcacagaagaatactacgagtagcatactctgtgctgcactgctgcatcaccaagtgcctagtttttcttgcatcccggccttcccgggtcctatgcaagaattcgcctcaatcatactccctccctaaaaaaaaaaaagaaaaccctgggttttcatgtctaattttgattgtctgtcttatatgaaattttttttataattcgtattttcattgttgctagatgataaaacatgattaatattttatgcgcgacttgtctttttaatttttttttataatttgttcaaataagatgaaaacgttcggtacggaaaccaggattcgtctttttttagacagaggtagtagacagcgaaaaaggatcaaatgatgcatgatgggtctgagtgactgcgaccgagtaaaacgtgagccatgattattcaaacatgtatatcctaaatcaccactaaattaccatatagtcccggattttgtcctctttcggggacagggtccatgggccatgacccacggaagagaaaacgtgcccctcctttcatttcaaaatataagagtttttaaaatttttaataactatttaaaaaaataataggtaaatttaaatagggaatgttattattgattggaaaaatagataaaaaaattaaatgagaatattatgattgtttaaagagaagaagttaatatattttgtgataaattttaaatgatataagttgcaatattttggcatagaacgagaatcatccaaccgttctggtagtagatgtcgctttgctacattaaacaattaggtcgagtcgttatatatgccaatagggagccatgagtccattctgcgttaggaaggctaatgaagacgtgaagtagaagctgtagcagacaccctctatcaatatggcgtacgctcaagaaattcagctccaaatcagaggtgcctccactgctcctcaccatctttagtctcctctcgtgtaacccttcctttctggtgcttaatctcgtgacaatggtttaaaacttttaaacggctctcggttttgcaaattgccctcgttttctcgatgtttagttggtgtggttttctgcttccgctctaatgaagtttggagttttgcgagtgaaatggacgagaaagacggtatgtgcgtctgaaatgtccagcttaggagctgtttccaaggatcgagttctggcgcatggtaacctagatggtatgtgcgtctgaaatgtccagcctagtttgttcttgctctggctcgctggcagccgtcctgagccagcaagacagagctgttgggatcatcgctcttgttcttcttcttgttgggatttattttaggagtttcttcaaacttgggcgaggtaaccgcgtacaaggagtgctcaatagaaatagaaaatagtttttcagtttccaaatagagaaatactagtagcaaccattagaggaataacaggggcggagctacagtgatgcctatgtattcccaggaatacccaactttttttatcaaaaaacaactatacttcagtatatacacataacacatatacacatattagttgtccccactcctccagagtccctcgctcggctcacgcctcaccctcacgcgcaaatgcgctgctcgcccgctccccaattccccatttgattccaaaccctaggtggcggcgttcggcggcggcgcggcggcgcggcgaccggcggaagcggcaaggcgtccggcgaccggcgacgggagcagggagctagaccagcggtggcgcggcgaggcattcggcagcggcgcgacgccgtggcgaggcattcggcggcggcgcggcgaagccgcgagacggcaaccgacgggcgaccggtgacggcgggagcgaggccacgaggccgaggggcaggggcgcggcggcggccggccaacagctgcagctcagcgggacagcgcccagcggcactgcggcaggcgcaatttcaggtgacaaatcaagagttcaagattcaatcagtcctaaatccactcactatgtgtccatgtctgatgtttttttaccttagtctctgagtagtttctttttcctgtacttttgtagttctgtagattgaagaactctcaaaatgaagaagaaatcgattgatttgaagactttgtgggatagacattcaaagtctaggaaggtagggttaggttctggttctggatcaacaacacaaccagttagaattgacagtgaagttgctgttccttctgttcagccgattacagatgcaaatgagagtccagttcagattcagattactgcagttgaggttgtgcctgaggtagcagccagtgatgcagcaagagatgtgacagaacctgaaacagaggtagctagcaatgatccagacatagcaacagcagtgacacagcaggagcaaccttccacttggtctcctatcagagattggtctcccatcagagatggtgatgatgaagagacagagtatgactcaagtgatgaagctatttatgacattgatttactttgtcatgatcctggaaggcgaattgcaatcaaaaattatgatgtcaatgaacggaattctgtgataaggggatatattgcattagggccatgccaaccacgcagccacaattttcctataaggaaaattggaggtaagcctcggcgcttccttcctagttggtatgacgaatttaaatggcttgaatatagtgtggaacaagatgctgcattctgttttatttgttacttattcaagcataaaattaataattctggtggagatgcatttgtaaataggggatttaggaattggcacatgagaaaaaggattgcaaaacatgttggtggtatgactagctttcacaatgtggcacaagataaatacaatcacttccttgcacctaaaacaaatattgttgagagctttgctgccaccaatgaacaagacaaggctagatatatggctcgtttaacctattcaatgaagtgcttgaagtttcttttaaggcaaggtttggctgcccgtggacattatgaaagtgaaaagtcacttaataaaggaaatttccttgagatgttgagtatgctagcagaaaactttgaagaagttggtaaggtggttttgaataatgctccaaagaattgtaagttgactgctcccgaaatacaaaaacagatagctaattgttgtgccaaagaaactactaagcttatcatggaagaccttggtgatgaatattttgcaatacttgccgatgaatctagtgatgtgtaccaaaaagaacagttggctctttgtttgagatatgttgataaaaaaggaagggtagttgagaggttccttggtgttgttcatgttgaaaatactacttccttgacacttaaagctgcaattgaatcattgcttatggagcattccttgagcttgtctaaggtccgtgggcaaggctatgacggtgctagtaacatgaagggtcatgctaatggactaaagaaattgattatggatgagtgcccttctgcctattatgtccattgctttgcacatcaactccaattaacacttgtggctgttgctaaggaaaacccagattgtgtgtggttctttgagcaacttagatttttgttaaatcttcttgggaattcttgtaagaagacagaaatgcttagagttgcacaagctcaaagaattgtagaagaactagatttgggtgacattgaaactggaaagggtttgaatcaagaaatgggtttgggcaggccagcagatactcgttggggatctcactataaaactgttatgcatgtcctatctttgtatccttcaattcaaaaagttcttataatggttggcaaggatcgctcttttggtgcagaatgtgcaaatgcacaaacagtgttgacaatattccaatcatttgagtttgtttttatggcacacttgatgcaaacagtacttgggttcacatctgacttgaatcatgctttgcagaagagggatcaagacattgttaatgcagtaggactgattttattgacaaagtttcaattgcagcaattacgcgaggatcctggatgggatgattttcttcaagaagtgcaatctttttgtgtgaagcataagatcaagattcctgatatggactctttctatcggccggttggaagagataggaggttctttattaaaatcaagaatatgcatcgcttccatgttgacatgtttctaagtgtcattgatagacaactacaagagcttaatgaacggtttgatgaggtaaacacagatttgctcctttgtatggctgcatttagtcctatagataactttgctagttgggacaaagataagttgattaagcttgcacggttttatcctaatgatttctcaagcacagagatgaaccatcttccatcagcattgaaactcttcctcactgagatgcgtatagatgaaaggtttagaaaagtaaaaaatcttgctaatctttccattatgattgttgaaacaaaattgcacaatagacatgagattgtttacaagcttctcaaattggttctggtacttccagtagcaacagctagtgttgaaagaatattttctgccatgaattatgtgaagaataaattgagaaacaggatgggggatcaatacttgaatgattgcttggtcacatttattgagcgtgagatgtttttgaaagtcaaggagtgtgatattataaaccgctttcaagccatgaaggaacgcagaattaaagctactcttccaagccacgaaggaaccgaaatagaaaattagaggtaccatgtaataatttgtaattttatttcttagattatcggtattgacatactgtgaaccattgattttttttactatgaatttttttgttagacgggaatacccaactttcaaatcctggctccgccactgaggaataaataaaaaatatatagagaaagtgggaaacatcacttctccatgcatgggccctcttattattttttttttgagggcactcttagtcttatcttcatcatatagtagtgtgactagtgtcattgaattcaacacaagtaagaccagagtagacgtaagcaggcttagcaacaacacataaggcatggtccacaggccccatcgcgttgtattttgcaaagaaaaacaaaaagacaaaaaaacacacagaggaatattttttatatacgtaaatgacatattctctacttctcaaattgatcatcatagaacaaaatccaaaatttcttaaattgatcattatataactgcatgatataactgtatggacacaaattttatcggaatacgattaatataacatgagagaatgtgtgcatgctagggcgtaattggcatattgttttaattgatgtatacattgtggaagaatgtgtgcatgttgtcttgattgatgcgatttaaattattattggtcttggtgtataaatatatatgatgatcaatttagaatggcggaagtatttactttgaaacttataaggtatttttttcgcagtacacacgctatttaaaagtagtatataaaaatcaacttaaaagaggagacatatgagattcagagaggtagcaattacattgaaaaaagtggctgaaatcaaatagtatatgatgtcgtatttttttagcaaaaccgttttcttattttacatgtaaccttttgttttgtttccccctaaatttcccttattttatccacgatcccttaaaactagatcgtcactccagttccttgtgatatttgtacctttttttttacaaatattctttcaaaaaatggagaactatcagatgagaaatgataaagttgatcttttccgttgcttacattttgtgtttgagaagtaagcttactgatgacggtgacactaaacagccatgtcttctgtttgcaaacttatgccagaacaagagtctgaccatggcgaggacggctctgcaccaaaagccgccgccgtgcgtggtgggtcaccgagaggcggcgtccggtggtggctgtcggtggcggcggacatgttcatggtgctctgcggccagaccgtggccaccctcctcggccgcctgtactacaactccggcggcaacagcaagtggatggccacgctcacgcagtccgccggctcgccgctgctcgccatccttctcctcttcacgccggcgcccgccgccgacgagcccaggccggcggcggcaaagatggcgcccatctacgtcggcctcgggatcatcatcggcttcgacaacctgatgtactcgtacgcgctgcagtacctgccggtgtccaccttctcgctcgtggccgcgacgcagctcggcttcaactccgtcacctccaggctcatcaacgcgcagcggttcacggtgctgatcgccaactccgtcgtcgtgctcaccttctcggcggcgctgctcggcatcggggcctcctccgacgagaccgccagcagcgtgccgaggggcaagtaccccgccgggttcgccctgacgctcgccgcctccgccgtgttcgcgctcatcctgtcgctgttcgaggccaccttcgagaaggtggtccggacgcggacgctccggtgggttctgcgcgcgcagctgtggaccaacgtggtggcgtcgacggtgtcggcggtggggctgctcgcgtcgggggactggaggacgataccggcggagatggcggcgttcaaggacgggagggcgaggtacgtggcgacgctggtcgggacggcggtgtcgtggcaggtgatggcggtgggctcgctgcggctgatcgtgagggtgtcgtcgctgttcgccaacgtgacgggcacgctgtcgctgccgctggtgccggtgttcgccgtcgcgctgttcggggacaggatgaccgggatcaaggccgtatccatgctcatggccgtctggggtttcctctcgtacgcgtaccagcagtacatcgacggccggcgcgcggccggcgccgggaaggggagagcggcggcggagtgccgcgtttgcgccgcgcgcgccggcagcgatccggactcgcccgcgtgaggggcccgcgttttctcacggcccaacaaaccgaaagtagctcacgtctacttttcgcctgaggcccaatacacagaggacatgtaggcccatcggcttgtgttttgagatactgtttaggttttaaaccgtgtatccatcatctgtagggccccttggaaaggaataattcactcgaggttctttaatttgtcaacgaatctgattttcatatttcaaccaaaatatttttccttcaactgttaaaaccggtgcaatgtagatcacatggctaattttagctgatgtgacatgtacatggctaatttgacttgatcttcatttgacgtggcatatgaagcaaaagttaacaatttaaaaattaaaataaaatatataggcccacatgtcagtcagaataataagattaaaaacagcgagacccacgtgtcagtagaccccacttcatccacctcatcctctctcttcactatctccttcccttctccttctcacctcttccccttcttccctagaggtggtcaccacgagcaccagcacgccagcgaataggagtagaggcacgacagaggcggaatcggcggaggccggtgagcaagggcagggagggaggagcatcaccggcccgggctcttcgcgcattgcccaccgtcactaagcccgcgagtatctgctggcgagtgcacgtagagggggacgaggcggggaggccggcgagggtggaatagcacgttgcacggcctcccgcaccctggccatggcgggaagatgaagctgctcctcttcctcgaagatcgcagctgtgcgggatttttctccggtgccctggtcgcgagcgaggccgacgtagccgcaaccgcaaccggcacacgacaccgtcaaaggttcgtgacacgcttgttgccggaccagataccggcaacaccgatgccaagcaagaactcgacaagcaatgcctcatcttcgtcaccgttctcgcctcagtgccagtagccaaagcaagtggagggactagagatcgtcgaggtggcaaccggcgagcggctgtcagcgcacgacgtcaggctcatcgagatggccggcagctcggtcaatgtctttgcggagttgtcggtgaagtcgtggagagggtggaaggacaagggggtgagatagagaatagaggggctaaggtagaggaagtagggcccactgacatgtgggcccactattttttaatcttattatttgactaacatgtggtcccatatattttattttatttttaaaattgttaaatttcgcttcataagccacgtcaaatgaagaccgagtcaaattagtcacgtagatgttacgtcagctaaaaccaccatccaaactgccatgggacctatatccactggttttgatagtttaggaacatgttgtatctggttttccagttgaaggacgaaaataggattcgtcgacaattaagggatctcatatgaacttatttaccttggaaatacatgaattggccgctgcggagtatccaaatttatccaaggaaaaagtacacccaaggtccctcaacttgtcatcgagatacaaaatcgtcccccaatcacaaaaacagataccggacgtccctcaactaacaagacagttcgctttaggtccctcggtggttttgaccctggttttgtccgatgtggcggctgagtcagcgtgggacccacgtaggccccacatgtcagtcaatccacgtcagcctcccccttcctcatctcttcctctcttctacacacagtcacacacccaggcggtagcgcgtcggcgcgtcggcagctgcggcggtagcgcctccacagcgccgcggcgaggcgggggtagcgcgtccacgacgacggctggcagcggcgggggccgcgacgggggaggggagaagggagggcgttggcgtcggcgtcggcggcgacatgggagaaggggagggcgtcgccgcgcgggcgaggtcgaggacggagaccccggcagcggcccagcgaagctcctcggtggccgaatatgggcccgggaaggcggtagtgaggcgggaacggtgcgggcgtgcaggcggcggcggcggcgcgcgcctcccgcgtccgtgcctcccgctgccttcacgcaccacgctggcgcctgcacggccgcgccctctccgtcccgcgtcagcgcgtccggccgatgcccggcggcctcccggctcagacactcactttgacctcccgccctgcagacgccaacatagatggtcatcttccggtccttcccttgcttgggtgacgacatcaccctgcagcaatccctccttggagactgcacgcgcgccggtttaagagcaacattacaaaaaatcaagggtttttttgttgtacgtacaaatcaattcagtcttttaactacagtgtgtgtttgattacccttttccagaggtcggggtcgggcttcttgaggacgatgacgcggtcgagcagagcggcagggtcacggatgcgccagccgcacttggcaggcacgacgcggcggcgctcatacacagtgacggtggtgttgcggctgtgataaaatgtgaagcattgaaccatttgcctcgggccgcatctctgttaaatagtggtagaaacagcctctaccgtggcttacaatgttcagttacaagtgataaggagatagaacagatttggagataagaaactaatcctaacaaccttatcactggatgagctattacgggtgtgagcagctgcgccactactggagatggaaaggctcccgtgtgctcaaaacctacgggaacaggccaaaaacacacggtaacgtcgttaccgagttctagctcacggtaacgctcacacggcggcttcatcggtttaccatgtggacttcccgtgagttcgcacgaaaaacgcacgggatggttgaaaattttaccgagtgtactcaaaactcgggactcatggtaacactcacgacgtaacggcgctcccaacagaacggcgggttaccgtgcaccaggatcacacggtaacagtttgtttgttaccgtgcgtccacagtatcactcggtaagttttttagtgttaccgtgagttgagcaatatcgggcactcggtaagctttttagcgttaccgagagttcagcaccatcgggcactcggtaagctttttagcgttaccgtgtgctgtatgctattgacgcacgggaagtcacactcagcactctttttttatttatatttctatttctatatttgcatgccaatatagatcacctgcaaaaagtcacacagaagactgcaatgcatcccaatcatttgcaattcatcatgacacattccatcacaatacaattcactgcattgcatccctatcatttgagattcatcaagacaaattttcatcacaatacaattcaccaagcatagaagagatgccaaatcccagacataggcatatattttggtaaaaattggttgtaatgaataagcatacaagctgatcatggtccatgtcacttaaagcaaatactcaaatctttgagacaatagctagcaccagattatttagttcattggtcctagaacatgcagttgaaacttgagaatacacctgcaattgtgagaaacttataagaaattaatttttcttgcaaggactgttgagtaggaaccatatgaaaatggtgctatgggtgctgctgtatccttgtgcatttctcatattatgaattttttcactaatctgcaccagcctcatgtttgatgctttacaaagaagtattgacatttaatttgaagcaaaagaataatatgagctagtatcaaattatcctccataattcggacccatgtactgttacaagctaattaaaccaaaacaaagaagaccaaatggtcagttctataagctgagaaatggatttgcttggaataaaaacatgagaaaatatgtatccacctagcaaacctacacacttgccattatgcagagtagcagaactatcatataagtaatgaaatgaaacatgcattactatatatcttgtgatttgtcaatatggttaagaacaatcaataatgtaacttgagcagtttttcacagttgataaaatgtatgcatctgttgatgtacagcaccaaccaccatccatgaattgatcttaaaactgatgagatgaaagtagataccttttctgatcagctctaatgatgctacttatattgcttcataacctgtaggaattagccacacattagtaagaacatgcaaggagactgatcaatacattgtaattatttgagaaatgattaagtagggaaggtttgaatgaaaaacagatcatgtccatgtagaagaaactaaagtgtaagaaaaggcaaatacattaagcaaagcatacttagcaagtcagcacagaagtggtcctcgtcgttgtcatcttcatcggttctattaaagcagggtggaaatcaatagaataagacatcaaatgagtcatcttcatcaattgtagaataaaatgaacatgtaaaaaagcaaaaatattacttagaaatattcatcaatgatggggccctcctcctcatcttcatcaaactcagaactatcagattcatcttgttgtagcacattggatccatttagaagctgcaagtccttgtcattgacaatgccttcggcatctctagtggtggcttcagaaacattatggagtccttccataagatcaactacaaaagtgccttggagaccatcttcttggaaataatggacattatcattgttgggaagaaagtcgtagtccttatccacaggggctgctatttttccagttggctgaaccttgtaaactacccaccaatcgatcagggctggtacagatttgcatgggtatggtatgtaataaacttgtgtggcttgatgagctacaacaaatggctcatacactgcaagtgttgatgaatgggcaacttccactaaaccatactgtggggtgtaccttgtttgggcagggtcaaaccaatggcagttgaaaagcacaagagtgagttcactatcaccatgaaaactaagttcaattatttctttgatgtagccataataatcagtgatatcactattttctccttgtcctattgtcaccaagccactatttatggtggttgcatttggcctctccttctcatatttatttgtacggaatcgatagccattcacatcataaatactataggtcttcactctagtatggcatcctttagctacttgcttcagatcatcattcatattcatgtctataagactctacaagtgaagtgaaataattttgatgaattatagttattaacaggtgcagaaattagatgttcaagttgaatattgaaattgaggaattacttgttggtagaaccaggttacgaaattaggacaaccattcctagcaccattccgtaagaggttctccttttgctgtcttgttggctcgcctcgtctactccactcctcatgtaagaatttcctgtaaacacagaactcatgcatgtcaagaaaggataaattatttcatgctatgaactggatgtgacccaaataaagtgcttacccaacgtagtcatccacttcaggcaggtttgtgaggacgtacaacatggcagcctcccactccacttcagttaagtgtctagtgactcctcggctagtagaatcacccttaatagagaagaggctaagtgagcattctctcgactcaacagtaacattgtaccgagggactggattgtgaactgtgtacacttgatcagcaaagtatatggttgtgaagtttgcgatttcatctagtatatatgcttctgctatagatgcttcaacacgagctcggttttttactttgctcttaagatccttttggtctctttcacctggatacatccatcggtactgtactggccctcccatccttgcttcgtatggtaggtgaagaattagatgctgcattggattaaaaaatccggatggaaagatcatttctaacttacaaagcaaaacaggcacttgaagttccatgctttcaagctcaattggatctacctcttttgcacacaatttacgataaaagaagctcaactccgctatcacttcccacaaataaggttgaaagtagccacggaacatgactggtaaaaggcgttccatcattatgtggtagtcatggctttttaacccattgattcgcatctttttgaagttcactcctctccttaggtttgatccatacccatcagggaatttgagtgtttgaaaccattctaatatttccttcttttgagtcctattcaaacaaaaatcagctcttggcttcaaccactgcccagatgtttgcctccggatcatgttaagatcaggtcggttacagagtattgcttgatcaagtcgagccttcacattatccttcgttttctctggtatatcgaaacaagtgttaaatattgcctcagcaacatttttttcattgtgcatgacatcaatgttatgaggaagtactaatttatggaagtatgggagcctccacaagcctggaatgtgtgtccaattgtgatcctcaccgtaaccttcaaacccctctccattggcagcaggttgcagacgttgcaagcgaacatgaacctcttcagttttgaaccgatgaggtggttcagtcgtaacagtagtatttgcaagaaaagagtttgggtcatttctaaaaatgtgaccatgaggaaggaattgtctatggcaatcaaagaaggagtactttccaccaaacttcagccgtctttctttaagcacctccatacagactggacatggcatcttaccatgtacacaccacccacaaaatatcccataggctggaagatcatggaacgagaataaatatgacacccgcatgttaaaattctgtttagtggcccgatcatatgtctgcacaccatgctcccaggcatggagtaggtcatcaactagaggctccatgtacatactaattttcttgccgggataatcaggtccagggataatcaaactaaggaacatgttgtgtttctgcatgcaaacaccaggtggaaggttgagagggatgacaaacacaggccagcaggtgtaggaggcagcacccataccaaatggattaaacccatctgttgctattgcaatcctaacattccgagcgtctgatgcaaattccgaaaagtcgcgatcaaattgcttccatgcttcagcatcagcggtgtgtactatcttgttaggatggtacctatggccatacttgtgccaagtcatttgcttggcttgtggttcagacatgtataaccgttgaagtcttgggatgaatggtatataacgaaggactttcattggaatatttagttgcttcttttcaccatagctgttctgcacctccacatatctactctcaccacacttgtcacaatgggtcttctctgaattttcctctctaaagagcatgcaatattttgggcatacatctattttctcatatggcatggtcagtgcacttagaaatttcttagcctcatataaattgagaggtagcttgtggccttgtggaaggagagcaccaaacacattcaacaatgcatcaaaccctgcaatggatatggaaaattgagacttcactgctagtaaccgtgtgatggcatctagttgagatacttctgtgtgtgcatggagagattgatttgatgcagtcaacatttcataaaaagctcgtgctataggttccggttcttcctcctcaactgatatatgtgcatcacgcacatcatctaccatgtcatccatccgatgaacctcagcatccccatcttcatcaaaagtacgttgccggagcacatcatcgcgtgtagggtctgagtcagactcgccatggtaaacccacacagtgtactccggcctaaacccatgcttaaaaagatgtttc

SEQ ID NO: 6102 - DNA, 4674 bp, Oryza sativa
ggcgcggccagcagcacgcgctcgccaccgctcccccctgcccccgccccagaccccgcgccgccccgaccccgcgccgccgcgccgacacgacgttcttgatttggttcggccgccgcaccgacacgacaagtgggctgccgccgccgcctcttccgccgccaccgccgcctattctgtcgcctgcctcagtgcgccaaggagcgagagagagaggggaaggggtgaagagaaggggagaagaaaagggattgggctgacaagtgggtcccatattttattttatctattttggctgactagactgccacgtatgcgtccacgtaggaccaaaaccgccctgaatcgatctagggaactaattcatccggtttacaaagtttagggtcaaaaataactggtattgaagtttagggtggtaaatcggacaaccgcaattgttcacgagtgcaattcgtactttttcctacaattaaacagctacatgtccctctatagaatataaataaataaataatgtaattaactaacagtgcaaactatttcaaataacaacacctaaaaaagattcttcgttttaaatcgttatagttatgattcggttacttttttttagttttgaaccttttgaagttttaatttaaaaataaaatctccaaagttatttctaaaagtaaaccttaagctggtgtggcaagagtttcgccacgtcagacatgatggtgtggacaaaagtttcagatttaaaaataaaatttgagagatttcattttatatattaaaaattaaaaaggtttagaagataataaaagttctaattcagtgtctttgaaacaaaagaataaacatattctctccgttttattcaggtaggaatttgctcggtgtacaattagtacattaatttttagactgataagttgaatcataatatcagtatgcaattacactaaatttgatttttcttatttttgttttaaggccaacttaaacacaaagatataaaacacccgattgtccagttgcaaaaccgcatcttcgccatccagattacttggagctccacactgaaacgacgtcatccaacccgcggggtctttgcacgagccgtcgcctccattatatattttgtacacacctacagttgcaaacaatagcagcccaagcatcctgcgcgacacagcaatggcagatgattacttctacctcggcttggctctcgcgtcgttgctcgtcgtgctgttcgccaggcgcaggcgctcggcggcgcatggcgacggcgggctgcggctgccgccagggccgtggcagctgccggtcatcggcagcctgcaccacctcgccggcaagctcccgcaccgcgcgatgcgcgacctggcgcgccgccacgggccggtcatgatgctccggctcggcgaggtgcccacgctggtggtgtcgtcgcgggacgcggcgcgggaggtgatgcgggcgcacgacgcggcgttcgcgtcgcggccgctgagcgccaccgtgcgcgtgctcaccagcggcggccgcggcatcatcttcgcgccgtacgggggcagctggcgccagctccggaagatcgccgtcacggagctcctcaccgcgcgccgcgtcgcctccttccgcgccatccgtgaggaggaggtggccgccatgctgcgggcggtggccgcggcggccgcggccgggcgcgccgtggagctgcgggcggcgctgtccgcgctcgtggccgagaccacggtgcgcgccgtgattggcgaccggtgcaaggaccgcgacgtgttcctccgcaagctgcagcgcaccatcgagctgtcggccgggttcaacccggcggacctgtggccgtcgtcgcgcctcgccggccgcctcggcggcgccgtgcgggaggccgaggagtgccacgacaccgtgtacggcatcctcgacggcatcatccaggagcacatggagaggacgagtagcggcagctgcggcgccggtgacggcgacggcgacggcgaggaccttctggacgtgctgctgaggatacagaaggagggcgggctggagttcccggtcgacatgctcgccatcaaacaagtcatctttgtaagtaactatcagcagtaatattcatctatagcctcttattcaaaatttgatatatttaaagttgatatcattcgtattattcacagtaatttggaaacacaaaaaattataagttagtatgtttaaaaatctttaatgataaattaaatcacagtaaaataaatgataattacgtaaatttctaaataattaagacgaacggtaaatatattctaaaaagtcaacaatgttatatactccctccttccaaaagtttaagacctattttcattctattttcattctttgggttttccaaaaaatctaagtcttatttgtagtcattatgtgctaaattaaattattgatgagaatccaagaagctattttagtacttattaattggttgcatattcattggttttgtcacatggtgaatgagttaatgacttcttagtcttggtgaaaaaagaaatagtacttagaattttggatggagctagtattaagaactatagagtgtcattttactttcataaagcgacccgttctcctgagacttttttttttcacttagagcttagagaactcaacaactagttgtagtcggacagacatggagagaaaacaggggcacaaatgtcgtaatattactaaatgttaatataaatgttaatagagctatcctggagcaaacaaagacacgtttggaagtattttcggcattatagaaaaaatagcaatgcggacaatattttattgtttgcgaggacaaatagcaagtgcggataataaaaagggaacaaaattctacatataggagatatggtacatcatggaactcattttcaaatggaatctttatcaacggcaaatcgtccaccaactatcagtaatatactaataactgatcaacgtggacacattttttaccttgaactactaaaactggttagaatatactaacctaagaaacggtcaaatatcactccaaggcaacccaatcatttttgaaaactgttattttttagttcacaatttttatatacttgcacagaagtacagaacccagttagaaaaaatggtatatcaaaaattaaaagcatttgcaatgttagtaaaaatcgtgttgttagaatatcaaaagcatgagactacaaataaaacctggatgatttatcttggagagatgtttgaactggttttgatattgaagattgcaaaattaatgcccctttagttttatagttaagattttttttggattatgaatttatgatgtcctaatagaggtgccttcgagttatctggacaaataacacctctaaccgtacaagcaagtacaaataactagatattagtattatacaattactttgctacatgtataggtcagaagggttatataatgtttacaaagaaaagaaatatagatacaacatatgtggaggggcaacctttctccttcattctcttcttcaagcgtacgattctcctctctacttctagatctatttatataatgtgcacttttcattttttttgacttgacacttttcatacatttagtgatgtattagtgtataccctggacgactggtttctaaaaatagcatcgtgcacatcagctgctacacagtgcaaagtttaattaggaacatgcatgcatgattggttaccaataagggaataagagtcgtaccttctttaatttttttttgagaacgggagtcgtaccttcggcttccagaagtaataaaaaaaacccgatccgatctttgcattgccgcttgcatatggctttaatttggctattccctccgtactataaattattggattggatatattctatcaaacttgataataattgacatcattagtttgaagtgttttcaacctaactatgtgaaaagtgaaaaaaaaataaaaaacatattgggacgtacagtaaattttaatgtatccatcataccaaaaatttcacttgaaaatatgacacttatagagagagaaaaacatagggataagaaagtgaaccgtttccagaatccgggctataaaatgagctaaaaaaaatgtaggccttcatgtgctctggtgaaatagttcaggagagtaaaatatttttttctcaaaatacaaatgttaaaacagagtttatattttaagttagaaaatagtacgaattactccccggaactatcgcagtcgaccgaattatcccctgcacctaaaaaccaggtattgctcaacctaagcattttatttataaaaaaaaagagacccacctgtcctctctctctcaagcacaagatgcgccgtcgcggacggcggctgccagcgccacaaaagggggaggagatggagatgggaagacgagggaggaaggagaatgggagggagatctaaggggaagacaaggtggcccctgctgcgcctacgcctctggccgtcacatgcctctttgccatgaccccgccttgatgacgcctccgctcgccgtccgcctctccgccacgctccagcctcgcccgccatggccaccgccgtgcgcgccgacctccccctgccaactccatctcctcctct

SEQ ID NO: 6103 - DNA, 5309 bp, Oryza sativa
aaattgaagtagacaattaagattgcttggagatgaattgtccaactaatatagatgctaaaatcatgcggagttgttaaacttgtctataagaacgtcatttaggaggaagagacaaaacttattaaaaaaacatgtgaaaaacaagcaattggcacaatgccttgcccttataaggctgtgtttagatccaaagtttgaatccaaacttcagtttttttctatcatatcaacctgtcatacacacacgacttttcagtcacatcatctccaattttaaccaaaattcaaactttgcgctgaactaaacacaacctaaaactatagacagaacaccacttgagatatcaacttgtccaatccgtcaccaatttctttccactgactgatttgatgggtttttgttatccccaaactaaaggcaacaatgaaagcacattcagatgttaaataacttgtgaagtcaaacattgtggtaggtatctccagttatgttctctctagaagcaaagcaagaaccagatcgacaaagagatctactcctataacacatttactctatataagggacagtgtaatgaatccacctacaccttttttttgcaggaaaagtcttcctcagaagaaccaacagtctctatacgaaagaaacatgcagtgcatacattgcaacatgaagaggaaaaaaaaaagcgagagagagtagtagtagcaagtaaataccatgagtaaaaagagccgcttgtatttatgcgagagatgatgatgatgaggctagcttttattgtgctagatctccaagcagtgctgtccaaccatcataaacagctgcgaagggaaggggggaatcaaatgcaagcaagcaaaatgtttccataagaggccaatccaagagtaccttgtaggtccttgttcctccttttcttgcctcccccctcctgtgctctctctcctctatccgtcaccccttgaggcagacttgcagggttgctgcagtccttatttactgctcatcaatcactcatcttctcctcctttgttgatcacagaccagtagaaacaatcacttcaatcccattttcagttcagttccccttgtcatgctacctacaacttagatccagccaaactgtgaaaagaagtaaatgaaggccgtacctttgggtgcaatatatgcttgagccccagatgctgcaaatccacctcttcctgtcttttggtgtgcatccaggcatcccagccgaagaacagcaacaatcaccatgcacagacaatgctacagcttgtgaaaacatcttatctgtctaatactacaatgttcaagttcatgacatagtgttggaatatgtgttcagtaaaaaaaaagaaatttactgctaagtagtaaaactccattgtggtatatatttcagtaggattttgttggatctgcaactcctatcccaatcaatccgatcctcctcttcagcttgaacgtggcaaggacccagggggaggcaacagttgtcaggcacttaaaaacaaagagcagtgtgcttttatgctcccctgccatgaaatgtggcaagtgtgtgtgcgaggaggggaatcaaatgctacaaaaggaggagctccccagaagtagccaatgcaacagtacgaagctcctttatttgtccaccaaacccaatgtaccaccaccaccaggcggcgcatttggaagttggaacgaagcaaattctggtcctctttgaattttccattactgtatctatagccttgagttacaacgatatgtaacttcacagcaattctcaactgcaaagagaagcatgagaacataaaaatgtttctttacaccataacccagatgattttagtggatgataagcatatcatccagcattcatttcttgaatgacaggaaatatttaagctgcaaagataagcagaacatgaatgaggctggtataaaaataggtaaaaaaaaaagctcatgatgtgcaaactgcaaagcaaatcagtaataaggcacatgctgaaagcaaccgcatgtagcaatgcaatgagagttccagatgcacattttattgcagaaatggcaggtgatcacattgcggtgcataatgaagcatcattatttacaaaaggagcactcttaagttttacaacacttatgaaccgagccagggcctacctgttaaataactaaattcaaggtctcaagcactcacatcacaggcagatgtcatatggaggacttaggattgcttaaagcttacaagaaacatgtgggctagatatgtcgataatcaggaaaaaaatacgttgcttcaaatataccttaacattgtatgattgaacccctaagttcatcttgtagactgtagtgtgtgcgtgtgtgttagaaaacaacacactcttactatttctccttggttgttaatccccccgcccccgccttttttaaaggagacatagggtaattaccatttgctcaaactacagtggatctttgaacctgcatttcactcacccattggagttttcgtcaagtatgttagccttagccaaatatctttcagcaaagtttgagtttgaagttgatatgaatttgcaacaagaaacgccgggggtcttccggctagcagcacaaggtggtgggctagttagcctaggttcgaagtcttatcacccctcttaataaaattcgatatgagaccccttcctctcatatctagagtttttttttaatttgcaacctccaggatatataattatttattattaaaaacatcaaactttgaaaaacacaagaaaaacccaaatatttttaatcacatataatgctttccatttttactgtaaaataaaaaagaactaattagaaccattctcactcgctgcaagcatattaattctttttcttcaaaaaataggcaggtgttttgcctagtatattaatagaatagaaagggttttgataacagcttggaaagctcccaagctaagggtggtgataaaatctaaagcccaatgttctgataagaactcggtgcattcgtgcgccaggtagacaacaagtatgacctccctccttgatctttgcttgggagagaagcacgttaattatactgtctaaaaacgtgccttgtgcagcctttggttcttttttttttttgccgggtcggccgaaggaacggcgaccaaatttcattaagatgggggaagtacataaagttacaaattgtttcttgcttacaacgacaggaagctgtcgagatggtgctatggcaaagccacagcctttggttcttcatattcctaatgctgtttgatcaggggtatatatataactttcaaggatcagtatcctgtatcctccgtcgagcacactgtctcctatgatctttgcctctcatcctgatctgcaagagtatagcatgggaagagattgcagttaggctgcacagatcaaagtcagaagatgccataattttcatagaccaacagtgttaagatcattgttgctatgaatgccagaataggaagacataatgatcaaatgttcatggagctacagaaaacagggtactagaaggaaagaaatggtgtaccgcatggtccgcatccgcatgtattacaaattttacatttacgcataaaattaaacatttgttgaaaagagtacggatgagtcaaccaccagacattattttggtttccaaaaaagtagccacagacagagcaagccttaatacaacgggtaattccacaaagtgagactagcagatgtactagaagagaataatttctgacaaaattggcatgtacgcactcagcacttgttaacacaatcagcaatcaacactatgtaactatgttcatccaaccagttacaaagcatacaatagaaacacacctaatgaaactgtgcttgaaacttttcaggcttgaacaaattgatagagataaggatcaacagttgggagggcttgatactgcattactgcacaccattttatcagctagttttgctaacgcgaagaattcccgaagaactcgcaccctttctcttccattacacccaaatcacacctaccacctgacgatggctcgcttctccgttagcgacattgccgtgaaatatgcttcgttcgcaaaacgggggcggagagagaactgagaagagcagactgacccttccggaggaggagcgaggacagtcgggtccagcttctcttccgcggccgccgccgccgccgccgcgcacgctcgccgctttcccgttcccttttttttttgggggggttttcactcaacacgtaccccaatccaactctcacaaacacgatgaatttttttcggttttagatttttttaaaaaaatatttatagaaataatctatcgaccaaaaaaattacaaaaatagaccctgccgcccacctctggggcggcaagctgacgtggcaaacggggggaggaacgggcggtgacgaaagaagggttttttcaggaaaacccttgccgccctctggtggggcggcaaggggcccgaatgcaaaaaagccagtcggggccggctattttgcaggcggccccttgccgccctctggccgggcggcaggcctcgctccctataaaggcctgctgcccagcccccagccctcattcttctctcctcaattccagtgaaaaaaaaagaagagaggggaggagaagagaagaaggggcgaagccctgccggattcagacgccaatttcaggtaatattcatagatcctatatgtgactattgagttaaatagtgtgtattctttaaaaatttgtttgaataaatgcattatatttttagggttttagttgtactaatctagaagtgcgtattgtagatatcggtaactacgtagatctactagtttggaatcaatactgtcatgcttccttgtcccattattatatcgtcgttgtgttcaactattgcactacctccctcctagttcaaatctaatatcatctatgtaaccgcaatgcaaatagtcgtatcatgttcaaattgtactactatttcttcatgttacataattctccttgtttaagtccatataatgtttctacgacccagactgcgataggcctatataaattatccgagtactaatacgtcgaataaggtacaaaataatacctcacgtaacatatgaaattgcgcaacaaccaacttcaatacatttttataacaatattaacaagttttaccaataaatacttctttatttattattaacataacatagaaaaatcttttggccgtacttttttcatctgg

SEQ ID NO: 6104 - DNA, 14700 bp, Oryza sativa
tctgcctcgccgcggctctcgcctccagcccgaccccgaccgccgcatcaccataccggagatcatggagctgtacgactccgacaccgacacgatctagtcctcgtcgtcgtcggaatctcccaccccggtggccggaacgcctcgcgtgagctcacctctccgccgccgccgcctcgcctctccgccgcgctcgcctccgccgccgccgcgctcgcctctctgccgccgccgctctcgcctctcctccgccgccgcctcgcctctccgccgctttcgcctctcctccgccgccgcctcctcacctctccgccgctttcgcctctccgccgcgctcacctctgcctcgccgccgcgctcgcctctccgccgctctcgcctctccgccgcgctcgccgctgcctcgccgccgcgctcgcctctccgcatccgccgtcgcctggagaagtgagagagagagagtattgagaagagagagtagtgtatgacaggtgggtcccataattttttataaagagaatgatgactggagtaattcgtccggtatttatagttgggagtgaagaatgtccgattttatagttcggggtaattcggacgaccgtgatagttggagggtaattcgtacttgtcccttaattgtaacgctaataagtactaataattgaattaattgtttatcagatcccttcagatctcatgcacgttcagcgtgtactatctggtggtacacctctcgcatggcctgctgtctgtcttgtcagttatcagccacaagcatatattttaatattaaattttgattctagaattgattttatatttttttaactttactttttagcattttcttttaaaccacaactattatcccataaatatttgtacggtttattctcatagcagtttgtatgctgcacagttttatggataattggatatacagtaggactttcatcgtctcataataagtttatttttagttcttttcatttgttttaaaataagtttatttgagctattgaagtttgtgaacttatgatatataaatgtacttagagtagatgaaatttaggaaaacaggagtattatagtcttttttttattggtatgtgtggaattattttagaattgagaaagtacaatgcagtaccgcatcatctatagtacgagcaactaacaaatgaggccgggcacgtatatcaatccctatttcgatccatcagctcctacaagtgtagaggcaatattgtaaagaaccatgcctatataaatctgtgttttttctttttgtcaccatgtaatgacgcatgcaacaagatcctgaggtattcttgtgttcatgagactatcaaggtgtcaatcgaagttgcctgtctccttttggtgaagaacattaaggctatgtttagattcaaactttgaattcaaacttcagtcctttttcatcacatcaacctatcatacacataacttttcagtcacatcatctccaacttcaactaaaatccaaactttgccatctaactaaacacagcctaattggaatcctcctccaaagtgatttggggtctggaccaatcaggtattcaggtggagtactacatattttcgctgcaaggttgttgagctttgtgcttagtgatgtgactgaccttggccggccggcggaagccggcttaagaatttcttctcgttttctttttagggcatgttgaggttccaaataaaatttttcacgctgtcacatcgaatatttagacacatatatagagtattaaatgtagacgaaaataaattacacggttcgctaggaaattacgagacgaatcttttaagcataattacgccatgatttaacaatataatgctacagtaaacatttgctaataacgaattaattaggcttaataaatttgtctcgcagttttccggtggattctgtaatttattttgttattagattacgtttaatactttaaatgtgtatcaatatatccgatgtgacatgtaggggaaaatttttttgccaattaaacaagcccttagaaagggaagactctattaccagaaatgattgtgacattacaagccaaaaaaatattaataagtatatcaaataacagactattctttctttagataagtataacagactattctgaagtctaccagggacggcaactggtagtctggacaaagcgataggaaacagaagccgaatctgaacgaaagcaagaaacgattccgctgttgctgcttcacacacaatcgaacgaatgggacgtgctatttcacgctgcaaatcggacgcgggcgggcgagaggacggggttcgaagctctggaaatcggaagtactctctccttcacgaaaaaggcaaaccctagatttccttactaacgtttgactgtccgtcttatatgaaatttttttataattagtatttttattattgttagatgataaaacatgattaatactttatgcgcgacttattttttaaattttttttataatttttttaaataagacggacggtcaaacattgaacacggaaaccagggtttgtctttttttgaacggagggagtagtaggtaactggagggaggtaccactcgtttgctttactatacgagtacctgagtttcgattgacgcgtgtacgtacggtaaaaataaatgaagtaccaggcaaacccccccccccccccccgcccctttcctatgtagcttcgcccttggtaggcagatgacgtaccaaacgaaccgacggaaacatttcatatgcgcatgtactctcgaatgtgtctgtcgctttaccgtacgatacggccatcttatctagcaactgacttttagaaccggtggtggaattggctaatggccggagctgaatgggagttggtcttctagtttttggtgatgtttgtttgaagggtagggtgaatgaggcagctaaaaagatgaaatattctctcaatattcacgatagagggattaggcttattttaccggattaagacatccaccatgtggatggctaaatggactgtccagccggggcatgaccagacccgagcctgagatcagttgggtcagcacgacttgacctgcatgtcgggccgggccatgcccacccatgggctgcaccaacaacccaaacacagtccaataagattcgggtcgtgccgagctggctcgaaggtacgaaagcccaccgtgctcctccttggaataagtctattttatgtccctcatatctttgggccgtgtcttatatggctggaataagtctattttgcattctttatctctttgggctgtgccttatatggctaaaataagtctatttctctccctcatctattttgcctccctaatcattggaacatgtcgtatcgggatggtccaccatgctgaggcagaggcccaagcacagcccaaaggttgggccaggccatgccatgcctgggccaggttgtctagcctcaggccttttggcaatctataatccaccttgtctagaatactaattagtgtatgattactaagtaggttaaattatgattaatgatattaaacatgtttgatattgattagtaattagcacgataaaactagtgtaaacaagtgctaatttgtattattaattgtatgacttactattattatagcacttctatatctgtacctaactaaaatattcgtatttttcctttagtcacacttttttcgtccgtccgattccctccatctcagcacgtgcatgcgcagatttgaagagaaacagactcgaactataaagctagggtttctcttccaacatctatacgacgtggttttgttttgattcttgggaaaacagaaaggggagaagataaggatcaaaacccctcactcaatttctaattatctccatggatgtggactgatttcacggaggaggcggattcaggcgtcatcgggcagatgcggcaatacggacggaggtaggagacgacccggtagcactggcccacatgacagtaaaagaaggagcgagggaggctgattagacttgtagtgctttgctgggccggatgcgtacttgcgggccgaggaagaggggaggagaagggagaaaagtgggccggctaggctgcaggccgaggaaggaaacgggatgaaattggcgtagagagaatggagagtttttatttagatttttttaaaataaattcttaaatgatgtttgtattattaaagttagcaattgagatctgaaaatttcaagaaaattccagagagtgtaattaatcatggagaacttcattaaaaattaaatttagctatatcattttatttccacacttactttacttttaaattaatttaaacacctacctacttaaaaaatcaagtattccaggaaatgtgtatttaatttaattacataatgtaaatctttctcaaattctcctcaattttctcatcttttcttcccgttgcaacacacgggcattttttcgaggaagatattataattaagtttattgctttcatccaatccatcctcatcctaccaatcaaataagcttatcccatcctaaaaaaaacttagcttcatcctctaaaatatagatggctatattacatccaaccataaccttgaaccaaacataccctatccgattgatgaaacactagtgaccaaaggccaactcaagagactagaccacttgcacgacaacctaggacccaggttggtcgggggctatcactaaccaacctggagaacattgtcacctgccctcacgtccaactcgcatacggccacaccttacctcatcatgagttcatgactaagattatttaagttgtggtcttatgatcttctcatcttctgatttttgcatcaatttagcctaaaacttaggctaggattttgtttcactcttatttaatttacttcacaattttagatgtttatcatgttagtaattgttggtatttctcaatgtcacagctagaatccgcaagcgcacggatatactgatgtagcacttcccctacggagtattccaaaggtatcaaatccaagagaacgtgtatgattatctcctcgttaggttcatccaaggacacaaagctaatgtgggcagagggtagagaggatttcctaatgagaaacagtgtttaaggaaagcttaactttaatcctaacgcaatacttcaggcactggcaacccgctgttaccagatgtcgctctactacgtaaccggacagggagtacttaagtgctcttgagggctgtcaccacctctacacctacctcaaacgtactatgggatacgcagcaacaactgcagattaattatctagacaccgcatctacgcaattaataactactctagtgccgatcaaacactaaagcaatcactataaataaatagactatagtaaacaatgatcccgtatgctaattaggaactaaccaagaagtaattctcactaagcaaatcttaattactcagaatgatatttctattaaagcagagtaaataacaagatacaaaagtaggaggagattatcgacaactccgggattcctccgattccttccaccttaccctctccctattctaatatacaataaagtatactagagcctcttataattcagcttatgatttggtgtgtgtttacaagtgaggatgagaggggtatttataggtgaagtgccttgggagtgtggagatgctccaagcatccaaagagcatcatctctcttgtgttgccaagcgttcaagctaatgacggtttctaccggtgaaaacggccataactgtcattgggaggcggattgctaccgaactgaacttgggctggggcgaacggcctctgctagggttcagccgaactcaggggttcggccgaacccgggacggctccgttcgctccggttttcgtcctggacactcattttggggccctcaattcattggtatgaatgtttggcccatatggaggtgtttaatttatgggtccaaaactccttaagttcggatacgagtttgattctcatcctccttcatgtatatttcctctcaaccttggtagtttgtcacctgcatataaatatacaccaacacttgtggaaattattataaataagccctaccactatgttggatgtttacaattatggtcttatgctggtattaacggtgttaattcgatacttaacagccatcaacagtaatgtttatttgtgttactttaactgatacatgatttatctcttctctgtccctactattatatattataaaaattgaagatgtttccgcggtccgtcatccgtgtttgagtcgattataaaaattgaagatgtttccgcagttcgtcattcgtgtttgagtcaactttaattttatgttttagttttagtctatatctcttctctatctctatctctatctctactattataaaaattaaaaatgtttttgccggtattttggtacgtcatccgtgtatgagtcggtttttaagttcgtttgcttttagaaatacatattcgtatttcagtcggtttttaagatggtaatatagaaggaattatatgagaaatatgtttaaaaaaactcgcatgctaactgagacgatcggattccttagtgcagctaatgatttcctaaaaatatatatatccaagtgaactcccacagtgaattttatccttgtaaatatagcgccggctgggccggcgacgtcgatgacctagacgcccggcacgggcactctaaggattggacggagcaggaggttggccttgcggcgcgccgtgatgccgaacgcctctgtcatgtcgaactcggtcgggtcagccacaccggaggcctcccagtcgatgtggaagagcaggctggcgagtgggagctccacgtttgcgaacccgaacgccatcccggggcacatccgccggccgccgccgaacggcaggagctcgaagtcggcgcccttgaagtccaccgcggcggccgcctcgccgtcgccgaaccgctccggccggaactcctccggcgagccgccgggccagtaccgctcgtcgcggccgatcgcccaggcgttcaccagcacctgcgcgccgcgcggcacgtcgtagccgagcacccggcacggctcccggcactcgcgcgggagcagcagcggcagcggcgggtgcagccggagcgtctccctgacgacgaggcgaaggtacgggagctcgccgacggcgagcgcgctctctgacacggcgccggccgcctcgaagtcacggcgaacctcggccgtcgccttcttcatcgccgccgggttccggattagctccgcgaacgcccaccccagcgtcgtcgccgacgtctcgcagcctccgctgatgacatcctgcgtgtgtttcatcgtttttttttatgatatgaagctgcgtgatcgagcattcgagctggccatcatggcagagaaaaaagaacagcttggaaagacaccatgaaaccattgttcataagaaatgctgctagtcactcacaacgacgacgcatttgacggcgtccatgtcgagagggaactccagcccgccctccttatgtatcctcagtagcacgtctagaatgtcttcgccggcgccgccagtcttctccaggtgcgcctggatgatgccgtcgaggacgccgaacatcgtgtcacgacacctctcggcctggcgcacggcgccgctgagacggccggcgagacgcgacgacggccacaggtccgccacgttgagcccagcagcgagctcgatggcgcggtcgagctggcggaggaacacgtcgaggcccgcgcaccgctcgcccaccacggcgcgcacggtggagtcggccacgagcgcgcacagcgccgcccgcagctccacggtccgcccgtccgccgcggccgcggcgaccgcgcgcagcgtggcggcgacctcctcctcgcggatggggcggaaggacaggacgcgtcgcgccgagaggagctccgtgacggcgatcttcctcagctggcgccagtagtccccgtacggcgcgaaggctatgtccctgcctcctttggtggccgcgcgcacgctggcgctcagcggccgcgacgcgaacgccgcgtcgtgcgtccgcatcacctcccgcgccgcgtcccgcgacgacaccaccagcgtgggcacctctccgagccgtagcatcatgaccggcccgtggcggcgcgccaggtcgcgcatcgcgcggtgcgggagcttgccggcgaggtggtgcaggctgccgatgaccggcagctgccatggccccggcggcaaccgcagcccggcgtcgccatgtgccgccgccgccgatcgcctgcgcctggcgaacagcacgacgagcaacgacacgagagctaagccgaggtagaagtaaccatctgccattgctgtgtcgcgcaggcaggatgctggggcgctcggctagtgtttgccagtgttggtgcgtacaaaatgtagtggaggagacggctcgtggatgaaggggatttggttcttaatctgtagtgatgtcgttttcagtatggagctccataatccggatgcgacgaaaatgcagttaatcttcgtgaggacaaatgaatgttatcttgtttatttctggtcatttataacgttaatcgtaaaatgagtataaattaaccggctaggtttctggaatctatttatccggatttaaattcttaagtgggcataagcacttgtctttatgactaattattatttcattaatagacaatgtgcctctcgatagcaagccgtcatatcacaacttcctgaatattaagatgtgtcggcccacctaatttgaaaatcaaatttaatgaagagagtactaaatattaaagtttaattgcatacctaatgccatttatagtgcgcgtgcttgacgttcggccccgaccatccacatcggggattccatgccacgcacacatctgcgctcccaacctgaagaccgtggaaccaaacaaagccaccggttcttcatcaaaatttggatagacatttgtcaaggcggaatgaggcacagggcgagcagcgtgttgggtgaggtgtggccccgtgcgacgcctccacacctcgtgcaaggcggcggaggtcgccagcgaggccaccatcacgagctgcgtcgtcgccaaagcggtgctcgctaaatcctgtgaacccgaggtcggatctgcttagtggggtggtggtcgagtgaggagaagggaggatggtggcgacagaggaaaaggaggtggcaaactaaccttgttttcgttcccgttcagcgccgccaagctcgtcgtcgtccccgctccgaaccacctcggtctgcagcagcagcagcttgacggagagggagaggagctcgtcagtatccggccaagggaggaaagccaccagttggagtaggacatgagtgggggtctttgaagagctcccgccgtcccttgctcccacgctgccgatctcgccgtctcccgcagtccacgccgcccaagggaatagggccgccagttggggaaggaggatatataggaggggtggtgtgccggtggcgactgtatggtgaggagcgtgggtcgccgttgggggatgggaacgggagaggcgtcggtggcactggaagggcaacggggaaagtgaggaaggagggattttatatatgtttccgattttgagggtgttttgtgtaaaatttgaagtattctctaaattgacaaactacgagaactttaatgtaaaatgttaggggctgatatgaaaagttaaagccacaggtataactcctttgcattgtgggataaagagagagttgagacccgttgccccatgctacacgaggtttctcgtaacaaagtgatgcactgtggaataaagagagagttgagacccattaccccatcctacatgatgcttctcataataaagtggttctctgtgaatggctcgatagaattactgccaacatgccttaggtttcacgatgtttctagctccatcataagatccatataagcagtgagatatatattatgtggggattcttcgcaatcattactatactacaaaaattagcgtgtctattgacgcgttgtccctttagcatatatagatcatttctttattttccatttacccttctgcgaagatcgcacatttaaaaggataatttagtgggagtatcgcgtgttaatgacctgtaggtttttaacagagtgaaacaattgaggctaaagttagaacaaaccgataaattttgataaaaacaactacacttttcatttcaattatatttatttgtgctgctaaaattctagtatgtgtctgaacctgaaattgattatctttttctttcttccttcctgtttgtgctgtctcctaggccaattggatcgtttagcacttcaaagtgccaccaggcccatgcagacccagctgcccaagctgctgctcgtgcggtcgtgcccaagcaagccgtaggtcacgcagtgtgtgtgtgggtgcggcttccctgttcctacttccgtattcccgtcccttttcctgctacgtggcctactcctattcgcttcttgtttgcctggtggccccacccttcttcttccccaaatcaaaacagaaacgtataattttttcagccttcattactccattgttatattggattagttccgcttggacacttccacctccaatgatgccccgtagccgcaggtgatttcctcttggcagctttcttcgctaatcggatgtgtggcgcatctcaatagctttgattatgtctgcaagtttcaagatgtgctcaggtaacaccaaaaactgttactcgggtgcttcctatcatccatggatgaacatggagacaaaggtttttggaagttttgtccttttatgaatgtgtagcagttaatctgctaggagttcatttcaattttcatcggtggaagcctgtaagagagtacatactcacagagtcgcagacttgcacggttgcaccagaatgtatgaaaaaaataagaaacaaagaaaaggatggaaagaggcatcgccctagttgaaattgttatcaattaatgatcttctataacagtattgattttgttcttgcctcaagctagctaaggtttccgttttgtccctttgataccacacatgccattgatgcaaaagcacagtaatttgttcaggatggtttagggcaggcaacactagcaaggaagaatccaagaggacctctccaggtgatgagcatgcacccgataaccagcaaatcagcaaaagttgttcagacctgaacgatgtgaggatcagtctggaccctgtagggagagtgttggagactcgatttttgtttttccgatggatgggaaggaagtagggccaccggtgaaacaaaagcaaatggatgtacgccatgtagcggaaacagggacgggaatacggaagtaggaagtacagggaagccgcatctgggggaggggggtgccacctatgtttccggatacggttttggactttttcttttcctggtaacttgaatttatcttagaaatccagcctattttcatactggcggacttgaaagcttctaaggaatcccttgaagtcttggacaaacagagaagagaagatagttcttgtgggcgggaaacgaaaccatcacaggagggaagtgcaaggtgaattggacgtggactttcctctctactgcctcgggaggtcttggcatcctgagtctcgaaaaattcgcaagggcccttcgattgcgatggctctggcatgaatggaagtcaccggaaaaggcttgggcgtggggtcagaaacaccttgtgataaaactgacaagctattgtttgaaacagcaactacaaaacaaattggagatggagcgaaagtgaagttctgggagttggcttggctccgggcaaagattgaaggatgtcacaccactagtccacgcggcctctaggaaaaagagcaggaccctcaaacatgctgctttggtagatcaatggctgcacgaccttgctcttccaacaaacgaaggatggacaacggatctgattgaccagctcatcaccatttggagcgccgttcagaatgtacacttcacggaacatgaagaccagatcacctggaagctaaacaaccatggcgaatacacggccaccacagcttataaggtgcagctcctgggtacaacatcgtcaaatttcgacaccctaatatggaggccttggatgccgcacaagtgcaagtcctttgcctagctgatactccaatacagagagtggacatcagacagactagccaccagaggctggcccaacggatccacatgccctttatgtcgccagactcaagagacggctttgcacctgctagcggaatatagatacataaggagaatctggaatgaaatcgcgcagtggacaggcaacgaccatctaagaccttctagttggcaagtaactttgacagtatgagtggtgggaggccaccgtaagcatacgggaagcacacgctaaccttgcttgtgaaccgggagatatggaatgaaaggaaccgaaggactttccagcacaaggagttgccagcgccaactctgctagccaagataaaggaggaagcaaaaacgtaggggctggcgggcgcaaaaaatctcatcgcctggttgacaatgtaattgccagtagttaggaccgtggccctggtttgtttcctgtacattctccctttttatacagtttcttctctattcaataaaattggtggcctagtcgattcgttcaaaaaaaaaattatcttacaaatcgaggtgccacatgaaccaatcagatgttgacataacagcattagaagtattggttgatggattgattggttgattaataagccctgggacgttgtacgtatttatcttttgtttcaggacgcacatgtcagtttctacagccattacagaagcagtattggtatactactttcttcaatgcagttgtgtgtttctgtgtacaacgtttaaccactgtcttatttgaaaaatatataaaaaaataaaaaatagtcacacataaagtattattcatgttttatcatctaataacaataaaaatactaatcgtaaatttttttcaaataaatcagatggtcaattgttggatataaacagtgcaaaactatgatatttctggaacggagttaggacaaaggatcatgaggtcacaagtcacaagactcacaaaaagcacgcacatttactccactcttactgatactgctactttatctctgtcgtaaaatataaagaaatttatacaaataacaatatagacataatttcttatattttaattagagttagtagtcacttagtttacaacacacagctccgtactagtagtattatggaagaggtcggtggcgctgtctggcggaggacgacggacacggcgcaacgatgcgcccgtctgaggttggtagcggccgtgcgatgcaacagctggagcagcgcttcagtcagccatgcagctgcgcggccctgtggctgcaaggcatggacagggccggcggccgtgcgacggcggggcggtgcggcaagcaaccacggctactcgtttgttggtgcttctttcttttttttttctccatggctcggtgcaatgtctgtggccgatgcggcatggtgaaacgctcattggcgggcaaccgttcccaaaaaatccccaatcggcattcaccggcgactccacgtcggcgttggaggatttctccgagagcagtataaaggaacaagaatagagagaggaatctgttttcgtgattatattagtgagatgcaaaatggatttgcgagttgttacccttcttcttccttgatttctagtagaacgttatgctatcactggtggagaaaccatctttggtcggtcagccaaatttcacaacagtcccggttctaataaaaaccgggactaaaaaacatctttagtcctggtttaaaagttgaggagtactttttgatctttagtcccgggactaaagatcatttttactcccgattcaagaaattgtcgggttcaagacatacctcaactatttttactccccgttggtataaacaactgggactaaagatctatttttagtcccggttgtttataccaaccgggaggaaagagcacctcgagccgtgcgcgccatctttatccgctctcctctcgatctcctctcccctctcattaatatttcctctccatcccttcctctccccttcatccccttcctctccccttcattccctatctgatccttcctctcccctttcccttcctttcccgttcgcccctttcccctcttcggagcaccggccgggcgggagcggcggcggccgagcggctggccggccaggcgagcgcggcgagcggccaggcgagcgggagcggcacggccgggcgggcgagcgcccaggcgggagcggcgggaggccgggcgggagcggcgacggccgggcggccaggcagccaggcggctgggcgcggcgggccgtgctggcgcggaggcgagaggacgggaggccggcggcgccctcccctctgctgccggattttttttaatatgtgattcattggatttaatctgtgatgt

SEQ ID NO: 6105 - DNA, 23260 bp, Oryza sativa
  unsure (1)..(23260): unsure at all n locations
caagctctttatgggcggccaaaattgcaattagccccttgccgccctttgtatggccggcaagggcctaatcgcaattttggccgacggcggcaaacggcgcggtcgacccaccgtctgccacgtcagcttgccgcccaccattagggcggcaggggctatttctgtaatttttttggtcgatagattatttctgtaaatattaaaaaaaaaaatctaaaaacgaaaaaaattccaaacacgattcggttccgagatgatttatggcccaatacaaaagcccattaaaaatctagggtttaaaggtgggaaaaagtccactttgactcccttaaatgtataccgaatctaattcgtacccctcaaccagaaaaccggttaggatgactccccattttactaaaaccggtacaaatagactccctcggcggtttcaagggcggttttgctgacgtggcggtgttgacttggtcttcgtcccacgtggcgttgacgcggcactgatgtaagattagatttaaaaatatatatgtgggaccaatttgtcattcacacacaaaaattataatagaatccactgacttgtgggggtccacatgtcattctctttccaacctttatgcctccctctttctcccttatctctctctttctcttcctgtcggcgagcagcgcggagagcttgccgagggcacggatggcggagcagagggcggcgagggaacggagtggagggctccaagggagtgcgcgaagctgtgaagccgtgaggcggcggtgggtggagaaggccggcgtgaaggccgggcggagcagcggcatcgagagctgccagtcaccgcggtcgctcctgtcgcgtatcctacagcgaggcgacggcgacggcagcggtgggaagatcgggtgccgggtgcagctgccgtggcggtacagctccacctctgtgttgatgcgatgttgttaacactccgccgccgccggtagtggcggcggcggcgtgggaagttcgggtgctggatgcggctaccggcgccggccaaggtcaaggtcatcgggagggcgccggagttgtccctcgacacgccgcggagttcttgtacactcgacgaggggagaaatggtataattcttgccgtgcgcggcgccggtgcagtgccggagacgagagcgacgacacggaggaggtgactgacacgtcggcgtccttcgccgccaagacagacgacgtggcggcaagaaggccaaggacggtggcggcggcggcgcggtgctggtgacggtggatggcgacgtggagctggagatggagacgctactgaaggcgtcggcgtacatcctgggcgcggcgggcagcagcatcgtgtacatggcggtgctggacgacggcgccgtgctggcggtgcgcaggatcgatagcgacgacgcatcgcccgcggcatggcgagagggctggccttcctccacgacaagaagttcgtgcggcaacgtccggccgagcaacatcctgctcgacgccgacatggagccgctattgacggacctcagaatctaccggctcatccgcggcgggggcacgctcaagccggcagcagcggcagcgccggggcagttcgggagcaagcggtcggcgaagtgcttgccggacctgtcgccgccgggcgcgaggccgctggcggggccgtccgggtccggtgacgcggcggcacagtaccaggagaggagcgagccagagctgatgctgagcagcaacaaccacaccctcgtctacacctgcgacaacgtgcggtgcagtgcccgcacagcaactacgcgctcggcttcctcgaccgcttgctctgctgtttctttttgggggatttgggggaaaagatagagagggagaagatggctgacaagtgggccctacgctttttatattttctcctatcacttacatgtgggcctcatctgtattttggtgactgggctgacacatcagcacaatagaccaagtcagcatgccacgtcagcaaaaccaccctcaaaaaccacttagggagtcaatttgtaccggttttagtaattgggggagtcatcctaaccggttttctggttgaggggtacgaattagattcggtgtatatttaagggagttaaagtggactttttccttaaaggtgtagtagatatttccggcccattaggcccacgagctttcctcttcgtaggctcgcggcgtctactcctccactccaccagagcgaaactgcaaggcggcaatggaggccggagatggaagaggaggaggagcggaggaggaggaggaggagcaggtgatgagcgaggtgcacctgggatgcccgccccgcttctccgggctctacgtctcccgcttcagcttctcctcccgcccgctaggtaacagcccggtctcgcgcattccgtcgaacaccttgcctgcaccgccttcttgggcgcaacccgatgtggggggtggatggaagagccatggtttagttcgattcgatgtttgcagggccatctgcgggcagcgacggcggagaatgtagcggtgtgcgcgagcaggtcgcggcgtcgagcagttcttgtgagcgtgcgtggggctgtttcttgctatggtgtagaggactgaaaggtggtgcttgcttgaactgattcttggctttgttgggaaggtggttcgcctgacgctgttaccgtggatgaggacggggatctcgttcttgacaggagaagaaggaacagaggcagtgaggcatttgttatttttaactgcattctgtcttgccgaaattggtggtttgtgcagttaatctgaccattggcttgcagggagtgatcatgtgctcactgttcagcatggtatcacctcctctcttaggagcgttggtctccaggtctgagaaaatgctgcttttgtaattccttttcgtcttcctttttgtttacgatcacgtttgttgttggttcacaggtttggaaggcggcattgctattaactgattttgtattgcataagagctttacatcgtctgagtttaatggtgttactgccatagagatcggtgctgggacaggtgattagtcgatgtgaaattagtcaaaaagtgttcccagaatcatgatttatgtgtcatttgttactaatttagtgatcctctacaatcatgaatgtttgccaggtttggtagggttggcactagctcgagttgctaagaaaatcttcattacaggtaggtagttaggccttctcgagtccgattctgtagagttgttcgttttagagttttaccttttgtccagttgcatgttccacatcaatccagtaggtataatttgatccgtatatctgacaaacagggttaattgaaatggcaaaactatataacagaaattggttcaaatgagaattcagttccatgtgcgaccgcataaatcaaaatttcctctactatacatggatctaattagtctaagaatgcaattccaattctaatccttatactcagtttcaatctatgaagctcaaagtcttatttagtgttcattgtcttgcattatttgactcaattttgctactaagataaggtaaataacccagcaggagtattacttactgttttccttagtcttagtaacctttccttgatatataaaaggttagttttgcatgacacctgtaatttggtaatgttaaaatcttgataacatttcggcatattcatcattgcaaatgatcagataggggctctgatatcctcgataactgcttggctaatgtccaacttaactcaagcatgctaaagtttgatgaagctaaagcctgtgtgcgggaactggattggaaaatgtcatggcctccacctgtgtttaaatgtgattcatctgatccaaggttatttctgcttctacaccaactattcccacttatacaaattttcatacatcataatatgcgttatctaccacgaattcatgtaaaaatgtgaatgcgagtatctgatagtcatgtgcgtcttcacaacttttggttaattaaaaattcatgtaaaacttgcaggattagtacattgttgtgtacaaagacatgggagtttttctacacttctttgtgtaatacgcttttgcatgttttatgtttttggtgaacataccctcagcattggttaggaacatgttctccaatgctgtttgagatacaaatttttttttaatgattgatgcctaagtaaaacggtttttccaatgcagttcaaaatacttatggtatacaagtgaaatcgaggcggctgagaaagctacaacactatttgctgcggatgttatttacagtgacgatctgactgatctgtttttcagcatagcaaagaaactgatgtctcatggtgctgagaaggtatcggtttatccggttaccgtcattttttcttaaaatttgacaaataccctaagacaagatgtttctcctctccatgctgaagacttggtattctccttcgtatctggtaggtattgtacttgaccctggagaagagatataacttcagtatggacgaactagatgttgtagccaatggttacaagcacttccgaagtttcttcacggttcaggatggtaggttgtttgcaaagcattttgatcagctaagaatacgtagaattggtatcaggatctcaattgtctgtgttcattccacagtactcagtctttcatttttcacaatcttttgttcgcagaaagcggagctctggatgataattcatgtagaccagattttgttggagagcagatggaccttgcagaggttcctcagtacatcagagaatatgacaggggcaaagatttggagatgtggaagataatgtacaacccaaatccagaatagcaatgtcttttacagaaattacccgctttttaatgtaccactacaatgcatttttgcatgtttgtataactgtgggtgtgtttagttctttgggtgtaaagtttttgaagtatacggatatacatttgaagtattaaacgtagactaataacaaaacaaactatagattccgcatgtaaaccgcgagacgaatttattaagcctaattaatccatcattagcaaatgtttactttagcatcacattatcaaatcatggcaaatcatggcgtaatttggtttaaaagattcgtctcgcaatttatatgcaaactgtgcaattggttttttctcacatttaatgtcccatgtatgtgttcaaacatttgatgtgatgttttcggctaaaattttttggatctaaacaaggcctgtattgtatatggcatccgcatatcataaacaaaagaagagagtgatatgttatttctcccttttgtcatcaagcttgcagactgatcacacagacacagaaggcaggagaacaagaatccacagcatattttatttcgagttctcatgtaaaagaacaaatttatccagagatctcccattctcccctactttaataacgcgtaaaagaccagtaggatgatgatcaccatgacggcgaagcatgcgcaggttccaaccgcagaatcctacaaccacgagtagatcaacacaggtcgatcaattcatccatcgtttgatcaaccccccccccccctcatcgtttgatcaaaaaaataacctaactatagatacctacagatgcgtccctccgtcccaaaaatagacaaatcatgggtttctgtatccaatatttgaccgtccgtcttatttgaaaaaattatgaaaaaaattaaaaagataagtcgcgcataaagtattaataatgttttatcatctaacaacaataaaaatactaattataaaaaagtttcatataagacgaacggttaaacgttagatacggaaacccagagttggtctttttgcttttagacggagggagtacttaccagatcgctgaggttgccggtgtcaggcttgggctccaggagcggcgctgccgctgctgtgtccaccgtcaccgccaccgacgatgacggtgggttggtttctttgagaatcttggcgacaatccgctgctgctgctgctggtgatgatggtgatggtgaccgtggtggtggtggtgatggtgattatggtgatgatgcggcggctgggtgtggtggtggtgatggtggtggtggtggtgatgatgatgatgatggtgatgcatgtcgtccatggctggaatccggatgatgatttgttggtagatcgatgcaaagggttcgtgggttttttttccggtgttttcgtgttgggtttaagttaacctgttggcgagatatatcgatcgatcgatcgacttagagttggagacgatttacgtatggcgtcgatcgatggatgatggatttactgccgtgcttgcaagatgtattctatctgtatgcgactaggggcggcattacgaagaagttaagagaaatttgtaaaagaacactccataagtcgctcgaagtttgacatttcatcccataagttatttttgttgcaaaatcctaaccatttatttagttttgttgcacaacccggacgagagtctagttgactggtgggatcaagaacaaagcaacaaagcaaatgtcaaagtaaggggatgcactcactgcacatgctcttgagttgggaaatctggtgcgagagaaatagacgagttttcaaagataaataacttcaaatccctcaattaatggcaagaatagtggacgaaatannnnnnnnnnnnnnnnnnnnngcaaaaaatcttgcgagaatagcgccttaacatctcatcctctgttgtaattttcctttttttctgctcttctcccccctgtctttcccctcgtcacctttggtgacatttgtacagtgcttatcttctgaaatataaaaccagctaagctggctaaggtttcaaaaaaaaatatcagcctagtgtgcacgtgtttaaccaaatcgatctgttataactaatacagagctaccacaagctaagctacatgagtccatctttccaactgcttgcatttattcttcatgtttcattgaactttttttcgcatacaacaaaactcaacgcgacaacatttaagctctccaaaaaagtgtccaagactatactctagaagtatttaattttaataaagacaatattaacgactcataatttaatgttcatttggctaaaacacatgtacactagagtggtttttgcaacaaaactgagtaggtcaacaaacatttgtaagaaaatgaattatgtgatgaaatgtcaaacttcaagtgatttatggggtgctttttcttttgcaaattctccaaaaattaaagctgaaaatctattgaaactaataattctattttaaaatatattacgctattgacttctagacatgatttttatcgttcgttttattaaaaaaccaatagaagtattatttatttggggtgacagcttgagcttaagaaataaggaggtggctgctagcgcgtctccttcttgacctccggcacaaggaggttatagagctcgagctcgacaaggcagcccccggtgagcgtttcctccattgccttcgaagtgaggctgtagagagcgagctcgatgaggcagcgctgccgctgcttctccccctcctccccaacactcacttcggattgagctaggggccatgttagattaaactcactttggattgagttagggggttattcatctagattagaaagtcatgatgtccgattttataatttatgggataatttggtcttttgcaatagtttaggggttaattcgtttttttcccaaaacaatgtaacacctctcattacttctcatgtacaaagtaaaattactctagaacatgtatatgtactggttctcctagcccgttggcctccattgaataataaaatctattatgacgcgatatttcaaaagcaaaactacacgaaccatcttatataatgggaaattacatcgaaaccgttgaaatctctactatattgatcctagctagctactgatcataacttgacttccattattaactcgtagccatgcatgttggtccatttgacaaaaaaggctggatcgatcacaaaaagataatgaagatggcgacgacgcagacgatcccgacggttatcaacgcacactgcaccaaagatgggaaaacacacacacacacaataacgagatcgcattagctctcaaatcaaaaatcgatccatagcgcttaattagtgcaataatgtggttgacatcggatgcgttgcgtgctatacgtaccttgcaggcggcatcatcatcgccgttggcggcggcggcagcggtggcggcgggcttcggcttctgaactagcggccggcgtacggacgacgacgacgacgacgacgacgacgacgagctcgagattgttactgctgcttagtcgaagaggatcatcggcactgggcagtgatggcaatgcatggctggtcgccggtcgcggtcgtcgtcggtcggcgcctcggccggcgcgcggcggctagctgaattaatccggcgagacgaggttcgacgtcgaggctgggagagagctgatcgctgtggttgtgcggtttgtgccgccgccaccgacggcgcgtcgttggatttatgggcgcgcgctgtcgaccaaccgatcgtgagcatggctaacagatacccacaaatatctctaaaatttagtttttagatttctaattcgattttatggtgtaaccagatttttatctctaggaaatatgttaaatcaactcccaataataaaaggtggatccactcatcactaccaacgttatgtatatataaaaaatggggaaatctaaatcgagagcgctctcggttacattttatagcgtgacgtgttcgatagccgtccattcacgcgtcgttgtcccagttgttcccaccacgcgtcattgacatccccatctaagccgttcgttttcgtcctcattcattcgccactgttcaaattatgggaatcgagagagagagagagagagagagaggggtggaggctatgacggttttgtcccatcgtggcaagggaaggtggaggttgtggcagtttcatcccatcgcggcagaggaggtgaaggctgtggtaggtttcggctgtttcccctcattgtggcgaagaggtagatggatgtagcagttttactccacaaatcacgacgaagaaggggagggtagtgattgtttcctcctaaaattctgatgaagcagcgactgacgacttctactacaacggcgacgagcggtggccgcgatgggattccgcggttgcgggcttcagctgtagcagagacgacaacatgcttttgaactagtaagtaacttttatatgtttcctaaaagttactagtaagtaacttttatatgtctaaaaagtaactatttaaattaccaagctttttgtaatcgattgtgcataactttcgaattgaaagaacttgggtatggaaccttcaaaagtaaattacgtgttactagtaagtaactcctatatgtctaaaaaggaacttttgaattgaaaagaattggatatggaaccttaaatttctccatgtataatatgttattatacatgtttctgatatacgtgtgctagtacaaataagtaatcatgtaagagatgctaaatgagcataagtttaaacttacatgtttctagcaagtaacttttatatgcccgagaagtaactttatgtatagtcgtttcaagtatagacttatttttctttttcacatttttacatgcagcttgttgtagaaaaggatatgaaaattggaactagatttttagggggtcgatgcagcatgttgctttaagtatctgtggcactcgttggtgctttatttttctatgaactacttgtgtgtttaattcttgttttgtgtttcttcttttggcgaacctgatctagatctattaaatgtgggatgtaaattacatgaaaattttttgggatcacctttttatttgattttgggtattccatgccttcttcttccttacttcagttctgttttctgactataatggcaacactggtttttggagaggcgaaggtgccgtgggcttcgctatctttttttattgctggaaatggtggtgctagttcttaggggagccaaaggtgctagttgtggtgggctttgggttggcccatgtgaggaaatttcgggcgtgcggtgcgtttttttgcattcttagaaatgagcgtatgggatggtcgtgaggtttccttttgaagaaagatgcaagttctatttttggaaagcgcgtgggtcgctggttagcgtaatcgtgctaccatgcactaggtagtcatgtttatctctttacccattccctcgtcacgcgcgaactctctccacgtgtcgcctcctcctttcgtagagctgaaattaagagcgagagcttcttctgacttgtagagagtgagaaaggagaagaaaatgattctaatttttagatacatctttagaagaaccgtttaagcaagattttcacataagaaatctaatttttaaaattaggttttacttaaaagaaaactatggataggtcaatcgatgcaaccatctactaactatctactctattcatgcatgaatgtatatattaattttaaaaataatatttcttataaactactcgtcagatctaccatctaagcatattgttgtattcgttgtaattaaatatttacaacaagagatcaaataattatattctgatgaaaaaaatatatgttccacactgttcaaactaagtttcacacgggatagcaacatgtttcaacttgtttttccactatgtttccaaaaaaaaaatgtttcaatagttgattttttttacatcatggacaacataatgtttcaccggtggcggtggctaacaaagctacacaactacctacccttactctttctcgtgtcacgctacttagggtctgtttgacacagctccagcatcacctctcctggagctagagcccagccaaacagtttcagctccacataaaatgagagtggagctaggtagagctatctcacaaaatgaactagaaatgtggagctgagtttgggcagctctacaactccactccagacccaactcctgaagttaaattgagttggagctctaacaaacaggctcttactctctctctctctccactccatatatgcatgcatataacgatattcaaaatactttttctcctattctatttatccgatctacgatccgaacacaccattgcactagatgtaattaaatctttataacaagatatcacataattattttctgataaaagaaaacaagatatcatatatgttttaaaccgttaaaacttcttgttttatatgtgatagtgacatgcttcatcgggtgtttccactatgtttcaaaaaatattttaaatgtgtcaatgcctgttttttcatttcaccacatataaaacttaatgtttcaccggtaatcaaccgaagcatttaaccatctgattttttattttttattttggaatcgggtgttcgtatgtagtttcctccattttacttacgtaggtactctatctccgagccggagtggaacgtgctgcgatcgagatgtatgtgtcggggataataaaagatcgggatcgagtataatacggcgagtgattaatcttcaacttattcaaacaaacacaaaatttccacatctaaatccaagacggaattgctaaagaattgtcgtaagcccccccttttattttttacggttttgctgcctgtcatttgacaaattctaagtacctgtatctttccacgaaatcgtttctctcttttattttctcgaaattagccatatcctctcgtttgagagaagtttctgacgagcaaagtccatcgtccttgcaagcaaataaccaaggattcagagatcaagacgcaaccttgactgaactgaataacagaagattaagcaagtagcagtgactgtccgatccagtgattcgcagatccaagacacgatcgttctctatcactctatcatgtctagtcttttgcagggccagtgagagcgcccattgctgtttctttttgtcctccggaacggctgaacctcgaagcaaagtggatctggagttcttgtgctgcaattttatcgattcaagcatgtcaatcttgtgaagcaatgtctcttgtttctgtgagacttctgaactttgacaggaactgaactgtataaggacaaagcttcaccatcacaatgggtcgtcaatttggaagctgtaacctgaacagagactctgcaactgtttgcctatttggaaaactagatatttcatccttagcatagtcgatgactgtgacgagtgtcattatattgtcactgttatttgttcctctttatgtgaaggccccaataataccatcttagtaataaatattaacctatttctccaacaaagaacactgcacaagatggagataccttggctcttttatcttttgtcagtactatgtatgacaatgttgtctcaggccatccattgtactttgctcatagcctcgtattcattgggagttggaactaggtacaagctttactttgaggattcaggctttgtcagctgctcatgggaacacaatctttaatttgagctaattaattagtaatttaaacaggtgtttccatgctcatgtaatcgagtccaagtgcaaacctattatactctctttttttttctgctaaacgtacatttttagcattgaagagttctgtacataatcttgtctttgctaatgccttttgtttgttagtgctttagtttgtcattacagtaagaaatgaggcgtacaagcagagaactgatgcgaaagagtgtggcacccggagccattgctggccacagatgcagaaatcttgcagaaaatggagcagccaagttctttcaaattcttatcataacaagatagtagctcagtaatctagtcagattgttgtgtcttgttgcactgaagtaaaatagagagataatagtactaggattcctttgctgacagtcagacagaggctttagtccagagctctttagaaggcaatcaagtgtgcttagatatttttggaccataccaaatcttcagataaccaaatcctctttggtttggctttcagcttttcagggaggaaagggcacaaaatcagcaaaatgattaataattagtggtgtaggttcagctgttcagttggatgtcaaatcatctacttaagttagtaatagtgactatgtcaaatcaaatcatctgttattactgagttactattaactgaatgtaactctgctctgcttctgaatttccttgcttagtgccatcaaattttaccatcttttgctgtggaaacaaagggtcaattatatagacaaagtgaatcactgaatctttcatcaactagcaacctttttttaccacacaaatgatagcaccacagcatggtcgagaaggatggagaagtagggaataataatatgttgcgcctgagacagtatttcaacaatcttagtacttggtatagcaattaccaaccatttgcagtccaaaatgacggcactgaaataaagttttgtagcctcatcattcccttggaaaaccagtggttgcatcttgcatcaagtaaaactaaaagtgtttggttaaaagcaaaacaaaaatactcaaaagtggactaatgtgggatccctgactggattttttttgaacctttttaatttttaattttaaaagtaaaccttttcaaaactaatttccaaaatctaaaccttctgaccatgccagcccgtctggcgtggcaaaacaacactgacacgtcacctgaagtaggtgtaacagttttatcctgccacgccagcaaaagcggtgtaaccaaataacgctaccacaccagtgagaccggcgtagccaaatacctctatcacactagcgagaccggcgtgataatattgttttgtcatggtagtttggctagcatgattaaaacattcagattttaaaataagtatttaaaataaaaaaggttcaaaaaaataaaaaaatattcccccaatgttgcgtatctttgatatatcatctctacgttaagattttacacctgtttattaccctcgatattttaaacccgaaatattagggcccatttaagataactgaaattgattgattcatggataatctgatctttgtgatatcttaagagtataaatgaatgcattagcttgtaaaattttaaaaagttgttttacaaacgtatttcaagaaaaaatatataattttctttttgcacgaaaaggtgttgcttggaagcttgggaagcgtacaaacaaaaatcaagaatttttaaaaatatggcatactccctccgtcccataatataagggattttgagtttttgcttgctgtttgaccactcgtcttattcaattttttttttgcaaatataaaaaacgaaaagttgtgcttaaaatactttggataataaagtaagtcaaaaaaaataaataataattccaaatttttttgaataagacgaatggtcaaacagtgcaagtaaaaagtcaaaatcccttatatcatgggatggaggaaataacttttagtatgggtcagtttgcgttttaatgatgttgtaaattacttgtatatccttccttttttttttcttaaagagaaggaaaaattttatgcctcatgagtcttgaattacatgtttttcttaagatataagaatttagtccggataagttccggtttttatattttgagatcgaggaaataacaagctttatttccaagtaatattcaaataactgtttaaaaaaattaaataactcgaaaaaggaaatgaccaaaatgccctcgctcccccctccaccgcttcccctccttcccccggcccccgcttcttctacagttctactccacacctcctctctctctctctcgctcgctcgctctcctctcctccctcgcgcgcgcggccggcgagcggagcgggtcggcaggtgcgcggacggcgtcgtctcctcccccgactccgccgcagcctcccaccctccctgtgccgcctcctcgcgcgcgctgccgccgccggcgagcaggtttggagttggggggcgacgtggcaggcctgcttgctcctctaaccgaattgaaggtatccgtttctcctcccctttgctacttcatgagccgtcatagattggagatccatccgggcgaacaatggattttgtgcggtttcttccattccacacccaatttgttaacccgtacaggttactagatggcagtttgcttgaagagaggattggggaattaatcggctgaacaccgattccccggcgttatgtcctcctctgctctcgtgccccattgactttttgcgttattgtaatggccaaattggccgggttgagtgagccttactggttactgagctgttcttgcttgagcttggagtgaccacattccccggcaagcacggttaaatcctggtgcccgtgaatattacgcatatgcatgtggactttcaaaaggattttagtaagatcagggatgtgcggctggtgtccgtctcttagagcctatgttaagtggtgtatatgcgggggtgtgagtgtggtgtcacgtgagtagtggtgtgtgtgcgtgtgtctgccgtgtaattgcaaaaaagaaaagcttctagtactttaccccactaaaaaagttttggatttctgatgctactagtttcagccacagaaaattgggttgagtttcatttggtggagtgctgtgctccagaaacaagaaaatcttggtgagaacatagaaagttgaatgttgcctgagtgcttaatggcgaaattgtgttggcaggaaatggcagggcaaagatctgattcgcagtcagatgaatcgttcgaatacatgttgcttgagagggaccctgatctttaccgtacagtcttctcgggcccgagccagataagtccgtggattgacccgagcgtgctgactttgcagcaccggatagggagaggtccatttggggatgtttggattgcaacccaccatcagaggacagaggatcatgatcggtaccatgaggtcgctgtgaagatgttgcatccaattagagaggaccaactgcaagccttctcagtgaggtttgacgagatctttagcaaatgccaaggtctaagcaatgtgtgcttcctacatggcatctcaacacagaatggaagggtatgtatgctattagtggtgtgttgatctttcttgtcttgattatctttgcacatcaggccagcctaatagcttattttgtatcatggttttttagatttgtatagcaatgaagttttacgaaggatccattggagataagatggcccggcttaaaggtggaaggatccctttatcagatgttttaaggtacggtagaatttcccacagtttatcacatatactaatattgccatgatcaacgcattacaaattgaaccttaggatttcagcatgtagtttgcaacttcctattgatgttctgactgctgacttggttggttggattatttgtctgatttcctttctcattttagcattggcacaagttcttattgatttctgagagtgattatggtctatttagaggaatttcgtgcttattttcttcagaatgtttcttatatatctttttaattcacagatatggtgctgatttggcccgtggcattatagacctgcactcaagaggaatattgattctaaatcttaagccctgtaattttctccttgatgaacatgaccatgctgtgctgggtgattttggaattccgtccttgctgtttgggctctcactgcctaatccagatcttatccaacgacttggaactccaaattacatggccccagaacaatggcaaccaagcattagagggccaattagctatgagacagactcatggggttttgcctggagcatccttgagatgttgagtggcattcaaccatggcgtggcaaatcaccagatgaggtttatcagttggttgtcctgaagaaagaaaaaccaatttttccatacaatttgcctccagcaatagagaatgtcctttctggatgctttgaatatgactttagagaccgcccccagatgactgatattttagatgcatttgagaggtaacatgcttattatcctgcttttcatgttcaacaatttacattttgattgaattgccattgagttattttttttgcttatatactataatttacaaaagctaatcggtgctaaatatgtgaatccatggaattgtgtgttttaatacttgtattctgttagcttgttgtaatttgaagtatcttatatatttatatgcatttttttcctttgcataattctttactgtcccatagcagtaacttggattacatgttgtcctaattatttctttttaattttgattagtgcaaaagatgtagattacgaaaatactgaccagggaaattctgaaaatctaaggatggtcagtccagccctgccaagccgcactaactggtcattcttcaaggacaagttgcaagtgggagacaaggttcgctcgagaaagcttaaaaacacttgtagtccaacaaccatggaagtccctgatggaaccatagttggaatggaggataatggagagcgtgatggctacattcttgtaaggatccatggtttacatgatcctttgaaggttcgctcttcaacagtggaaagggtaacctatggtttcgctgctggagactgggtacggcttagggaggatgagaagaagcgatctcaggttggaattcttcatagcattgaccgtagtggtactgtttatgtaggtctgattggagtggacaccctctggaagggtgaatactctgaccttcaaatggctgaagcctactgtgttgggcagtttgtgcggctgaaagccaatatttcaagcccacagtttgaatggcagcgaaagagaggtggaggactggctacaggccgtatttcgcagatactaccaaatggatgccttttcataaaatttccaggcaaatttaaccttggtgaagtatgcagttgcttggcagatccctctgaggttgaggtggtgagctttgacaagtgtgaggggatcgtgaagaagtacgagcacctcgaggatttccattgggcggtcaggccgctgttcattgctgtaggtttcttcaccgctctgaagctaggcatctttgttgggaagggcattgctcggccaagaagtcgaaaggttgccagcgtctctgatcagagtgatcatcagcaactacagcagcaagaagtgcaaaacaatgccaatgcagcatggctccctccaactgtggcaaacatgctgtttagagacggtcctacgctttctggataaaatgaaaatcaaaaccagtgcaagatggagagtttcagaactactggataatgcaacgcccaagcaaatcgtagttcatacttagacctgaaacttgtcttgccacaagacctgtaaatatttccaccttcactctactatcatctccatgttcacaaaaacatgttctgtgcttatgtctgtaaattgtaggcttgcagtccaaatcctgatactgtcttttgcttttgtcattacactgcaatctctcagtatccctggattttctgttcccgatccatcaatttgcagttgcatctgcaacgtgatgaacggcatgcgaatatggatgaaaattgccataaacgctggcaacacaatcaacataggaaattatatggcatcatctgcaattctgcatataatataccttctttccgaaaggacttcattcctagtacttgtccagattcgttgctagaaatgaagtctttttggacagaggtagtacaatttcaacctgattaacaaaagagtttgtatagcagaagtccacaactgaaccatacatgggattggactggctgatactatccaccaaattgcctaatttgtaaagaactaaacctctacaaactacatttttccagagagcaacaattacacaacaccagaaccttctgtgtcaatactttttctgagcatcctctcagctgaaacatgaaagctactagtcatcaagtgatactgtgaagctcgtgtgaaggccttcccatcttctcggagaccaggttcagcatctgaactagaaatcaagctgtgaaccttgtgaggatgaggagcaactgccagatgcatcaagtgaaggaccacctgatccatccactggagcttgattcaaccgttctaacaccagcgacctcctcttgcgcaacttcagagaaaacgtggacgcctccaatatgacggggacctgcttgttgataagaaaggcatcgaaacgagagagtgcaaagttttgtttatacaactattatgaaagcttaattcgtggaaaaaaaaaacaatcatgaaagctttgatacctggctattagtctgtgccaccttatgcacatgtaaaaaaccaaccatatcctgatatccagtgaggagttttgctaactctttgtcctcatctggtgacaaataaaatggaaacttaataaaggatatagttgatcaaaatagcaatcacatgacatactttaaagggccatgcttgcttacctggaattgctttgattgacagaagtgtgtccgccaggtgctgccatctcttacaaaaggagcttgataaaactgtatttggaaatgttataacagcaactgcattagatgcacgaaccatggccttcagcgatctgataaatgagaccatgtcccagtcctgcaatacacaaatataattagttgcaagtacataacgatgatattagaaaggtgaaaatatataaattggtctgaaaaaagattcaatgcatcgcagcaaccaatcaagactaatagacatcagtcgcattaaatactttccttctcaaagtatccgcattgtggtgcacatagtgattgtatagcaatccgtccagcatgcgcatttccaccatcttttctgaacaccaataacaaaataaattcacgagtaataacgaatatggtacatgccatcaaattttatgttaataaaaaaaatattatggtagacgaatttatggtaacatggcattgcaatgttagaatgattttccttcagaaaaaccgtctgagcatagagacaagaacccttacctcggaagtttggacaagaatgtggaacaacggtcctggaggacaccaagagtgtctccttcttgagtgctagcacattcaatattctgagcattaagtaaatgcctttccaagggcttccgtaaatcaaaatcattgctaaattcttgcttgttgtctgcaattatactaaactgagtcagaactttgacaaacatcttgatagacagtgatgatagctaataaaaaacacttttaaagcaaactgataggtattatgaacattgctattatcctgaagtatgctaatattatgcatttaggtctttgcccaaaaggataatcctagaatcccatctttcttctggatttggagaaatgtcgattttcaagaaagaacgcgaatcttatgatatggtgggaatctcttatcatcatcatccacgccttaaatgtatcctaatgcccagctcaggtgtcagtgacaacaatggtgcttaggaataagtagattatagaagctaagggctcagacaaaatccattcacgaacaatattatttattttgttttcttgcgtatcctcaaaaatgtttacaagcatgcttttttgcgtattcatggccaacaagaatacaaaggaaataatagtatcacctctgtgttcagcatgagaagtcttctcttctccaaagtatttcttgtactgccaagctatcctcaaagcctcgtcctacacaattacatgtcgagatcaacattaaaataataacacttttcagggctcaagttgactgccaaatattcttcctcgagacatacacttgttcggccatcgctacttgttccagcccccatccctctttgtcgtccatcctcctttgaagatgcaacagcaggtaatgtaccaaggaacaagcggggttccttcataggtcctgcgaagagcagcggttgtttgtgcacaacaccctgcgccatgaagctccgaagcagtaggaggtggtgaggcgcatcagagtcctccatgatcattacaactgatccaataagaaaacccccacctagaatccctgcatccgttaaactagtaaattatggtgaactgaattgcacatcaccataactcataagagcatcagcttttttttttccagtttaaaggttttaccccattaaactcaccgcaagaaccaaactttcctcacggcatctatacatggctaaacacaaaatattgaaaggaatttgtactcctaaaataacaagtaatgcaggtgatcaagatatatcatcgaagcaattttatttgattcctaacaaaactacgcacattgcatttgcaaacatagttagtagtagcatatattgtactatgaaataatactccaattagcaccctttccctaatctcctaggtaacaaccaagcatgtgaagtgacctaaagataaaaggaatttcttacataaataggaataatcgcgttagtagaacagaaaaaaaacgctagatttttattcagcaaaacaataaaaagggtctgcaagcaagaatctgcttactgtcgaggtcggggatgcccgaggagacgaaggcggcgccattaggaccaagcttgactcctgcggcggtggatgaggacgccacatgaggtgccgctgctcgagagaagctgctccggccgacggtctggcctccggcggcggcggccatggagttggcggcgaagtttcacggggcacagatcgagctccacttcacagcggcggcttagactaggagaaggaagggagaagaccgcagcgaggacgccgcggcggcggcgagagcgctcgagaacgaggcggaaacccacggcggcgggaggggtcgagggcgaggcgacggcggtgcctcactacgaagaccacatgggctatttgcttgggctatttcttgtttgggccaagcccactaattaatttcacaatatattagttcaccgatcactcctcccgtcccataaaaaaccaacataaaatgagatgtgatatttcctactgtacaaattatttgtatcagaaaatattacatcttatcctaggttacttttttatgagacggagggagtatgtttgtcgacatcatcatgatgttagtatggtatctaggtactagatgtgttacgtataggtatcgtatctggtatcatcggcactaagtgtgttacctatggtatcatcagcatcaacatggtaggtactagagtttaaggcatcatacttatgtctgtgtgatatcatcacttaaaatgttccttgggaccaacggtataccgatctagtatttattatccgtttgttaatccttagtcatttttttagagggcgactagacgataggatccagttaggacgggatacttaagtgactcctccctcttcctttcctatgtctagctgagctttaacgtgcaagcggatagcaaatgcacttattttttcccttgtctcgtcagctacatcaacagaagggaagggaaggggcatgttaaggagaggaagggagaagaggataggagatgacagcaaggggctcactggtcggtctagcggcgatgacgtgtgctccctctcacactcggttcgtacctggtacctatgggtaccggctagtacctaggtatcaaatcttggtacctaggtactagggctgatatttgtgggcatcattcatgattctccgtggtaccaggcctgatacttggtatcagccatgataccctagacatatcatgactgatacttgataccagtcaaggatgacttacctacccacaataaaggaagcagcacaaggagctagcgaggagtacgatgcaacaacctcagagacccgcataaactctgagattaccctcacgctgagaactactgaccctgcattaccgctggctgttgagaacgcgaagggatgccatattgat

SEQ ID NO: 6106 - DNA, 53700 bp, Oryza sativa
  unsure (1)..(53700): unsure at all n locations
gggttcccacccgcgagtaaagcccctttctccaccagtgtattatgcaacccctgtgctacatgtatagtacagaggggatgcataatgtataaaaaagtggagacataaaatataggggtaggacatactcttattcattcatccattgctcaagtgtacaatagtgagtttccaaccctctatttataagcataatgcatatataaaaagtaaggtgaagggtcttataagtatgttgggctgggtcttcatggtccaagcccaaatgtttcctaataagtgagacttattgcttggatgagcatatataatggtggttgcgttggataagcttatgtactgcgcgacatatggctgaggagttgtgacacctgtagtgcgcaacgagataatatttaaatgttcgacgaaacgtcggcgacctcggctagacgccgggcacgggcacgcggagtatggggcgaatgatgaggtcagccttccggcgaacaccgatgccgaacgcctcagtcatgtcgagcttggtcgggtcggccattccgggcacctcccagtcaaagtggaagagcaagctggcgagagggagctccacgttggcgagcccgaacgccaacccggggcacatccgccggccggcgccgaacggcagaagctcgtagtcggtgcccttgaaatccaacgcggcggctggctcgccgtcgccgaaccgctccggccggaactcctcgggcgagccgccaggccagtaccgcgggtcgcggccgatcgcccagacgttgaccagcacctgtgtgccgcgcggcacgtcgtagccgagcaccttgcactgctcccggcactcgcgcggcagcagcagtggccccggtgggtggagacggagcgtctccttgatgacgaggtgcaggtatcggagctcactgagcgcggcctctgacacaacgccggccgctgcgaaggcttgcctcacctcggccgtcgccttcttcatcgccatcgggttccggattagctcagcgatcgcccaccccagcgtcgtcgccgacgtctcgctgccggcgccaaagacattctgcatgcatgtgatccatatttttagcacgtggattttcatccctcgaggaacatcccctctttttttttttgcatgttatattaaaaattttttaaaaaaattgacaatatagattaatacgaaatatatgactccacaaacatgcaagaccaaattcaactactataagttgcaacaaaaataacaaattaaactgaaaatagttatcgtacattcgtagctatatttgttatttttgttacaacttgtagaagttgaatttaaacttgcatgtttgtggagtgatatatttcataataatctatgttgtcaatttttttcatattttttatgactatttaggtgatatgcacgaaacgaggggatatctcctcgatggatgattttactttcccatatttttattgaagctgcgtagctgaccatcacgaaagaacgaacagattggacttcatggctttcaatggcgatcaaattcgtaccgtaggctcactctaataaacccgagatacaagatacaaaaaaatcagacaattagaggcatagatgagggagaagcgctgaaaagaagcagaggaatgagatcagatagtaggaatttccggaagagggggactgggggaggtctctattagtttctacaggtgatgtttttatatatatactaccttcgttcttcgttttcttcaaatagatgatgtgattaaattttaaaataacatttagaataacagttagatacaagccctacttaaatttatataataataaaataagttagaacaaaataaataatattaatatttttcttttgaaaataagacaaatggacatatgtcatatcaaaagttaacatcatctattaaaaaacggtgcagtgttatctaaaaagttaattacaaatttgataagatagaacaatatattgtatatcagcccacaaatatgtaagttcaaatttaacgtatgtggtatatcacttaataaacatgtaagtttaaatttgacacctatataaatatatttttttagcatgtttgtggggtgatgtaccatagatctatcttttattttttttaagaaaaaagtttgtgactttatatacgatatgcacaaaccgagaggatgtccactccattctaccttgaagacgcagcaatgaacacgaagagagccaactggcccaactctaaggttttgtagtgttcttatgatgttcatcatgtcttcactctgtacactcccatcgtttaaccttcagcttataagctatagccgaaatttgatatgagttacatttcactctttgtggtttttttaattaaagtttaactttcaatatttgattttaatttactaacaaactcatgtataaaagttttatcataattatcttttgttgttctaagcagtaacagcttatacacactactatagaacttcttctaatagggctcggctcatagtagccgattcaattggaaccggtacttattaccatttcccacctccatgggccaaaaaagtatacaaccgatacctttgaacaactataagtactggttttagagaaaaactagcagcaatactattgatattgattttttaaaagaaccagcacctataatgtattatagttgctggctaattaaaacacaggtatccgtaaaaaccaagctaagttgagcctctcattcttatccattcacgctgagtcctctaacccactgttctctcattttcccctcgccaccagcgagcactggtggcaccctctccctcgcgagtagtggcaacatcctctcctttgcgagcggcagcaacaccctctccctcgagagaaacgacgacatcctctccctcgcgagtggcaacggtgacggcggtggaaccgatgccaagtccagcaggcctgagttcggggtccatcggatttggcccccgcgctggtccccgagcagcatctgtcttctccttccttcgacgtcaacaagggtgagcggcggcgcccgttctagtgctctagtgcttgttctgggatgttggatgatgaatgcttgtttgattctattatgagcattcttgtgttattgtgcctttcaattcattttttttgttggatttggagcatcggttcaactcacttgagctgagtcttttcttttcgcaaatcgtacaatttataggtgccggtctatcgatagcgctcctcattagtgcgtctgttagatgccgagtgaaaaatccggcagctatatggctttcccatccgacacaatttacttttgtgaagtagtgacgtaagcaaagcgatgaccgtgcttaccagctaaaaagctatgtactgctttctggttaaaaaccatatgtgaccagatgccatagtgtcaagctggaggacaagttgacagttggaacatgacacggaaaatgatctaagggtctgtttaagagcaggtactgcaaacatattttatgaagataaataagaagagagaaaggcagtgagctacagatttatagccagctgtagcacggatcccaagatacagtgtgcgtatgacatgtgggaccaggtattaatagtgtagtatgtaactattgtatgaattagctattagattggctatagatgaattggagttagtagttagttatactattgaacttgctctgatagagcttcaatttttccatttaatgtaggagttaggtataaagtggagttgtggaacagtttaaatccagctccacctatcgagttaagaacactctacctagctgtgctcctattttaagatggagctgaaactatttggctgcgctccaacttcaggagagatgaagctggagctatgctaaacagtgccctaagataactcgtggggggcgtagtcacttacatggatgacagacttgatgacgtccatgtcaaacgggaactggagcccaccctccttctgtatccttagcaaaacatcgatgaggtcctcgtcggtggctccagcgccgccgccgctgctgccattcttctggaggtgctcctggatggtgctttcgaggacgctggacatcgtgtcccagcatttcttggcctggcgtatggtgccggtgagacagccggcgaggcgcgacgatggccacaagtccgccgggttgaacccggccgtgagctcgatggagcggtcgagctcgcggaggaacacgtcgcggtgggggaaccggtcgcccatcacggcgcgcacggtggagtcggacacgagcgccgccaacagcggccgtatctcgacggcgcacccggccgccgcgtagccgcccacggcgcgcagcatggcggcgacctcctcctcgcggatggcgcggaaggaggcgacgcggcgcgcgctgaggagctccgtcacggtgatcttccggagctggcgccagtagtccccgtacggggcgaacacgatgtccctgccgccgttgctgaacacgcgcgtggtggagctcagcggccgcgtcgcgaacgacacgtcgtgggtcttggtcacctcgcgcgccgcctccggcgacgacaccaccagcgtgggcacctcgcccaggcggagcatcatgaccggcccgtggcgacgcgccaggtcgcgcatcgcttggtgcgggagcttgccgacgaggtggtgcaggctgcctatgaccggtagctgccatggccccggcggcagccgcagcgcgccagagccatgcgccgccgacgagcgcctacgcctggcgagttgcacggcgagcagggaaacgagcgccaggccaaggtacagataggtgtgaagatctgccattttttgtgtgtggtgtacgacgatgcttctgcagctgtgttgggaagtgagaggctctatgtactcgtatatatacgcaattcttgggtgttggttttaatggcgtctatatggagcaccaagacacaagagtctttcataatcagatgtgttctgtttttcacaaagaattaaatgtacattggtacaactaaaattaatgagtacaaaacaggaggtttgattatggtaacaaaaatgaaagtacaagtacgtattacgaagtaccgctaaaggacgagttacactacttacatgcttttataatatatcaccctagctccttcctccctctcgagacgtttgtaaaaaaaaaactactcccccccgggacccaattaaatatttaagggaggaaatttttttaaaagggtttttttttttgggcccttttttgggggccccaaacccccaaaaagggcttaccactcgtcttattcaaaaaaatttgaaattattatttatttttttacttactttattatttaaagtaatttaagcacaacttttcgttttttatatttgcacaaattttttgaataagacaagtgatcaaacagtacaagcaaaaacttaaaattcattatatcgtgagacggagggagtaattgttcatgctaagccatcggtgactctcttgccttggtaaataaaatttaccacagtacacgttctaactaagacctccagaaaaatttaaatagattccatgtagtcatttttaattttttttccatcatgatagtatgacgataaattatctctttatcacaagtattactacagtgaatcaccattttgtttttcaaaaaaaaactacttactgaaattctagaaataaattaaaaaaattctacattgtcaattttcccactttattttacacaaaaaatcaacatataggttgggcaaaggagaaaggaactctcatcttagattaagtttcctataaataacaaattatggaaaatgaatcttgatattttaatttgtcaaaatttccttggaaaaccaataggatttagaggttggtggacgggagcgtccataccctcatttcaaattaggtttcttataaattgaaataaattagcggaaatgaatcatgatatttctaaaatttagcagaaaatcaaaaaattttgaagagggatgggaggagagaagaaaaatactatgagatatggatgctcagtgccaaaccaactggcataagggttgggtattggtattgagacatttaacttcagtgccaatagccttaggcgcgagctatgggtccactttcatagtaaagtttagaaaggggccattgtaaaataagtttttagaaataaccaaattgtaaaaaaaaatctggttatttgacactttttgatatggtgtgtaggctcgtatttaccacgaacaaaatagtgttggaattaatagatgggctaaggctcatccgaaaattaattctttagaaaatcacaaaggcccacctcatgggatggcatgcatgtggagtttagtaccaccttgcttattctaggagagggggaccttcttaaaagggaggatgccctcctagccacttgaagcatgtgtggtggagagaagaggggaaaaacgcgcgcacgctcgctcgcctagcctgggcaggtggcccgcgtgcacgacgtacacgtcgaatggtctgcgggaaatttggatttgttttgtttctgtttcaaaaaaatccggtgcgtggagtccggataggtttacgcgctttgtttctttttccaaaaaatgcccgcctaattcgaaatttggatttgttttgtttctgtttcaaaaaaatccggtgcgtggagtccggataggtttacgcgctttgtttctttttccaaaaaatgcccgcctaattcgaatggatttgttttgtttctgtttcaaaaaaatccggtgcgtggagtccggataggtttacgcgctttgtttctttttccaaaaaatgcccgcctaattcgaatttgttttgtttctatttccaaaaaatccggtgcgtgaaaacggcgtggagtccggataggttacgcgcgacttatccggttcggtttacacgagtgcaaaaatccggtgcgtgaaaacggtgtggagtccggataggttaggcgcgacttatccggttcggtttacgcgagtgccctgatcaggcgacctatctctatataaactgagccgccggtttacacgagtgcaaaaatccggtgtgtgaaaatggcgtggagtccggataggttatgcgcgacttatccggttcggtttacgcgagtgccctgatcaggcgacctatctctatataaaccaagccgccgccttcacgcaacacacgcgaaatctgtcagggttacgggttaggcataccctttacccttcgatatacgttacatatcggtatggtatacccgcgcgcatacagatactttctgtatattctatggaaatccttcacggaatctacggatgggaagaatcctactcggacaagactgggtcattgacgtatcgaatagggtctgatatctccgagttctacttggagacctccagatctgtgatataaaaaggaacccccggtgagggcttaaggcatcgaatctcagagccaacacaacccacatagcctatgaagccggagcctgcaaggagccaagccatcgagatctagtcgaaccaactcgactacgatctcgccggatccgacaagttccattgttccctttgtaacctgtgttttccaccatataatcccatatcaactggattagggctattacctaccaaggggcctgaaccagtataatcctcgtcttttgttgcttgatgtcgtattacgtagatccttgtaccaacgtaccccaataccctctatatccggtctatgggtaccacccgtcgacagtggcgcgccaggtagggggacttggtactcaaggttctactactatgtcatccagcttcgtcgacaacggcgtcaacaccaacctctgccaagtacaccctgcttcaacgatgctggtgtggactcaagtcggcgaaatcgtcttcccggtttacaccacaatgctgatctcaaccggtcccccaatgaccggaaacgagaacgtagtggctacaaaccaagacgacttcatgtcgaaaaatcctcccgctgagacggagaacagagcatcgacgacatccgagctcgagaaggattctgatgcggccaaaccttgttcttccgacatgaaccgcgagccgacaaagatgacttccgaagccacaaggtcctggtgttctatccacaaaaccagaaaacacactttgcaagcctgctgggttttcctcaacgtccgcgctgaaattcacgcctgcaaagagcgtggaattcagcgtgtttctccaactcgtgatgtctattgtcctattcacaagacaaagaatcacggcctctcaagctgcaaggtctttcttggcgccatgaaagatccgtctcctaagtcatacgtccccatcagggataacgacaaggaacaaggagcgacttcaatttcagatcgatttgttggggtaatcgatatcgatcctcacgaaccatcagtcttacaccttctcgaagactatgggtcatcgaaaacgagtgtgtcgtgggaggtattggctatcgatgacgttggcacgtcagcgcacgccaacgcagaagcaggaggacaattgactactccagcccagcaccataagggccattcaagctatactgagggaaactccatacgatcccattctgaacgatgacctcgagcgtttgatagaacgactacgggaatcagtgaccaacctcagcaacacgttcgaagaagccgctatcgcagcacacccggagcagccaccaactgacgatgtcaatggtgaagacctggaacggagggaatcaccccaacgagctacccctccacctcgcggcaccggcgatctccgagatcacatcaacggccgccgagaggcacgacgcacacgagacaatgtgaatcgttctcggcgtcatgtctcttcacggcgccatgataacggaaatcaaagagaccgctcaaacgaggaccgagaccaggacaaccaccacgatcacaacgatcgcgaacgacgggtgcgagacaatacaggtcgaggccgtcgccataacgacgatgatgacggagatcggcgccgagacaatagtgggagacgacgacaggattcccgagatccaggccgacatcctcgtaatcgtacgctggaagcaagcgacctgtcgtcatcgtcatcatcctcgtcctcctcatcgtcagacagacatccacgaaggacacacaaccgccgacaacccaccgcccccaacgctgggtgtagggctttcggtcgttccctacgtgatgtccgatggcctgagagattccgacctagagtaatagaaaagtatgatgggagcaccgacccagaggagttccttcaagtctactccacagtactctacgctgccggagcagacgacaacgcgttggcgaattatttaccaactgcgttgaaaggttctgcacgttcatggctgatgcatcttcctccctactcaatctcttcgtgggcagacctgtggcaacagttcgtcgccaatttccaaggaacatacaagcgccacgcgatagaagacgacctacacgcgttgactcagaactcgggtgaatcattgagggaatatcttcggcgcttcaatgagtgcagaaatacaatccccgaaatcaccgatgcttctgtaattcgcgccttcaaatccggtgtcagagatcgctacactacacaggagttggcgacaagacgcatcacaaccactcggagattgttcgagattgttgagcgatgcgcccacgcagatgatgcgctaagacgcaagaacgataagccgaagaccgggggagagaagaaaccagccacggacggatttgagtcaagcaaaaagaaaaatcgcaaaaatgggaaaaggaaagctcaagtggaagttctcgcagcagaatatgtgaaccctcccaagcgcccagacccacaaagtagcgacacaaagaaagcatggtgccccatacacaagacggacagacattccctggaagattgccttgttttcaaaaattcgctcgagaagcacatcgcatttgaaaaagcaagcgagtacgcgtggtcgagaagaacgaggaggaggttcctcacgaatcggatccagcgtatccagactccgacctccacgtttcacacatctttggcgcttccacaacgtactcctcaaagcgagaatacaagaaagtggaacgtgacgtttgttcgacatggcagggggctgcacccaagatgaagtggtctgagcagaagatagagttctcggaagaagaccaccccaagaccgccatcatcccaggacgatatccgatcgtggtcgaacccactattcggaacatcaaggtagcgcgagtcctcatcgacggtggcagctcaatcaatcttcttttcgccagcactttggaagcgataggaattccgcaaagcgaattgacaccaaccgatcaacccttccacggaattactccccaatcatcgtccaaaccattgggcaagattacgttacccgtgattttcggccaagccaacaacttctgaacagagcagatcacctttgatgtcgctgaattcgacacagcttacaatgccatcatcgggagaactgcacttgcgaagttcatggccgcatctcactacgcgtatcaagtgctcaagatgccgggactgaatggaacaatcactattcaagggaacgcaaagctagcggtgcagtgcgacaagcggagcctcaacatggtcgagcaaacgcccagcccactcgccacgactacgccacccaagaaagtgagtaagacaaacaagacgccgaaaccagacggcaccatcaagatcgttccactctccagtgccaaccccgacaagaccgtcaagatcggggcgacactaaacgagaaataggaactcacgctcatcaccttcctccgcgataatgctgacgtgttcgcttggcagccgtccgacatgccgggggtccccagggaggtgattgagcacaaactcatggtgcaacccgatgccaagccagtaaagcaaagactgcggagatttgcaccagaccgaaaacaagccatacgagaagagctcgacaaacttctcaaagttggctttatcagagaagtacttcatccagagtggctagccaatccagtcatggtgcggaaggccaatggaaaatggagaatgtgtgttgacttcaccgacctcaataaggcatgccccaaggatcacttccctctccctcgaatagatcaactggtggattcaacaaccggttgcgagttgttgagcttcctcgacgcttactctagctaccaccaaatcaacatggcaaaagaggacgaagagaagacagcattcatcatgccgtttggggtattttgctacgttaagatgccgttcggactgataaccgtagggaataccttccagcgtacggtccagggcgcacttagcgaccagcttggcaacaatgtcgaggcatacgtcgacgacatcgttgtcaaaaccaagacatgcgactcattgattgccaatctgcggcaaacgttcgacaacctccgacgatatcgcctcatgctcaatccagagaagtgcacgttcggagtaccgtcgggcaagctactcggattcctcgtttctggcagaggaatagaagcaaaccccaagaagatcaaggcaatcgagaacatgaagtcgcccacaagactcaagtaggtacaaaagctaaccggatgcatggcggcactgagcaggttcgttgctaggatgggagaacgaggacaacctttcttcgctctgctgaagaaacaagacaaatttgtatggacacaggaagccgacgaggcatttgttgcactcaagcgctacctatcaaaccccctgtacttgttgctccccaacctaatgaagaattattcctctatattgccgccacaccgtattccgttagcaccgtcattgttgtcgagagagagaaagtacaacgaccagtctattacgttagcgaagctctccacgacgcaaagacaagatacccacagatccaaaagctgctttacacggtcatcatgacatcaaggaagctacgccactactttcaagcccacagagtcacagttgtctcctttttccctcttggcaaagttgtgagaaacaaagatgttgtcggccgcattgcgaaatgggtagtcgagctgagccagtttgatgtccactttgtgccacgaacagccatcaagtcccagatactcgccgatttcgttgccaattggactatgccggataacaagttagacaaccaagtcgataacgaaacatggacaatggcgttcgatggcgcactcaacagccaaggagcaggggcaggatttatcttgacgtctccttctgaagatcaattcaagcatgcaatccacctcaacttcagggcgaccaataacacagcagaatacgaaggactactcgctgggataagagctgcagctgcacttggagtcaagcgactaatcgtcaaaggggactccgagctagtcgcgaaccaggtgcacaaagattataaatgctctaaccccgagttatccaagtatcttgcagaagtcaggaagctagagaaaaggttcgatgcgatcgaggtccgacacgtctaccgcaaggacaacattgagccagacgacctagcacaacgtgcgttcagacgagaatcgctcgagcctggcacttttctcgacatcctgacgaagccatcagtgaaagaggttagcggcgaagttagcccggacacccccgacatcgagaccacagacgactggcgcatcccactaatcaaattcatcaacatcgaggagttgcccgaggacgatacagaggccgagaaaataacccgtaaagcaaagatctactgtatggtcggcaacgatctatacaagaaagcgccaaacggggtacttctcaaatgcgtctcgtccgacgacggcagacacctcctcctcggtatacatgaaggcatatgtgggtcacacgccgccggtcggacattggttgggaaagcttttcgacaaggctttttctggccaaccgctcttaaagatgcatgcgacatggtccagcgatgcgaagcctgtcaattccacagtaaacacacaaagctacccgcgcaagcgctccagactatccctctaacttggtcgttctcgtgctgggggctagatatacttgggccattcccacgagggcagggcggctacagattcctattcgtggcgatcgacaagttcaccaaatggatcgaagcagtacccacgggggaaatcaaggccgacaacgccatcaaattcatcaaagggatattttgcagatacggactaccgcaccgcatcataactgacaacggctcccagttcatcagcgccgatttccaggattactgcatcgggctgggggtcaaaatatgcttcgcctcggtctctcaccctcaaagcaacagacaagtcgagagggcaaacggcatagtactacaagggataaaaacccacgtctacgacagactcatgtcacacgacaaaaaatgggttgaagaaatcccatcagtactatgggccatacgcaccacaccgacaacgtctaacaaggaaacacccttcttcctcgtgtacggctctgaggctatgctccccggcgagctacgacatcagagtacatgagtacagaagcactccgacgaggaccagggggaacagcgggacatcgatgtaaatcttctcgaggagcatcgtgaacgggttgccgtccgagcagccagctatcaacaggccctccgccgttaccacgagaagcacatccgagcacgcatactttcgatcggcgactacgtcctccgacgagttcaaagccaagcagggcgaaacaaaccctcaccaaaatgggaaggaccttacacgatcacacaagtcttgcggctaggcgcattcaaaatcgcagacggcgacggtcgcgagttagcaaattcttggaacattgaccaactacgtaaattctacgtatgagtcaataccatccatacctgtaagacatcttacagtatcaatgaagcctatttttaggcccatattacaaccaaagtgttttcgcccgatgatcccttaccctgatgacacctagcgttgaaacctgtccttatgtccctttacgccgtcttggcaaggcctccgaggaacctaagggatcttcggctggggacgcccagagccgataaggtcttgtcagatcctgtagagacgaaagaccatgtaagatctggtcgtgtaagagttctcgccgtgcgtattaaccaagccgtgaaatcggaaatcaactttccaacttcacggctgggggctaggatcagagcttatttaaccaaggcgggtcaaaggtccaagagccttatcctccgagaaaattccttcgacgacaaggctgggggctagggagagtgtgcgactcaaacggctgactaaagtcgttaactgagaacgcactcttacacacgacatccagagtaagagacatttgttaaagatagatttctttactatttcacacaatacttcttacagtttttacacaaatcttttctacattacatctttttcctaagatatttgtcacagggtacgaaaactaccaagaaggccaacgccagtccatagactggaagatcttctcggccaacggcgacatcgacctcgccagatggtctatctccgtcggagtcctccgagaacgagcaaaaccctcatggagaaattcgaggtccaagcgcgggcgatgatctcgtaggcaagccaacacgtgccctccggcgtatcggcttgatcgacgacactcctgcttcaaggcctcgtcgatacgcttgccgatgccatcgagttgggcacaggccccgttctgccacgagatgtacccggccgccgactcctcaggatctccgcggaccactcgaagttctgtacagactctggccatggatgtgcagcaactcttcaagtacgagttaaaccacacctcatgacctcggagcgtttccacagcctgctctttcttcatggccagcatggttctctcgagttccgccacttcaaacttcatcttccagtattggatacgacgatcttggctagcaagggcaccctctaggtcggcataatttgataaccactaagtcaagctgtacgcctctttcgagaacatggctgatctagtcgggagggcatcaaggggtgaagggactactaacctaaggaagtcgtcgttatccctgtctccgtatcaagggtctgatccacattgtcgggcgacacgtgtggttcaaactcgagtaccggaattatcgccagtgactcgggctgcccgcgctgctggacatcctcgtcatcagcatctctacaaaggacaagagttcccgaggtcaacatacaaaagtaaactaggatgataattgcccgcacgaaggtggtcagaattcaggttttacaaattgtgccttggaagtacaagaagtcctactcttcaaatagggggagaacagactcccccaaatcaccgacttcttccatcacctccctccgcgtgtcactagccgccccatgatccaagatctcgcgcagatcgagttcaggacgcgacagctttacacacgcgaggacatgacacgccccggtgtagatcccgttcgacgtctcctccatgatcctggctgcatgcttggaggggatctcccccatcgccgtcgccagttccgcaagggaggaggtcagcgagaactcgtcgggattcaccgggatcgtaaacttgatgccgcactccccggcgagctggtgcaggccagtgtaggtgacccgcaacgagccccggatctccgacaggttgttcccgagatccgacatgcggtcctcgagccccttccgttgtcgctcgttgccggccaccaattccctcatcttcgtgaggtcttcacgagcttcagccaactcgcgcaccagccgatcagcacgcgcgttcgccagcgctgcttccgacctcgcctccacaatctcgcagccgatgccgcgagcacccgcttcgaggaggcgcccatcttgacttggagctcctcccaggtgaggatggcagctggtggatcatgacctgccgcgggatcgctgactggaccgctaggcgtcgcctctcggctcccggctgcgggcacgacatccgtcgaggccgcggcaggcgacgcgctggaagtccctccggacttagcttgcgcagcctttgcccgcgcctccctacgggacgaccacgggtcacacaacgcttgtatagaatcacggaaatctaaaaattcatctacttacttctcgccgatcgtcacaatatgttgtcgtcgtgctggtgggggtgacgtgtccgaggcctgaaagacattcaatgcaaagtaaggcaaaatccttctggctgcacaatctgacgataggataaattaccgagggggtcggcgccttgcgacgatgtccgcttacagaggagaacttcctcccctttgtcggaacattgccaccactagtggtggcagcagcagcatcagacgcctccttggcgaccttctctttcagagacgccgccacctgatggtccatgagtggctcgatgatgtcagtcagaggaagagcatacgcttaatcaagtcataaggtgatctcgaaggaaaaatccgcgatgcttatcggatgcacttatgttgatagcatcatcacgctcagccgcccccttttcacagaggggcgtggggatgttgctcgccgttgtcggaccgctgatcatcacctggccgacacggcactccacggcctcgatgtttagacctgtgaatcgagaaccaaatttcgatgagtcgataggaacgcgaacataagcatgtcaggataaatgtgagaaagataccccgaggagaaaccctggtcgcgtcctccggtccggaatagttataagctggataggcccgagcctggagcgactggatccgcttattaacgaagtctgcaacgacttcataccccgacaagccccgtactcggagatcatcgatgatgtcgataaacgactgaagagagggggtcaaggggggctttgcggtccaagaagaaatcttgtccggttgttctttgggaacaacaaagacggggttcgaatctttgatctcaaggtagaaccacctattccgccatttgctgcgagaagaagggcactggaaggggatataacgcgacttcaggccttcccgaagtcggaacccgacgcaaccagataccctgttggattccatccaacgcagttcatagtaagagcgaaagagatcaagaaaaggctctaccccaatgtaggcctcgcaaagatgggcaaagatgctaagaaaggcaatggaattggggttcaaatggagaagagaaagaccatagaaattcaaaaccaggagaagaaactcggaaggtggagtgagaagactgcagagaacataatcttcgatcgcaaccatgcgacccaagatgggctggggattagtacctcctgtttccctctccatggttccatggccaggaagggcgccgtattcctgaagcttcttcagcgacgcactggtggaagatgacttgccgaggttgattgctgattcaagatcgccggagaaagggcctaggttgatgaacgcttacaggtggaatgttttcaggtggaatgttttcaacacggttggcagacttcaaaatggatctccaaaattcctttaaataggcgcactaccgacggtgcgaattccaaggacagagagagatgcccgccggaaatttctgggtccgttatgcgcggcggttttttggacttcaatttaaaattcgctcatgaccgttgggctttgaatggcatgctcggctacggcctgtctccgcggtcctcgctccaggaatgacaacagtctcgacacccgaagtcgtgaatggttacacgagcccatttttaagcagaagtcgggggctactgtcagggttacgggttaggcataccctttacccttcgatatatgtaacatatcggtatggtatacccgcgcgcatacagatacttcctgtatattctatggaaatccttcacggaatctacggatgggaagaatcctactcggacaagactgggtcattaacgtatcgaatagggtctgatatctcctagttctacttggagacctccagatctgtgatataaaagggaccccccggtgagggcttaaggcatcgaatctcagagccaacacaacccacacagcctacgaagccggagcctgcaaggagccaagccatcgagatctagtcgaaccaacttgactacgatctcgccggatccgacaagttccattgttccctttgtaacctgtgttttccaccatataatcccatatcaactggattagggctattacctaccaaggggcctgaaccagtataatcctcgtcttttgttgcttgatatcgtattacgtagatccttgtaccaacgtaccccaataccctctatatccggtctacgggtaccacccgtcgacaaaatcaatctagggtttgcctcctactttgtgctgcgccgtcgctcgtagattactctatcccgctcacatgcgaaatcaatctagggtttgcctcctactctgtgctgcgccgtcactcgtagactactccatcccgctcgccggcgtgcaccggcgatcgggagagtaggtctccggaacctctgccttcgacgtactgcaccgggagaaggcggcaataaggtttttgggaagcacttcgcgcgactgctccctgttcgtccgcgttggctcgccttcctctccgccccctaattgttctgaagtggttttcgtcccacgtggtgtacatgtggtagtctgatcggtattttttaaaaaaaataatcggtgggacccacatgtcagcttctctccccctcaccccctttctctctctctctctctcttccatgattcatccttctctctctctctcatctctctcgcattttgtgcggcgacgacggtggtggacggcggtgtcacggggagggcacggcagccggtgggccgagccgaggagaacggtggaggcgacgggcggcaccgaggaggacactggaggcggcgagcggcagcgctcgtggggagggcgcggcggccgatgggccatgccgaggaggatgatgggggcaacgtcggcgacaactggctggaggaggtggggttcgaggtaagggcggcggccagtgatgaggctttgaatggggaaagtggccagtggcggtggtggaggatttctaggcctcctcccgcttcagcctatattcctcctcctcctcctcctcctcctcctcccctctccttccagcaccgctctagccacagcggccatgtcgggctcaggatggggcaagaaagatgaagaagggggcggccgtgggagtgggaactagttacgtgactgggcgggctcaagtgaggctgtcttaggcgaggcgggcgtcatccactgccgtccctcttcctctcctcccccggaggtatatggacaccggcgaggcgagcctcaccgctcctcatcccttcctcccgcctccacccactcctcctctttctccgcctcctcctcggccgtggctatggcagccgacgtccagccttcatgtcctgcgccgcagaccaccgcctgcccctgcgccactcacctgcgctcgtgctcgcctccttctccaccacgctcacctcgccgtagcctcgccttgcaatgcctcccccgccaccgcgctcgtgttgcctcgccgctgcctccgccgtcgccctaaagaagagagagagggagtgagagattgggaaagagatagaggagagacaaactgacaggtggggccacctatttttttataaatgaattgctgactagactgccatgtaggatcaaaaccaccgcggattgagccggaggggttatttgtccggtttacaagatgaagaatgtccgattttgtggattggggggtaattcggtagagcgcgatagttcgggggaggggtaattcatacttttcccccacatatatgaaacattgagtaccaacaagcgaaactagagaagtaatacgagagatacaatatacttgaaaaagcacaatattgttgaaatattttttttacatgaatattaagttgtagctattgaaaccctacaaaatgcttaccaaaacattgcaagaacacggcatgcaacatttgcaaattaactagtgaaacatcatacgtatactagttgaaacattcacataaaacatgtgcaacatttaaaaaatacattaacaagctaaatattatttttattgaaatactacaatatgtggtattgttctaaagatttaattgcaaaaaatttagcggtgtaattatattatagattgaacaagtaatttaagagaaaaaataatttaaggattgctaaaaataggtataccaacccaactaaccatggttatttttactagtagtgaatttagcatacatgtatctagtagtgactaattacatatggagctccgtaggatgtagctccgccaggtctccataaccgtttgctggttgagcgacggaggctgaggagtgaggcaggtcgcgtcatcataattggtagtgctaactatatatcggacaacggtcagtcaaaatagctaggtccgcttattcagtccaactatttgtggtagcaccaatagtacccattattatgccgtgtttagtttccgtcctattcccaactttcgatcacataatatcacatcaaaaactttcctatacacataaactttcaacttgtttttcaaactcctaactttcttcaaactttcaacttttttcaggaactaaacacacccttacactggtagagaaagtgtcttttctccccccttatactcctggttttgcaaccggaagtatgaatccgggactaaagatgagtatctttaatcccagatcaaataaccgggtcaaaatcaatttttagtcccggttagtgttcccaaccaggactaaaaatgctagagctagaactggcgacgcgcagtttttttaattgttttttttctcatattgatttcactaatcactacatcacctaatcatccccaaatagagaaatccccaagtcatccccacatcacatctccaaaatcacagatcaaattcatcataaattctaaaaaaattacatcacaaattctggaaaaacaatcacaaatatatcacatattcacaacacagatcacatcacaaattctcaaaaaaatactacaaatcctaaaaaaaagaaaacaaattccgaagagctctgtgcctccccagccaccgttgctccaccgccgccgccggatctagtggaagggagcgcgaggcgccgccgccgaccccgcccgcccggccagccgccgccgctcccgcccgatccagcgcccgctcccgctcctgctcacccggccggccgccgctgctcccgcccaccggcctgccgccgccgctcctgcccgatccagcgcagcagcgctcgcccgccgccgctctcgacttgccgccgccgccgaccccaaccggccgctgctgaccatagaggtcgtggtaggaggaggaggcggggagggggaggagaggggaacggggaggaaggagagaggagagagggatcagagagagacgattgagatgggatcgaggctggatagtggagatggttttaatgagagaggaagtggagatggtttttatcggtcttattgataagaccgagagagagaggactcggcgcgcgctcgggaggatttttgtcctagttggtataaagaaccgggactaaagatctatttttagtcccggttgtttataccaaccgggactaaagataattggggtccaactcgacctgataacttctttaaatcgggactaaaaatgatctttagtcccggttcctattcgaactgggactattgtgatttttaggcgaccgatcaaagatggtttctccagtagtgttaatcttctagctacaacttccactattgctgcagagaagctgcaaagccagcaatctctcctgaatacatccacaaaaatacaaatacacaattttatgatttgtataatgatatttattgataattatttagagccaataacatgacaattagagtttagtctactaaccctacacccgctagagatacatatacatttatatgaccacacttgattaggtttattatggtgaaaatacatgattttcacatgccttaaactggtgtccaataaatgaagattaagtaaggacacaaaatggaaaaaaagtaattagcacaagattaattgagttttaattattataaacttgaaaaatagatttatttagtattttagatcaacttttacaagaaaaaaatcatacgaaacacaccattcagtagagcagtttgaaaatcgtgccgatgaaaatcgagaaaaaatttgcatgtcaatgaaaaaagaacggggcttagaggtcgtgtagtgtggttgaccccatgcaaaaacatgctttgaccaactatataagaatagtttctacagtagtgcagtacgaactaacacattgtaccccatacgtgtacaaaacaatttagtctcaccacacacttataccttatacgtactaaacaatttagtctcatcacacattgtaccgtaccccatacatactaacgtgtacaaacccaataggacagggctattattgcctgaacctgtataatttttttctcatgcacatataagctggtcaatgcagtgcagtatcaattgtctttacataaatatgatcatatacaaacttaaaagcactagtagttacaaaaataatcatccacggacaggactatggtcccgttattttctcccacaaaagttgaatgaagattaagattttcgtggaacgcttttcaaacttctaaacgatgtgttttgtgtgaaaattttctatatgaaagttgctctaaaatatcatattaatctattttttaagtttgtaataattaaaactcaatcaatcatacgctaagaccacctcgttttgtgtaaaaaacttaatcttcatcttcatcttcattttcattatgtaatttagccccatctatgatgagatctgctttcgtcacaaatattaaaaaaattgtcacacacaagatcattaattagtgagtaaattttataaaactgcatatattttgaccaaactatcgcaaaactacacatattcaaggcattgcatcaaaaaactacatatattaacagcaagtttatcgtaaaattacatatttaaggcctactatcacaagactgcatatttaatattgaagttatcaaaaaaaataaagtatagggtttaaatcccttgcaattccattaccttggactacaaacattatagctttgtgttcacatcagcactacacctatagtactcaatctatttattttttataacattttgctaattaatatttatttttataatactcaatcttaaataagttgttctgagagaacttctgcactaaatctatatttttgtgatacaacgccttaaattcgtagttttgtcatagtttgctcgaagtaaatatgctttcgtaaaatttactcttaattggctgaagtatacatatcaatgtacacaagccttcccatgtacacatcatgcacatcaactaataaatgtcaccgaaaaatctagaaaacatatactttcaatagcattatatctatgtataaagtttcatctttaaatttattttacatagtgcaataaaaagacaaaattctaataatagacttgtagtcttagaactgccaaattttttatggctaaaataaaatgaatttaagcttaagattttatatgtaggtgtaatactattgaaaatgtatacataatttgttctagtttttttatgatatttgttagttggtgtccataaagtatgcacgtgaagcttgtttacacaaaatatgttctcgtaatgcatatacgcaaataacgatatagctaactatggtagtagattttttttattagtgggatatacgttttctattttgcacattatttggtgagtatttgtcacatccggataaatttatcccaagttaaaaaccacctttctaaaaagaataatagaaataactaaaaaatctaaaagaaatatcaaacactaaaatacatccaagacaaatttgaaagtggcttggaatatttttatttaattctccatgctctaaattggtccctcaatttttatttgaattttcatagcacaagaaataattttaaatcaaccaaaaaccaaattcacagttaattaaaatggaaaaccaaaaattaaatctctccttctaagcgcgcccccgccgataaccagtggcgccgccgccgcccgccgcaccacctccaaccgtcttcggccacgccgcccgtgcgccagccgactacaccgtcgtcaccccctagcaccgcgtgacgttgttctccgctccggccaagcctcgtcttcgccggccccatcgcagcgccgtcggccgcgccgtctcatcctcggttccatcggctggctatacaatttcgagggctctacacaaactcggtatcataggctcttaagactattcttattcttgtaatatttacactataactacttatatcctttacagagaaagaagtaacatttctaacatgatatacaataaatcatacataataaataatatcgatagtataattgataactaaaaaacgttgcataaataaagtagtatgaatacctcttaataggagatcacaaatatcacttgtctcttataaaaaaactttttcaggtatttcttaaagcaaaatcactaacgacagttttgagatcaatattgtccaagaaattcttatcaatgttgcacataaccaagccattcatgctttcctgcctatgcgaatcaataaactgttcgtctcgtctccttttcttttgtattttttgtgagcacctgacaaatgctttttaggtagagtatttttaccatccttgagtaggtaccatgaggttctagtactgggaggcaccaactccatccatccgtccgttcacaaaggatacgatcggaatagcgcgtctgcgcgtgtggtacccctccgctcctacacctaacatcgtctcttctccgtcttcttcttcgtcctcttcccctccgctccgcatccttgtcttcacttgctttggcgccggcgcacatccctggatggtgcggcctctcctttcctccaggacgccgtcggccgcccatctatagcgccgcctccacccatctatctcgccgccgacgatcgatccacggcgtcgctgcttcataaagccagcctccccgcttcttctgctagcgtctctgtcctccccgcggtagggtgccacttctccctcccctggccgtctccgattctttgtcctttctgctgcagccacagtgcgccgttgccttcatctgtcggctatctccccctttgctcttggtcatcgtgccctgcccaactccgcacagcactagagctccacacttagacagtcatgtcgtgtccatagcatgcatagtggtttgtcttgtgctagtatatatgccgtgcttcaaagctcgcatgaagtacgagtgttcagtattgtgaaaatgccaagttcagttcctggaactctgaaccagtgaaccttgtgaaactcaaatgaagtggaagtgtggaactctgaaccttctttagtgttgtacgcagtggttattcagatcttgtctgtggaatataggatttgttaggaatttatgtcagacatgtattcagaactttctgatgatgactgttcttcaagctccttgttccgttttagttggagtattgttcttgaaaaggctcttttgtaaacctttctgtaattagttgtggttcagcgcataacgatgcaattagcttgcaaacaaatgtctggtttgcaggacttctaacttcttgccatgaggcctctgaaattcgtggatttatattggcttctctagatgagcttctcgagtgaaaagctttgtctgcttcaagtttcctggtggcctcaccgtagccctagctgccaatcgccctggcgctatttgaccttgcagctgccggcgcccttgcgatgcccgtcctcgctctggtggaatgggtaggagggactagaattaatgcggcgccgtcaggatcgaaccgggaggagggaggaagcgggagcactgacgggagggaaccacgaagtcgccggcgttccccatcggcccacctcccccgaggtcactgccgcccggaagaccaccacattggttgtctcaggctcgtcgccgtgttcgcctatacggtttctgttcgatttgatagtcgatgagtagacgactgcatcggacagatggtgctccgctccaacttgattcctgcatgcgaaagtacaaaattgccctcccaccatcaacaacattccgtacctgcttttgcgggagatgtggtaccgctaggtaccaagccttcctaggccgttagattgagtggaatggatggctaggatatggtacctcctccaatcaaggacagtaaaaagcctcttttaggtaacattgtaacacctaaattaaattaaatagcaagaaaaaatcatacaaacaagaaaaatcctacgttcctaatctttcttagaactaatcaaggaggaagtaagaaggctgcctgctatgttgtgcctctggtcctgcactgctgtgcttgctttgattgctgcgagatgggatcactggataaacaaaggaaagaagtactcccttcgtactcataacgaaagtcgttttggacagcgacacggtctctacaacacaattttgacttctcgtttctataaaaatatttgttgaaaagtgatatatgtatacttttatgaaagtatttttcaaaacaaatctattcctataacttttacattttcaaattcaacaatttaaaagttattcaagatttatatttccaaggtttgacttaaacattatcctgaacgacttccttaacgggtatagagggagtattgttattagtaaggtgagccattttaataatttggaatagaaaatgagccggaaaattattttggggctaagtgctctgaaaaaatagttcagaaagtaaaatgaaattctttttttagaaccgtaatacttgacacagattagagcggcataattccgcagctttttccttcaattatttctccacttatttaacagagaagctacaacatggcttgttgtgtttgacatatataattacgatattagcattactagtgacttgtataacggtgattaggagatgtaacacaagaaagaaggctgagcaggtggctgaaattctggcaacgggcgtcgactagacgccgggcacgggcatgcgcaggacggggcgtagcaggaggtcgcccttgcggcgcgctgtgatgcctaacgcctcggccatgtccaacttggcagggtcggccatgccgggcacctcccagtcgaagtggaagagcaggctggcgagcgtgagctcgatgttggcgagcgcgaacgccaccccggggcacatccggcggccggcgccgaatggcaagagctcgaagttgttgcccctcaagtcgaccgcctcggcgccatcctcgaaccgctccggccagaactcctctggtgagccgccgccggcggcggccggccagcaccgctcatcacggcctatcgcccagacgttgaccagcacctgcgtgccgcgcggcacgtcgtagccgagcacctggcacggctccgagcactcgcgcgggagcagtagtggccccggcgggtgcaaccgaaacgtctccctgatgacgaggtgcaggtatcggagctcgccgagcgcgccctcgccctccgacacaacgccgggcagtgcgaaggcacgtcgcacctccgctgttgccttctgcatggccatcgggttccggatcagctctgccattgcccataccagcagcgtcgccaccgtttcgccgccgccgctgaagaggtcctgcatatgaagagatggggggtcattgaatagactataggaatatgtggaagaaacaatagtgaggaagagtgcacaagcatgagcattctgtagttgcatgctcgtggtgtcttagtatcttcaccatgcaacttttagaaacaattatgtaattagaatataatgatagtacatgtaactataatgtaatttatttgtaactttcacgtaattttgaactgttggatttttttcaagatttatgtaagtgggaaagaaaaaaaggcacaacgcacacacgtgtgagaatataatgatagtactctctctattccataatataaagcacatctattttttttaatgttccataatataaagcatgcatgcatgcatacaattaactaggacctattctccattaaattattaattttttaaatcatccaccctcaagatctctaattctattggatacatgcattatatttattagggtgatctaaactaggagatgataataatggtttcttggtctttgggttgagggtggttgtgtcttatattttgaaatggagggagtatcatgttatggagggctttttctaaagttacatacaagtttaatgtagttgtagttatagtttaattacattatgattgtatattataattacaactgtccaatttttgaaaaaaaaaattgtagacaaaagtataggtgatttcttgtactccatccattccatactataagacataactactttttttttataatataagacatgcatgcatacaattaacttagtatattccctccaccaaattattattatttaactctttcatattcaagatttctaattctattggatcgttgtgccttatattttaaaatgaatggggtaactttttgcatgacataaggttggacatctacttaagtgattaattagagttcccgtatcttcaaccgggcacaaaagcgaaaaggctggtgagtgaatgttctacgctttacttctcttggcaccaaataaaccatcggtagatagcagtgatttacactttcgctttcattgaaaatttcggtatttcagcggcaaccgaaatttctgaaaatggggttttttgccgaaattattggaaaatataatattttttcataaatttgaataaattttgaccaagttcacaaaatattgaaaaaaaaatcggcaatatatgtgcttgtcggtggggggcaaaattactgaaattttgaaaatttcgttctgaaattgcaagccctctgtccatatgtcatagtgtcatgctccgtggcaagttgcaggttcctgttcttcataagaaatcacatgaaggcagttgatgaataaaatttaaaaatataccttttttttcataatttgcgtttttatatattgggaggaggatttacgcaaatatacctctcctgcgtgctaggaaggcaggagcgaaacgaatatgcgccgtggtgagccggtcccgcgccaccgttgcgcgcaaccgctgcgcctttcggtcacgcactaccacgccacgcattcgtttcgctcccgcgttactaacaagcgggagaggtatatttgcgcaaatcctcctccccgtgtatataaacgtaaattatgaaaaaacatgggtatattttcaaattttattcggcagttgatcacttacagtgatgactaatgtgatgtcgtccatgtcgagcgggacctggaggccgccggcaccgccatccttgtgtatcctcagcagcacgtccagaatgtcctcgctggcggcggcggcgccggcgccgccaatcttctcctgcaggcgcttctggatgatgcggtcgaggatgcccaacaccgtgtggaggctcgcctcgatcttgcgcacggcgccgctgagacggccggcgagacgcgacgacggccacaggtcctccgggttgaacccgctcacgagctccatggaacgatcgatctcacggaggaacgcgtcgcgctcctggcaactctcccccaccatggcgcgcgcggtggagtcggccacgaccacgcacagcgccgctcgcatctccacggcgcgcccgtccgccgcggccgcgggcaccgcgcgcagcatggtggcgacctcctcctcgcggatggcgccgaaagaggcgacaccgcgccccgagaggagctgcgtggcggcgatctttcggaagctggcgccagcggtccccgtacggcgcgaacgcgatgtccctgcctcccatggtggccgctcgcacggtggcgctcagcgcacgcgtggcgaacaccgcgtcgtgcgtcctcatcacctcttgcgccgcctccggcgacgacaccaccagcgtgggcacctcgccgagccggagcatcatgaccggcccgtggcggcgcgcaagatcgcgcatcgcgtggtgcgggagcttgccggcgaggtggtgaagactgccaatgaccggcagctgccatggcccgggaggcagccgctgtgccgtcgccttgcggctgcgcttggtgagcagcacgccgagcagcgccacgacagccatggcgaggtagacgtaaccgtgagatgcatcctccatttttgcgtcgtgcgccatgcttgcttgagcagctagctttccgttttttgcagcgtggggatgtgtaccatatcgttatatatggatcgatcgagatagctagttcaccatcaagggaccgggttgtacttaatggtataacggataagaatattcattcattatgatagttatgttttatcttcgccagttttacttaaaaaaaagcacaacttaagagcatcactaagagagtacgtattatctccccttgttttttttcctaaattaaaaatagagctgtctatacatctattaacagaaaatcccacctttcatctttcaaattttggaccattggatgtgctttatgattcgtgcaaatgcattaaccctgcctctcctcctctcgttcccctcccatcgcgttcgcgagcggctctgcccaatcccccgctgccaccgccccaccgcaccgccgccagcctcaccggctggcagagggcgtcaacggcgaaggcgagcccacgccccccttcccccgaccagccttctccccctaccccctcctcccctcctttcttctcgagccgtcgacggcgaggtgcccctgtcaccgatgctggcccaccaccctcctccaacgctgcggctccggtgccgccgaagccgcctcgtcgcccgcctgatccgcctcccaccgncgggctaccgcctnccccagccatccctctagagccggcgaactcctccccttccccctgcatctaagactcccaccccaccccaccccgggaccctaacccgtagggtcctcgccggcgccagagaagaagaggtttgccggagttggaggagatgacatggagcacgaatctcaaagtccatccgatgtcctaaaatctgtaagatttggagatgcaaaatctgtccaaaaaagttagcaattccgttttgttaaacaaaaaataaaattctcttctttttttccatctaacgtggtgaatcaaaccaaaattgaaaaataggaagtaaaaaaaaactctccaaaagaaagtctaaattttattaaaaactaaaagtgagccgctcgattaaactaccaacaaaattctcctgttttttccatctaacgtgccgaatgggatcgtgagatcctccatctaacacacgggaaggagaggagtgacgtgggacagctggtgatgctgtaagacgttggggccaccaacttgcgcgcaattgcaaacaaagcactaaaaaaaataaaaaaaactaagggtgagtttgaggagaaggtgatcgaggagattgggaaaacgcaaaacgagatgagccattagctcatgattaattgagtattaattattttaaatttcaaagatagattaatatgattttttaaagcaacttttctataaattttttttttgcaaaaaacacaccgtttagttgtttaggaagcgtgcgcgtggaaaacgaggtgttatctcctcgatgttacccgaacgaacgcagcctaagattattacccacattgggccaaaaagtaaacacacccaacaaacagcagaactagacattttcaagacactactacattgttgtcgcaaaaacggcacataagccactgctattccacttcctcctcgccttgagctagcttcttcttcaccgtcctgaccgccttcatcttggttcgtcctctctttccaagcccctgattctggcaagcagcaagttcttgaaaaagtctacctctccattgatcttcatcgatccagcggcctccactgttgcatcaaattcaccaccttgtcagcaatgctacaaatgttcataatgtatttagagatttactccggtccagtaaaaagtacctcgaggtacttagaatttcacagtatccaatctttttcgatggttgaatataacaatacctatcctgcacagttagatccaacgatcggaaacaatttagtaccgtgaagtaccggtacctcgagatactttttattggaccggagcaagtctcatatatttatcattgaaaactaaatcatttctcataagccaaatggcccaacaagctgcagaaacaaggcaaatacagctaggttgctcttctctccagggtccttcaaatttctgagcaagtcagctctgccctttgcttcgaggtacagagctctagtttaatactccatccgtttcacaatgtaagtcattttagcatttttcatattcatattaatgttaataaatctagatagatatatatgtctaaatttattaacataaatatgaatatggaaaatgttagaataacttacattgtaaaacggaggaagtatatctctcgcacagcaccatataaatcttgctggagcacatctaaacatcacatggtctacttcaatttctccacaaagtgtacagagttggtttcccagccaattcattttcttgagttgcttagcagcttgaaatctccctatcagcattagccatataaaaattttgattttcagggctattggagtttttcatatttctcaaccccccccccccccccaaaaaaaagtctattccttatacgtacaaggatttgactgagaatttgccccatttttttagtttccatttcatctcatctctgttagtactataattgagttgcacttcctgtagcaattccgggccttccattcctctagtttctcagctgatattgttagcaccggtagcaattttggtctcggtctgttctcttgtcagttagcatgatcaatggaaaattttcctaaatgttcctatcaatcgagaggaagatcatgggcttatttttgataatatataattcctgctgtgttgtcttagaagacattcttcaataatgatctttctctcctttaccgagtaaatttagatgagagagatctcttctttcctcttgttaaatatgtagtaactcttttttaatagtctattttaatataattttttatttactgtgcggcttcccctacagtattttttttaaaaaaagttgatcttaactggtacattaatgcggttcagaaaaagaaaacaagtgcttcattaaaacacgtatgctggcccatacggtttagaaaaagacatatataatcatgtttgcctagtgattcttgatggagaagaaagagaaagaataggacggatggatatgtggccctcacagttgtctaactagaccctctcgttattgaatctcttttgtggatttaattttttagaacgtgccaatttcatccaattttatatagcatgaaagttatatgcatttgaaatagttgtacaaaaattaaaagaaaactaaggtaagacattgtgagagtcgttttatccccggtaggtctcaggttttggtctctcatttaaccgacgcaacgaattcaaaaaaagggatggtgtccatatctatttaactaggcgtaaactcctcagcaccggaaccaggctctttacnannnngncccagctccacaactctagtatgttttgtgagatagctccatccaactccattcccagttttggtggagctgaaactatttggctgagctccagcttcaggaggggtggagtaaacgcaagtactataagcatcttatcactaattacaagatgccatgtagactcaaatgatgatgtggaggagaaaaaagaagagagagagaggagcagccacccctcatgtaaggagcaacctccacacaagtttcaagaaatatgagagacagagagttggacaaaattagatgtgaccacctcctctgttataaaacttgacctaagaaggctacctgctgctgtgcttgctttgattattgcgagatgggatcactcgatcagggccggctggctgcactcaatcagacgatcaacagccctcgtcggcttcttcgcttcgaggtcaggagagaaggcgcagagacgatgggagagaacggcgcggcgcagcagtagatcgatgggatcgaagacgaagcgacgtgcggtggcctgggctgaatcctgaatggccgcgcgcccacgcgcccggtgagactcggcctctactggagtactgggcctgtacgtcggctgccacgggtgggggcctgggggatggagagttggtgggtggggccgtccgctctagctcttaggcgatcgcacaaccggcctaggccagagccatccaagaatgctgcatgcatgcagcgttaccggcctagtctgcttttctttgtctataaaagaaacatttaattagtctccagcaaagagtaatgcattgtgaagtaaataagtgaagttcagacaattgtgctttccagcttttcgttgctctgttcctacaagtcctctcagtagtgtgtatttgtgtgatgtgaatccactacaagaagaagtatttttgcaagctgtcaaaatatatttttgcaggcggaccctttctccgtctaagaaaataaatttcgcagacgacctctccatcttcgcaggagctaaatccacccgactatgaaaatattttcaacaaacaaaaaaaaaattctccgccaccacccttacccgtcgccgccctcctcctccagccggatctagggttaggattttgggagggagagggaggggaggggaaaaaccacgccgacgcccttcccctttggccagacttgagaggggatgggagggccctcatctgccagatctggtaggtggaagctaggagaggggagtgcccccacgagcccttcgtgttgacgccacccttcacccctccccccccaccggccggatgggagggaaggggagggccaccatcggccggatctaggatgtgggagctaggggattggagcgccgccatgagccctccgcaccgcctctgcggccctccctcctccgaccggatctgggaggggacgggaggggagggccgctgtcggccggactgggaggtgggagctagggaggggagcgccaccacgagccctccgtgttgccaccactgtggcatgtggtggttgctgccgccacactcccatccttctgtcgaatctaggagggagggagggaggggaggggagccacgccacctgctttgagaagggtggagggtgaggtgaaggagagggaaagagaggtgggagagggaacgaattggtgggagagccattttgataattaggagtgtgaaataagcggaaaattattttgggggctaagtgctctggaaaaatagttcagaaagtaaaatggacttcttttttttacacccgtagtcggacaaaacatgagagatttgtgcggcataattccacggcttttctccttcaattctttctccacttatttaacagcgaggctacaacatggcttgttgtgtttgacatatataattgcgatattagtgttactggtgacttgtataacggtgattaggagatgtaacacaagaaagaaggctgagcagatggctgaaattctggcaacggcgtctagtagacgccgggcacgggcatgcggaggacggggcgtagcaggaggtcgcccttgcggcgcgccgtgatgcccaacgtctcggtcatgtccagcttggcagggtcggccatgtcgggcacctcccagtcgaagtggaaaagcagactggcgagcgtgagctcaatgttggcgagcgcaaacgccatcccggggcacatccgccgcccggcgccgaacggaaggagctcgaagttgttgcccctcaagtcgaccgcctcggcgccatcctcgaaccgctccggccggaactcctccggcgagctgccgtcgccgctgccgccggtccagcaccgctcgtcgcggccgatcgcccaggcgttgaccagcacctgcgtgccgcgcggcacgtcgtagccgagcacctggcacggctccgagcactcgcgcggcagcagcagcggcgctggcgggtgcagccgagacgcctccttgatgacaaggtgcaggtaccggagctcgccgagcgcgcccttgccctctgacacggcgccagccagtgcgaaggctcgtcgcacctccgttgtcgccttctgcatggccattgggttccggatcagttctgccattgcccagaccagcagcgtcgccaccgtttcgccgccgccgctgaagaggtcctgcatacgaagagattggggtcattgattgaatagattataggaatatgtaggaagtggatttttgcatcactcaaatgattatgaaaaaatttgaaaaaaaaaattaagaagatgtattaacacgtgatatatcactccacaaacatgcaagtaaaaattcaacttctacatctcacaacgaaaaaaacaaatttgactctgaatatacattaactagttgcggtttaatttgtttttttcgctgcaagatgtagaaattgaatttaaacttgcatgtttgtacattattatatgacatgttaatacacctcaatttttttattaccatttgagtgacatgcaaataacgaggggatatcccctcaagggattaaaatagttttccgaatatgtatgtgctgtagtcgcccatggtgtctttatcttccccatgcaacttgttaaaataaaaactcaagtttatggcgtgatgatataatattacgtgctagtctttcttactaattttaattaatttttaaaattgaaaatttttgcatgatatataaggttggagttccactccacttaagtgtgaatgccccatgctttccttttgttggcacccaccaaataaaccatagtatatcggtacgtaaaatctaaaccgagtttagaataggcagctacagatcggacgtccgatgaaacctatggcatcagacgcccgcctgtgatgactccattcgcagctgcacatacaggttttgtgggcccatgcgctactaccatactacacactacacctctagaagtattaattagtgcagcaagcaaggtgacatgctacatctattcaacatcttctctaaaacaacctttaacaaacctttaagcatcctttacttgtaaacaaattatcttatgtaatattcaattgcatcatcatatatattatagttaagtctttaaatcaagatctcacatgattatatttctaatatataaaattatttttctaattgacacattagtatataatacatgaaagtgaaacatcacatggtacttattaaaacatccaaattacataacatgcaacatttgcaataaaatagtgaaacatcacaaaatactggtgaaacatctaaataacattgcatgcaacattttataaatgaactagtgaaatatcacaaaatacatgttgaaacatccgaacaacactatgtgcaacaattaaaaaatcaattgcaacataacagtttgaaatatgcaacaatgtcgaattcggactgaaacatacacttctcacatgtgaaacatcgaaattttatggttgaaacatatatttattttagattaaaatacaatcatgtgtgatcttgtttgatagatttaattgtaatgaatataacggtataatcggattgtggattgggtaaatgaagtgaaaaaaatgtttgaagtttgaaaatatagtgtcatagatgaaatgaatataaatgatgtatcgatgcaagtgtaggtgatataacaaaataaagggtgctgcatgcacatgcctttctacgtataagagaaagggctcattagatgttgtctgtgttcgatattttgatctccatcagacgaccgaaagtaagcattctcggcttaaccagtgagggaagtactacacatgcatgccttttttctattagacatgcatgtcttttttcctctttttataaagttttctcttaaattacttatccgatctacaatccgattacaccattgtgttcattgcaattaaatcttcacaccaagatcttagatgattatattacgatgaaaaaatatttatacttttaaattacttttattatatgcgtaagttacttttatcatatatataaattacttttagatttgactgaattacttcttatacattcataatgctctaagttgattattttgttatttttttaatcaattttataatttatggactttaaatttaattttagatagaccatattttttctccctacaacgaatttacttttaatgttgtaacaacttacttcaattttgtgcttaagttacttttaggattgatataaattacttttagactttattaaatttacattcatagatacattttgtcgacgagtgatactcgtagaccagatgattagggtattggggtacgttggaacgatgaactacgtaatatgacatcaagcaaatagaagacaaggattatactggttcaggccccttatcaggtaatagccctacttcggtttatatgggattgatgatgaaaaaccacataatacaatggaagtagaccaaatcgatgataccgacgagatcgtgatcgatgtattcgacgagatctcctggcgacttggcttcgcacactccggcttcgtaggctgtgatgggtgtgttggtgatgagattcgatgccttgcacccctacctgcgggtccctttttataccgtgtaccatcttgatctccaagtaagactcggaaacatcggatcttgtacaacatactagaaactctataccttccaagtaggactttagaaatccttgactcgtagagatattttccatattttgtaatggattcctacaacgtatacgggaacaacccgtgtacatgaaggtataccatatccgtatattccataagtcgtagaataggaggtatttcttattcgtaatcatgacaaatatagttctatatggaaactataaggactactcggattgtatccatattggtctccctagttctacttggacaaagggacacctatgggtataaatagactccttaggaggagagtgggacaatcaagatagacacagaccaacaagacacaacagatcaacacacaagacaagacatgccagatatcaacatcagagattagtctagacataccccatccggtgcctacagaggccggcaagagggatctagcgtcatctctgatctcgacgagttcatacttgaggaggaagactaccttgtcgtcgactacgtgtcggttatccatgccgccaagtcgacgacagctagatatgttatcccaattattgtacttgcgtaattcagataaatgaagagcaacaccgactttggccaacaggagtagggctattacctatcagataaggggcccgaacctatataaaaatctttgtctccatacttcaatctcgtatataccctgataccaacgatccccatactatgcaaaataccgtagtcaagatctcaaatgttgacaagtacaatgatgcaaatagatcttgaaaacaatatgtgatttaaaagatataagttattaaagaggttaaatctaaaagtaatttatatatatgataaaaataacttacatatataataaaagtaatttacaagataaataatttttttattagaatataatcatgtaagatcttgttataaagatttaattgtaacgatcacaacgatataatcagattatagatcggataagtgattttaaaaaaatttctataaaaagaaaaagcaagacatgcactaatgaatgtactagtagcaatcaaagtgaggtcaactgggtatgcgtgttgcgtggaggacccagtgctttttgtgcaaaaacaatgtgtgattttatttttagtaacacagtgctggtcgcggattaggactaacacgctactatgctcagtatagttgcgtccatatatcatatatagtgtcattgctccacatacggcaagttggaggttaccggcggcgacaatactttttttttaatgactcgcaccagacagtacgaaattcatattgataaagtaggaaaaaattataagattataaccttaagaatatggctgtcaacaagctgagcttgatcgaacgagcttatatgtgtaggctcgagctcgatactaactcgagccgagtctggtttgaacttcgagcataaaaacgggcgcgagctcggctcgctcgagcctcgagctttttcaattttagattttaaatagtctgtatagatgagagcatggggaatcacgacggcattggacaagtatacccaacattagggcaatagcaatgcttgaggtcttggtgaaaataaggtatgtcccaccataccctatgtccatggccacaatattgaaggcaagaatatatattaagatgggtcccacatctatgtaaataaattctattttaaggtaggttccaccatatcataatctattctcatcctctttaatgtgcatgtgtactttatctcatttttttttcttaaggttgagccataagctttatagttattttttagcatttaatatcttatggctagtgcctacaatatatatggctagtcattcttatagcacaatattgtagatgtccttagacttgtaccggaactattatcgttttaaaacatgatgtgactaataatagtaatattaatggagatgcatgcatgctaatagtactagcaggaggccagggcctgcaggcgtgaacccatgctctatttctatgcagctttttattaggagttgggagatgagtagtagttgtggtgtctctgctacaagaaaaattttaaaaatgtgagagacagtaacgccagctgaaaagaaatgttggcaacctaggctcaacgaactattcgagcttggctcgtcaagcttgcgagcttggaggaggtagacttgggctcggttcggattattcacgagtcgagcgagccaagctcgagcagctcaaaaggattcacagtttcggatcgaaatttttgaaatttcggttctatcgtacccccatacgatattattttggctgaaatttttagatttttttcatttttttcgtgaatttggtaatattttgttcaaattttgttcaaaaattcatataatttcggtctgaaataatttcggacacaccttcaaccgaaagtttgaacccttcagctcacgagcctcgggctttttggacagctatacttgggaggtcatactcaggaaaatgaaaaaaaaaacaccacccacactctgacagcatcaaaacacaaaacgcggcgacaatacttgttcttcatgagaaatcacacgaaggcatgcatgcagttggtcacttacagcgatgattaatttgatgctgtccatgtcgagcgggaactggagcccgccgccctccttgtgtatcctcagcagcgcgtccagaatgtcctcgccggcggcggacgatggagcagtcttcttctgctgcaggcgcttctcgatgaggcggtcaaggatgccaaacaccgtgtggaggttcgcctcaatctcgcgcacgccgccgctgagaaggccggcgagacgcgacgacggccacaggtccgccgccgggttgaacccgctcgcgagctccatggaacggtcgaacgcacggatgagcgcgtcgctctccttgcaccggtctcccaccacggcgcgcgacgtggagtcggtcacgagagcgcacagcgccgctcgtaactccacggcgcgcccgtccgcggcggccgcggccaccgtgcgcagcgtggcggcgacctcctcctcgcggatggcgcggaaggaggcgacgcggggcgcggagaggagctgcgtggcggcgatcttcttgagctggcgccagtagtccccgtacggcgcgaaggcgatgtccctgcctcccatggtgcccgctcgcacggtggcgctcagcgcccgcgtggcgaacaccgcgtcgtgtgtcctcatcacctcctgcgccgcctccggcgacgacaccaccagcgtgggcacctcgccgagccggagcatcatgaccggcccgtggcggcgcgtaagatcgcgcatcgcgtggtgcgggagcttgccgatgaggtggtgcagactgccgatgaccggcagctgccatggccccggaggcagccgccgctgagccgtcgccgtgcggctgcacttcgtgagcagcacgccgagcagcgccacgagagccatggcgaggtagacgtaaccctgagatagtacatccgccatttttgcgtcgtgcgccatgcttgcttgagcggctagctagctttcagtttttggcagcgtgggtgtgtacatgttgaatttataagcacataacataacgatttaatttatttcatcatgatattacagagataaactagcataaacgcatcataaaatctacacatgtaaactagacagtaaagaatgaacagaccaaatatgcgtaatatgttgaacacatactgagggtatcggaaaaccggctgcttagcaggaaagactcgcggttgcgggctttaacgacggcgcgcagcacgcaagcgaaaaggaaaacaagccgttgtgatcgaacagggagcagtcgtacgaagcgcttcccataaactttattaccgccttctcccattgtatgacgtcgaaggcgaaggttccggagacctgctctcccgatcaccagcgcacgtcgacaagcggggtggagtagactacgagcgacagtgcagtatagaggaagagccaaaccctatattgatttcacgtgtattgcgtggaggctgtggtttgacttatatagagatatcaggacgcttgatcaggacgcatgtacgatctccactccacgtaactgaaccagatgagttgcgtgtaacttattcggactccacaccgtttcaccccagtgcaggacgtcgaaggcgaaggttccggagacctgcccccccatcaccgtaccggtgcacgccgacaagcgggatggagtagactacgagtgacggtgcaatacagaggaaaaagcaaaccctaaattgatttgacgtgtattgcgtggaggcggaggcttgacttttgatcaggacgcctgcacgatctctattccgtgtaaccgaaccggataagtcgcgtgtaacttatttggaccccatgccgtctcacgcaccggattattcgaactgcttccaaaaaacaaatccgaatttcccgcagcaaaacaaaactacaaaagtagaactgtttccgaaaaacaaatccgaattttccgcagcaaaacaaaactacaaaagtagactgcatctacacatgggtgatgaaccaattttgtcggaacattcgatgtgcacgtgcgccaccatgccaggtgaggcgaggagcacgtgttcaccctcttctctccgcacatgcctaaagtggctagaagagtatcatctttataaggaggtatccctctgtgtatggtggtactaaacttcccatgcacgtcatctcataaggtgtgcttttgtgattttccaaaaaaaatattctttgaatgggggtaaggtccatctattaattctatatgttggagatagctagttcaccatcgatcaaggactggatagtattttaatggtgtaaccggataagaatattcattaattatgatagttatgctttatctttatcttgaccaatttagtgagtagttgtaggttcgactcttgtgctagcgcaagatgattatatgtatatgtttgtccatctattatcttataatcttaaaaagaagccaccattctttctatgaaaacctaaaaattacacattaataggataaaacaagaaatatttatatagctaaaaaattactaaattaaccgaagaaatatatacgactaacttgtgtgttacacgacatgtgattactaaagttgttatctttaaaactctatcggtttatattaaaataaaagtccacgtcatttacagcccattaattattaattttaaattttataaataaataaaatattaaattgagagttaaagatagatctgatataccgtcaaattatagaattactaaattagagttcacgatagattcgaaggtgatgaagtatagtggttgaaacacatactccaacccaaaagtggtgaagtgcggttgttaagcgtctatttgaaagttcgtttcgcttttgctttttttttctgcacgtaaaatgagaaatgacattattatataatttattaagcattctattataaatataaaaaatatatttatttgattttcaaagaaactttatctatataaaaagtttgtgtaaaaaaatctatcatttagcaatttagaaagtgtgtggtgctgaagccaaacgaaggaatgaaagaagcctcgagcagtacagtaggatatttatttacagcttttaagaatggacgacgtgcatatatatcttcagtagagaggacgcggctgcaaaacatcatatggtgtttctccatttagcgaacaggatgagattagattggtgccggcgtcctgttgtgagttcgtcatgatcaaatcaccaatgagaaccggtttgggtcatcaatgatttggcttacgttcggcgtgatcaatgcactactgccacagaacgggctaacaataccggtttataggcctatcactactggttctctttgaaggttcacaccggtagcaattttggtctcggtcgtctgttctcttgtcagttagcatgatcaatggaaaattttcctaaatgttcctatcaatcgggaggaaaaccatgggcttatttttgatagtataattccctctgtgtagtcttagaagacattcttcaataatgatctttctctccttttccgagtaaatttagatgggagagatctcttatttcctcttgttaaatactactacgtagtatgtgtaactctttttaaattgtcctattttaatatactttttactgtggtagcttcttctacagtttttttttaaaaaagttgatgttgtatctttttttttaattttcctattttaatataatttttgatgtggggcttcctctacagtgttttttaaagttgatcttaactggtaattaatgcggtttagaaaaagaaaacaagtgcttcattaaaccatgtatgttggcccatacggtttagaagaagacatatacaatcatgtttcctcagtgattcttcacgaagagtcgtgatggtgaagaaagagaaataatacgacggatggatatgtggccctcccagtttcctaagtacatcctctcgttatcgaatctcttttgtggttttatttttttacgaatcgacgtttaaaacgtgccaattttgtccaatttcatttaatatagcatgaaagttccatgcattaattaaaatagttgtacaaatattaagagaaaattaagataagaattgtgagagtcgttttgtccctgctagggcttaggttttggtctctcactgacctttgcagtgaggaaaatcactgagagttctccgcgctaaaacaccctttggatccttccttttcatatctcccaagtcactagtagatatacgaatgataagattttcaaccatcaaaacaatggatttaatattctaaagtataataaataaagataattctaaagatcatacttaggttgaaataaaaaaaatacgggaaagagggaaggaacaaaataatctccatttttccatcaagtatgaccaattttagggttattgtataaaacctctaatttaaagtcccaagccattttcaacttcactttaattctagccttgaataagttcacttcaggtctctcatcttgttccttttcaccagcagatcctgctctaaccacaccacgtttcattatcgtctaataccgtattattgttaggtcatgtggactttgtcacaatgtttctcacccctttggcccctcccactgtatggcgttgtctcttgccctctcccctcataggttcctccaccgtgccaagcctagctatattccgtggcctaagctcacggggctccgacttgaccattcaaagcttaggctattcaaatttaaaagatttgcctctagtactctctccatttacttttgataggtatatttccaaatctaaaaattttgtgtttgatatgcatatttcaatccaaccacctatatcatcttaatgactttgtcgaatttgatgactctccatacttccgtgcaaaattggtgggcatcgagaaatgtaaatattgataaatcgcttgtttataaggaataactagtagcatgtttaaatggatgatatacttatccttagtaattgtgccaagataaaatataactatcaaaaatagatagagagagtatctaaaaccgatgtcatgttccttccatcccttcctcccatcacgtgtagcacgtccatatgttccgtgtgcgtaactacttctgtcaaataagtatgggcatattactattacatgtttgaacttgttggagagttaaaaagtaagagcatattcagtaaagcaccctaaactaaacactcatacaatttttgtttttgtgtgtgtggatgtgaagaaacgaggtccatacggacctctaatatacggccaaaaataagaaggcccccaaatcaactcgtatatcctatagacctgcggactccacatgcaggctgcagcccccaatcgtcttattttctttggcgaggaaaaattcttgatctcgcgtgccatcccatccttcctcagtcacgcgccatcgtcgtccttacactttatcctccagctagcaacttcagcatggcatgaactgatcaccattagttttctttccctgtagtagcaggctagcagctagctacatgcatgacgatcacctttcactttctttgtattgttagtatttgttactccatccctatctaaatataagggattttagttggacgtggcacattgttatattaggatgtgtcacgtccaaccaaaatcccttatatttagagatggatggagtatattgtcttattgacatgtagcatataatcctgtggcatacgtggcacttatcagatcatttagaaacaggagaagtggttgggtagttgacttatcactcatttatagctagcaatcatgatatagtctcaaacaaaaatcatgcatgtgtacgctacctttcagaaaatatataatattccctccgacttataatataagagattttagagaaatgtgctacatactttgttcagattcatagtattatgatgtgtctctctaaaatcccttatattatgggacagagggagtatatattaccatgcacgtatatgcggtttagagagagagaaaagagagggattaactatttttcaggatgatcttgattgaattgaaaaggaaatataattaattaattccatcttttgaccaattctcacttaatttaatatattaattgtgttatgaaaatagatgtacaacggaggcacgaatttttacgtggaaaacacttgcgggaaaaaaccacgggcgccgaccggcaatgatcactatagaggagatgattacaaacgtaggggaatcacaatgggaacgccaccccttccgtacggcttacaagagtatatataggggataaaagaaagacacctaataggactcctactaggaaactaatccgaatatattgtgggcccaaaattcggatcacatatttaacaatctccaccttgagacgaatttcctcttgtagcataaaaacatcaatcaccaaaaatacctcatgtaggtaaaatcaccgcgcgccaaatagtctctaagactatactataacacccaccaagcttgagcaaagctcaaacttagtagcaggaactggctttgtcatcatatcagctgggttatcatgagtacttattttgcataccttgacatcaccttcggcaatcacacctcaaataaagtgatatctcacatcaatgtgctttgttctctcatagaacatctgatcctttgtaaggcatattgcactttgactatcacaaaatatattaatgcaagacgtaactccacaaagctcagtgtacaaacctctaagccaaatagcttctttacaagcttcagaaatagccatatactctgcttcagtagtaaataaggcaacagttgcttgcaaacttgccttccaactaacagcacatcctccaatagtgaaaacataacctgtgagcgatcttctcctatccaaatctccagcaaaatctgaatccacataaccaacaagtccatctctagatctcccaaactgcaaacaagcactagatgtaccacgtaggtatctaaaaatccattgaacagctttccaatgctctttgccaggattagctatgtatctactgacaacactcaatgcatgtgataagtcaggacgacaacataccatggcatacataagtgaaccaactgcacttgaataaggaactctagacatgtactcaatatcataatctgactgtggacataaatctgaagataatctgaaatgtgcagctaaaggagtactcactggttttgcatcatgcatattgaaacgatgaagaactttttcaatataacatttctgactaagatataacttgccagaatgtctttctctagtaatttccataccgagaattttcttcgctgcacccaaatccttcatctcaaattcactactcaattgtgtcttcaactttgctatctctgatttatcttttgcagcaatcaacatatcatcgacataaagaagcaaatatatagctgaaccatcaacaactttgagataaacacagctatcataattggatcttctaaacttctgagaaagcatgaaagagtcaaatctcttataccactgtctaggtgactgcttcaacccataaagagatttcttcaacctacagactaggttctcttttccaggaacaacaaaaccttcaggttgctccatataaatgtcctcttctaactccccatgtaaaaatgcagtcttaacatccatttgctctagttcataatcatgcattgcaacaatactaagtaaagtgcgaattgaactatgcttcacaacaggggaaaagacatcattgaaatcaatacctggaatctggctataacctttagcaactagccttgctttgtatcttgcctcatcacttggagacataccttcctttcttttgaagatccacttgcaacggataggtttcttctcctttggcaacttcaccaattcccaagtatgattcttttcaagtgattccatctcatcatgcatagcagttatccatctattgcaatcatcagaaacaatagcctcagaatatgtagaaggttcggcattaccttcaatttcttctgccacactcaaagcataagcaactatgttcgcttcttcaatatatcttcgaggaggtttaatatttcttttgggcttatcttttgcaatagaacgttttggagactgatgaacaatagaagaatctgaatcttcaataacaggtgcatcttggttaatagcaacatcttctttttctggtgcatgccctgaactgatcaagtgctccacctgcacacttgctttctcctgactctcaacaggaacattagtagaaggtttgtcatgtaatatacctgattcatggaagacaacatttctactaatcacaacctttttggtttcaggacaccataacttatagcctttcacaccagacggataaccaagaaaaatgcacttaatagctctaggctccaatttaccattatcaacatgagcataagcagtacaaccaaatactcttaagtctgaataatttgctggggaactagaccatacctcaattggagtcttcttatcaatggcataactgggtgatcgattgataagataacaagcagtagaaacagcttccacccaaaattgtttaggcaaacctgcattagacaacatacaacgggcctttgatataattgtcctgttcatacgctcagctacgccgttttgttgaggtgtgtgaggaacggtgtagtgacgcacaatgccttcagacttgcaatatgatttaaatatcttagaacagaactccatcccattgtcagtacgaaggattttcaccttcctctcagtttgtctttcaaccatagttttccactctttaaacacatcaaaagcttgatatttgtgcttcaagaaataaggccaaacttttcgcaaataatcatcaacgatagtcatcatgtaacgagcacctccaaaagatgtcttacgagcaggcccccataaatcagaatgcacataatcaagaataccttcagtagtatgtgtagatgtgttgaacttcaccctcttatgcttgccaaatatgcaatgctcacaaaatttgagcttctcgatgctttgtccatctagcaatcctcgcttgctcaattctgccaaaccaatttcactcatatgcccaagacgcatatgccaaagattagtagcatcggaattagataatgaattagaaactgctgcaacattacctaatatagttgtacctcgcagatggtacatgttggcaaatttaatatcagctttcatcacaacaagagagcctttagttaccttcaaaattccgtctccaccggaatatttgtaccctttgcgatcaagagtacataaagagatgagacttctcttcaaatttggaatatgccgcacatctgacaatgttctgatacagccatcaaacatcttgatctgaactgttccaatacctgcaacctcgcatggtgtatcatcacccatcaaaacagtaccaccttgcaaagcttcataggtggcaaaccaatccctattcgggcacatgtgataggtgcatgcagtatcaagaatccacttgtcactagtttgtgcacaaccagcataagcaacaagcaattctgcatcagacttctcatcagtaacaactgtggctttaccttcctcttctttcttaccttttggtatatactttccggttctcttgtctttgtcctgtagcttccaacactcagagatatcatgtccatctctcttgcagtatttgcatgacttatacctgcctctggactttgatctcccacggtagctacttgagcttttatctcttgattggttctttgtgttcttctcctgttgcctgccccgaacaaccaagccttctgcttgtgaatttgaaccttcagaggttaccatcttcttcatcttttctttggcatgcaaagcatcataaacttcttttaaagttagagtatcacggctataaagtatagtatccctgaagtttgcatatgagctaggcaatgaacacaatagaataaggcctaaatcctcttcatcatactttacctccatagactcaaggtcagcaacaatttccttgaaagcggagagatggtccatcacagactcatcatcttgcaacttgtgcaaaaataacttttgcttcaggtgcatcttactggtcagctccttagtcatgcatatctgttccagcttcaaccacagcccagcggttgtctcctccttaagcacctcctgcaaaatattgttagatagatgaagatgaatatatgacatagccttacgatcccttttcttctcatcgttggaccaatcctgagtcctcttgtcaaatctagaaagcgcatcatcgaggtcttgctgtgcaagaacggctcgcatcttcacttgccaaagtgagaatcttgtgtctcggtccatgagcggtagatcatacttcaaactcgccatgggaattaatcctgaatttgctggtaagaaattagggtaaaatagcaaaaacgccggaagacgggaataaggggatcatttccaaaattttgcctaggcaagatatgccctatttgcaagatggaacgcctgttgatatggttttcaatcccttaggagtaccctcccgaatgaatgtgggacaaatatttgaaagctcgctcggattagcaagggatctgctaaagaaacattcaaggagtcaggtccacttacttttatctttctttccaattttatggggtgggttggtttgataagacccctttttgctttgttgataaataataaaaaaagagtttttttctataacctgcttgttttattataacaagtcctagcaatttcctccctggaaaaaagcctgaacagaacagccaagctttcggctgattgttttaatcctcgtgacgcgtgcgctgcttgtagtactcctctcacgacgcctgagcggctgctgctgcggtgctgcctttttatctcgcgcaggcgtgggacgaggccgactcggagtcgacaggtaggggggtgaacagattgattcgacggaacgacgaacacgacgacgcgtgccaccgattagatcgatttcttcgatcgggaaaaatcgccggtagccgggactgcagtagatcgatcttcaatgctctgataccacttgttatgaaaatagatacacaacggagacacgaatttttacgtggaaaacacttgcgggaaaaaaccacgggcgccgaccggcaatgatcactatagaggtgatgattacaaacgtaggggaatcacaatgagaacgccaccccttcccgtacggcttacaagtatatatcggggataaaagaaagacacctaataggactcctactaggaaact

SEQ ID NO: 6107 - DNA, 50819 bp, Oryza sativa
taatgtagagaagcttgttttagtgtgcatttgtgcccgcgccagttatatgcaacatggtttacatatctatgagtaacttctttctctctctgtgacagtactgtgcatgcacacatttgtaccaacacaacatataaatctttttaatggcatgttgcctagagctagagagctttgtagccagcaaacctatggctaggttcacaattttcatgattgccggtaatatgtactacaagttactactgttccaaattaaaagcattgcaaaggtagggattaattaattgggacaccaaattaaagtgctttggcctacagtgtacagtccagtcctaggctggaaatctagggttaagcatatgggtaaataaggtcccgtttggcacagctccagctcctaactccaacttacctggagcaggagctatgccaaacaatccagatcctccatttttgggagcggagttggcagagctactccacaaatttgtactacgggggtggagctgggtttttgctgctccacaactccactccaaaccaaaagacccactaccctttaaattttttacatatttacacaaaattgccactcaactacccctaactcatctctcacccctctctctccctcccatcaggccgtcaccctcactctccactccgacgagctcgacggcggccggcgcgcggttggcggcaaggtcgacggcggccggcgcacggcgggcggcggggtcgacggcggccggcgcacggcgagcagcacatggtgggcggcgtgcggcgggttggtgcgcggtcggcgcgcggttggcggcgaggttgacggcgggcggcatcggggacggcgcgcggttggcggacggacggcggcaggcggcgggcaacatcggggacggcgcgagtggcgcgcggccggtgggcggactgcggcgggcggcgcgcagcaggaggcggccgcccgcacacggggacggcgacggcagcagttgcgattggggagtttttttctttttttttttgtaatttcagatctagagctcaaaacctaccaaacacttttcagcaggtctccaactcctacaagagctagctcccactagagtgggagtttagagctgagagttggagtttggagccctaccaaacggggtctaaaaccatgagatcactactacaaaaaaaaaattgtagccacaaaaaaatcactagtaataataacagggagctcctatgatctaaacccgcttccgaaaaacaattgtcaaggcggctgtcaattttcacatcaatgtccgtaatatgtatagcgaggttgcatttatttggaagcaattaatttaatttatctcaaatttagactttatttccaaataatttgcttttaggtatctattcctacctatatatgtgtgtgcaaatatgcatgtacttaattactaaaaaagttgaaagaacacttggtacataaaaaaggttaattagtactatggtgtatattgctaataaacttcactctgcactagtaacaattttgccaaacttctgttcagagatctatggctttcatcgagcgtgtgcaatatggatcctcaacatttggttacagttgaggtatggatactcatcagattgacctccctgtattctttccttaatatactacactgactgaccgtgtacatatatccgtgttggatgtataggccgggtttcaatccatcatccaaaaaaacatatactacactgacattcagtttaatttctttcctttataacttacatggtatatattactgttttataaactacactgacacacataaatttgtacaattggatcaggacatggagccttgtagatcaagcagcttgcaagtatccagccatgaactgagcagccctagcctcgagttcacgctaggaagaccgagctggcacagcatagatcatgactagctagctagcaagctcttgcttgcttgcttgctatatatatggacccatgcattgcacattcagatatactgtttatgaccatactcagatcgatacctgcgtcgccgcgatatcagcaatgcgcgatgaaacaagacatggatgaaaaaaaattaattaggagtggtttgtttgttttgtcgaaacaacacgatagtcccctctttcactttgctctcttttttcttagtttttcattacatttttgtatttattctcaatgtgtaagtgcagtagattatattctcatgcactacatgacactaggggtgcttgaaagttgtaatgcctctttgcaacttggtgaccggtgtaatgtatcatttgcacatgaaaaaaaaacagagaaaatatctaacctgacaatgattatattcttcttgtgatgcatatatataagtatgtgtcttctccagtctctacctagcttcaactctctacttgttccacctagccgattatacgtgttctggttttttttttcaaatacatgtggtggtaaagttgtaagaattacttcatatatcagggttcaaatattgatgcctattatttaaaaaaaaaggtggtgtatgcccatagttgccaaacatatgtaacagatttagaatgtaagtgactgcatcataaaaaccgatatatgttgatcataatttagcagagcaacaaggactatgtacggcccgttctaacttcataaagatatagatttttcctcgttttccgttagtacgcttttcaaactactaaacggtgtattttatgcgaaaactttacatatataagttactctaaaatatcaaataaatccattttccaagtttgtaataattaaaacttaattaatcatgcgttaatgactttctcgttttgcgtgcccgcttttaatcttcatctatagaagattcaaatggggccatactgcgctataactagtctatatatattgtcatgtgacaactcggattattgccaccaaatccagatctatatttctagtctttaattatgtccttaatttaagattagttggaatggtgtggcacacataacaaaacgtaagccacatccaactgttattattgacagggtacatatatataactagatgacaccttgcgctttgtcgtgggatatatgaatgaaagtgtgttgaatgttgtataaatgattggtgaatttggattgaaataatttgaaaaatgatttgaggatgatgatttagcgtgtgtgtatacatttgagtttagaatgtaataaaattgtaaatataattactatgcttgcatgttgagctttaggtgtttagtagattgatgtggcatgcttacatggtaagttttaaaagtactaataaataatgcttgcatgttgagattgagatgtctggtgggttctaactttatatgaggtcaagattagcaaaggcaagatttttgccacctcacaataaatatgtgtgtagttgggcagccatttaattaactagtttttcacatatatattattgctattttattccttttcaactagggcttgtgcaagtaagtgttactatcgttaagaggttgtcatacaattatgcacacggtggtcaataagttagatacgtacgggtctctaatgaagtagtataaaagctagatccaattggatatataatataataatacaaaatgggacctggtctgaggtttgaagggatgtcggtgttgttcatctaaagcctagtgggaagatcgatcatgatatgagaacacctaaattggttttctaaataatatagtcaagctagcttctaatttaattagacccatcatgcatgataacgtgtattaatgtcagtggtgtttcaagtgataaaacttttaaaaattgcaacaatatatttttaaatatgtagattagatgtgtgaaaatcatgtttatgtgtgttgattacctcgtaaaggtttttcaaatgatcaaacttttaaaaatcatatcaatatatttgttaacacatttagattcaatgtgcgaaaatcatatatacatgttgatttacctcgaaaacactttcacaatattatactttatcaggtttttaaatgttttacgattgaaattaaggattaaggtctgtatttcggagacatctatgtctatgtcctaaacttatgaccgaagcctgaaggagtattttcttgagaaatatgtgtgtagtatacttagttctcaatctaaatttaggaaaagagtacttactacctctaatatatttggaatttactaaggtattccttgtagctaatagtaccatctttccaaaaaggaatattggctacaaccatacatgattttaagtttacttgtggattgaaatgcatgatgatttattttagatctttacagtaagataaaaattcactgatgttgaaagcaggcaggaccatatatactactgtacatatatcgacagctatgtgttgtcaacaacaaagtagttacagtaacacattacttgcaagaaagaatataatgtagtactacacatactatacattgtttccaggcaacaatggtatagaactgttccaagctagggggaaaaaataacactgaaacatgagtaccagctagcagaggagaaaataaaaaataaacaaaaaacaaataaaaaagaaagaaacagctccaatcataaagcaatggattgcaaaatcattcagtggtccaatgcatgtccccacaaacgatgtcattcacaatgcttactttgtcggcccttttgctcagtatctgacaaaggagagggccaaaaaaaaaagagaaaaatgtttgcaaaaagaaggaaaagcatgggttgtagtactactaccaccagtacatgtacaccatcaaggaaaaataaataaaataaaaaaatgtgacaaatgcatgtcctgtgtaacatccctgtgtgcatttaaatgatttgtccggtgtgtcaaggctgttttctctctccgtggcactgtgcgtgtgcagtacagcgtctgggggcgctacgatgagatatgctactagtacatgtttcgaattggccatttatttgcatgggggccttttggcaccgtgcagatgggtagttgcactgatttggaccactgtctagtctactgctgcccattcatgtctgtgtaacctacagctaatcatatctaaataatggttcctaagttgattgcaacgggattgaagaagtccactggttttgtaacgttgaactttactttacgggaacatatcctatcctatttacacgagcttcctgtgcacaatccgtgcacaccacctagcaaatgtcatagaaaattgtaaaaaaaattggacgcatacttctaatagtattaaaccaacctatgaaatcttaacttcaaattcattatattttagctgtaacaaaaaggataaaattctgacagatttttacgataaaaactgtcagatttttcacttttttgttacggataaaatataatgaatttgaatatgagactttgcatatatgtgtaatactattaggagtatgtgtctattttttttctagaattttctgtgatatttgctagttggtgtgtatggagtgtgcactggaagcttatgtgcataggatatattcccgaactttaccaacggtgtttaaggggaaggtggcaaccagggctaaccatcaacggcaatgacgacgatgagctcctcacctatcctttgccgtcgctgacaattccctgtctttagtagagaatctatggatgaaggttatggttttgggtaggagtacgacagagggcaacgaggcgggggggggggggggggtgttgctgaagccccgtgatggaggtcagcagtgggtagggctgacaacaatagcgcgagggaagccgtggagttaagaggcgacagtcagcaatggtgaatattctggcggctgagctgctagagacaaggaagagggcgatgcgggggaatggcaccattgccagcttatgaaggaagagagagggggaggcagagaagggggacggggaataaggttggtctggcaggctttgacggcaccgttgatggcttccgacgaggtcgggcaatggcgcgcttgagcagtggcggagatgggaattgattgggaggtgtcaggagttgggaagaggataaggatagggctgcacgattgaagatatcttagccgtctaaatttgaaccttttttttattctttcattcaactgaaatgaagagtcccttttccaaaatctaaaagtcaattatggacttctcaaacaattagtttaggtgaaggggaaagtgaacagcttaaaaaaactgaatgttgagtaatgtttgtttagtagttccattttcaggttttgagaaaagttaatgttataaagtaaccttttgtcttgtatgggatactgtaattaatattttatttttttgccaaggaaatgtacgtaataatcttgtttttgttgccccatgaaactatggcgaatatttttacggtaggcttgaccattttatttttcaaataatccactatgtaaatattgtacactcgtggatgatctcttattatatatatagcttgcatatgtgcggtggtgtgtctctttcttgttgtctaaaattaaaaagatagaggaactatttgattcacatggatgctactctatgaacaactgtttgtcctaaaatatacaaatttaatatgttatttgtataattattttattactattactgtgttcaaccaattcatagaattaattaaggcgtgcatttcttatttatatatatatatatatataggacactcatatggggcaccatggtgcccgggcaccatggtttcaaatgcacaaaattactcaaatttttcaaaaattttaaattgtgagtatatacctagttataagaattcgattcatacatatatctatcaacaaaacaactcaaatttaactttatttcacaattcatgattacatacctaactaattatatgtatggatgctatatacctagaatcaaaatctaacaaaaacaagttcaaattcagttcaaacttgctttgaactagttagtaaagtagttaatgttaatacctaaataattgaaaaagtttcatactcatttgaattggttatatactcaatttcaacaatggtgcccgggcaccatggagcaccaaacaaatttactatatatatatatatatatatatatatatatatatatatatatatatatgtcggtggtcggtggttgctacttccagccgcgggggccggtgttaaaccgctacatcccctgcgtcctccgcaagaagtgggacgactggaagagcgactggttctacacccccctcgccaacgaagcacgcctccaacttccaagccagcccccggcgcagttctccagctggcgggcgccggtagatctgggggaggactacgacgccgtcctcgaccgcctggcgggcctgcgatcccaggggctcaccggggccatggtgtacggcgattacctccgtcgccggattgcgccgctccaacggcgcgcccggagcgcctgggagtacaccgggcccgaagattacatgcggacccaccagggagccagatgggattgggctcctgaggacttcaagatcgtggtccaaagggtgctgaatctcagctccgtggaggcgtctcgcattcctcaggagatcctccccctctgcagcgatcccgaccgtgcctccattctaaccattatgatgggggtcggggcctcagaggagagaactcctaaggaccacgatggcgcgggcgagagccgccgggggaaacaatctgccccaggagggggtcgtgcttctgggccccgcgtcgggggcccggggagcaaccgccctgccgacgcccaggggaagaggaagctgggaggaacacctcccccatctcctccccgagggggcggggcggtgcgtgccagtagtcggcgcccggagggggtcgcgccgaccttgcagcccgagggggagcgcaagaagaagcggctccgcaagatgggggagacggaaccatcccggggaaacctgatttcccctccaaggtggtcatttaaccgaccccctcgcaggttcgtcccattctcattgcgaccgtctttcttctatcccattaagcaagttttctcttacccatcttgtttgtcttctggttttttattctgcttcagcgatgccccgtcacattccccccgccaccccaagtccggccagtccgaggccgaagatccagcggccgcagaggagcggaggcgagaatctgaccggcgtgaagccgcagatcgccttcgggaagctgaagaggccgcccgggaggccgcccgggttcgccaggcggaggaagctgctcgggaggaggccgcccgggctcgccaggctgaggaagctgctaaggaggaggccgaccgggctcgccaggctgaggcgacagctgctgctggcgcgtcacttgggcccactccctcgggcggccctcaggcgacatcctccgaggcggctcgcgacgaggccgcgggcgcatcgcctgggcctacctcaccgggcgacgcccaggaccaaacgggcccgggggacatccccgagcccagcgcatcctccggggggccaagccgcgtcgcattttctccaaggcggctcttctcctcatcttctgtcgccccgctgagcgccgagccccttctgtaggccctggccgccgcaaacaccgcagtgctggatgggttcaacgcccaagtggaggccctgcgtgcggaacgagcggagctcgaggccgcatgggcgcgtgttgaggaggggcggcgctcggtggacgccatggtggaggtgggccgtaaggctcaccgccgtcatgtctcggagcttaaagcccggaaagcggcactggcggagatcgcccgtgaggtggaggaggagcgggcggccgccctcatctctaccaccgcgatggtcgaggcgcaagacaccctccgccttcagcacgcaagctgggaggcggagctgaagaaaaagctcgacgccgcccaaggggtccttgactccgccgctgcccgagagcggcgggtaacggagactgaagcggcgtctcggcggcgcgaggaggcccttgaggcccgtgccatggcgctggaagaacacgccggcgccgtggagaggggcttgacggaccgcgaggccgccgctggtctccgagaggcgacgctggcggcgcatgaggccgcctgcgccgaggaggagtccgcgctccgcctccgcgaggatgcactcgctgagcgggagcgagctctcgaggaggccgaggccacgacgcaacggctggcggacagcctgtccctccgcgaggcagcgcaggaggagcaggcgcgccgcaatctggaatgcgtccgcgccgagagagccgcactggagcagcgggctgccgacctcgaggcgcgggagaaagagctggacgcaagggcgcgcgtcggtggggcggctgcgggcgaaagcgacttagccgctcgcctcgcggctgccgaacacaccgtcgctgacatgcagcgcgcactagattcctccatcggggaggccgaggccctccgcttggcgggcgagatggggcccgacatgctttgggactcggtctcccgcatggatcgcgccggtcggcaagcgggcctctggaaaggccagacgaggatgcgccccatcaatctggaaggcctcgctccgcacctcaacaggatggcctgggtcctcgaacgactccccgaggagctcgagaagaccatcaagtcatcctcgagggacctcgcccggggggcggtcgaactcgtgctagcgagttaccaggcccgggaccccaatttctctccctggatggcgctggaggagttccctcccgggaccgaggacgacgcgcgcgcgcgcgtccgggatgccgccgaccacatcgtcaacggcttcgagggctcggcccctcggcccgcgttcgcccccaactccgacgaggagggcaacaccagcagtgcagacgatggtggtgacgaggccgtcgactcgggcgcgtcggaatgagcccccaagcccccgccaatctttacttttttctttttctttcttctaaggccttcatgcctcttttgtgtacaaattaacttaatctgcaatcagaaatgacgaaaaaatttttgtgttagttttattttgctatacatacgcgatgaggatgatctgtgccatggtccttttgcgccttagcttgaaataagggctcgtgcccaagtcccagtcctcgaatggctcgggtcggggctagtgcctggggagatccacatgtcgagactggccaggccgggaacgtggtgaccgaggggtatgggtgacccgattgtgggtttttgccgattcccccccggagttcaccacgccccggggcacggctcggttctgggccccgtttggcgattttagctgaccgaaccgaacccccgagggcaaggttgagtacgagtgaccttattttaagtcaagattcttcaaaaggaaagaacagcacagacacaacctttaggaaattgaaactgcttctattgaaatgttgaaaaaagagaaataagaatgtaatgcatgtgtggtagcccccggccaaccctgcacacccgaggggggtgcggggttggcctgagccaaaacctgacacccgaccccccccccctcctcaggggtagaagcgacgaaggtgttcgatgttccatgggttaggcagctccgtgccgtcgcccgtggccagccgtaccgagcccggccgggggacaccgatcactcgatacggaccctcccacattggtgagagtttgctcaatccagcacgcgtttggacgcggcgtaggacgaggtcgtcgacgcagagtgatcgggcccggacgtggcgctgatggtagcgccgcaagctctgctggtagcgcgcggctcggagggccgcgcgccgccttcgctcttctaagtggtcgaggtcatctctgcgaagctgatcttgatcagcctcgcagtacatggtggcccgaggagacctcagggtgagctcggatgggagaaccgcttctgcgccgtagacgaggaagaaaggcgtttccccggtcgctcggcttggtgtggttcggtttgcccagagcaccgctggcaactcctcgatccatgaatcgccgtgcttcttgagaatattgaaggtcttggttttaaggcctttgaggatttctgcattggcgcgctccacttggccattgcttctggggtgggcaggtgaggcgaagcagagcttgatgcccatgtcttcgcagtagtcgccgaagagttcactagtgaattgggtgccattatccgtaataatacggttaggtactccaaaacgggccgtgatgcccttaatgaatttaagagcagagtgcttatcgatcttgacaaccggataagcctcgggccacttagtgaacttgtcgatcgcaacatacagatactcaaacccgcccggggcccgtttgaacggtcccaggatatcaagcccccagatagcaaatggccatgacagtggtatgatctgcagggcctgggccggctgatggatttgcttggcgtggaactgacacgctctgcatcgccggaccagatcgactgcatcattgagagctgtcggccaataaaatccttgacgaaaggccttgcccaccagggtgcgcgaggcggaatgggctccgcactcgccctcatggatgtcaacaagaagctcaacgccttgttcctgaggaatgcacttcagaaggattccgttagccgcgcgccgatagagggtcccttctaccagcacatagcgtttggaaatgcgttggacgcgttcactcccttcgcggtcctcaggtagagtcttatctgtgaggtatgcttggatctcagagatccacgcaatcaatctaagggagcttgaagcgctcccttcgggtcccgaggcctggactccgacgggcctcgggggccggtcaggcgtatccgtttcccctaaggggtcgggtcgcgccgacggctgggtaagcctttcttcaaaggcgcccggtggggtttgggctcgcgaggacgcgagccttgagagttcgtcggcaaccacgttgtcccgtctgggtacatgccgaagctctatcccatcaaaatggcgctccatacgccgcacttggcgtacgtaggcgtccatctgtgggtcggagcaccggtactccttacagacctggttaacgaccagctgggagtcgcctaacaccaagaggcggcggatccccagtccagctgctactctgagtccggcaaggagtccctcgtactctgtcatattattagtcgctcgaaagtcgagacggaccaagtatctgaggacgtctccgtttggagaggtcaacgtgacccctgcaccggcgccctgaagagacagagaaccgtcgaattgcatcacccagtgggcggcgtgaggcagctgtgaggggtccgcgctggcctcggggattgagacggtctctggagccggagtccactctgccacaaaatcggcgagggcttggctcttgatagcgtggcgtggttcaaagtgcagatcgaactcagaaagctcgattgcccattttaccacccgtccggtaccttctcgattatgcaagatttggccgagggggtaggacgtaaccacagtgacccgatgcgcttggaaataatggcgcagtttcctcgaggccatcagaatagcgtaaagcatcttctgggcctgagggtatcgggttttggcgtcccggagggcctcactaacaaagtaaacaggccgctgcacctttcggcggggccgatcctcttcgctaggggccgtatccccggggtgctcttcgtccaagtggcctctcggggcacactcgtctcctgcgctgatgacctcggggtccgaagatgacaggtgcggccttcccacagtggcctcggggccgtcctgggggtcgggggctcctggcgtcgtcagacaagcgggcaaagggccagctccggtcgtcaggggcctcaggcctccgttcggctcgggggcctcttctccctgctctctcccgggtcgaatcagcacagggttagcctcggggtcaaagggtggtaggtgcggccttcccgcagtggcctcggggccttcctgagggtcgggggcacccagcaccgtctgacaagcgggcagagggccgactccggtcgtcgggggccttaggccaccgttcgactcgggggcctctcctccctgcctgctcccgggccaagtcggcacagagtgggggtgcgtagaatgaggattgtcctcatcgcgctccactaccaacgctgcactaactacttggggggtcgctgctaagtaaagtagcagggactcatttggctccggggcgactagaaccggaggagagctgagatacgccttcaactgggcgagggcattttcagcttcctccgtccaagtaaacggccccgagcgcttgaggagcttaaataagggtagcgccttctctcccagcctcgatataaaacgacttagggcggccatgcaaccagtgacgcactgcacatccctaagtttgctgggggggcgcatccgctctatagctcgtatcttctcggggttggcctcaatgcctcgggcagagaccaagaacccgagaagcttgcccgcaggcacaccaaacacgcacttatcggggttcagttttatgcgggcggagcggagattttcaaaagtttccgctagatctgagagtaaggtctcttggttgcgcgtctttacaaccaagtcatcgacatacgcctcaacattacgtcctatttggctacccaaagaaattcgagtagtacgttgaaaagtaggacctgcattctttaacccgaagggcattgaggtataacaaaaggttcctacgggggtaatgaacgcagttttctcctcatcctccctagccatgcgaatctgatggtaaccagagtatgcatctagaaaacacaaaaggtcgcaccccgcagtggaatcgacgatctgatctatgcgaggcagggggtaaggatccttaggacatgccttgttaaggtcggtgtagtcgatgcacatccgaagcttgccgttcgccttgggaacgaccaccgggttcgccagccactccggatggatgacttcacggatgaatccggcctccagaagtctcgccacctcctcgcggatgaaggcttgacgttccggggcctgccgccgcactttctgccggaccggccttgcgcccggccgcacggcgagacggtgctcaatcaactccctggggaccccgggcatgtccgctggtctccatgcgaagacgtcagcgtttgcccgcaggaaggagacgagcgcgtcttcctatttgccatccagaagaccaccgatccgtgtggtcttggatgggccgtcgcccaaggcaacctccttgaccgggacctcgtcgcatgtggcaatccgctgcctcggggcggtgggggcggaggtgccaagcctctcgtcaccaccctcgggcttggtcgcagcagcgaggtggtccgcgcgctgctccatgcaagcgagcgcgactttaaggtcgccacggacagagatggggccacaagggcccggcatcttcatctggaggtaggcgtagtggaccgccgccataaacttcaccaacgcgggcctccccaggaccgcgttgtagggcagactgaggtccgccacatcgaagttcacccgctccgtgcgaaagtttgctgatccaccaaaggtgaccggtaggtcgatgtggcctaacggccatgtgtgccccggcgtcacaccaatgatcggttgagacggctggagaaccatccccggggccttgatagcatcaaaggccgcgggggaaaggatgttgagagccgctcctccatctatgaggacacgccccaacttcacattgcagatggtgggggaaaccaccatcgcaatctgccctccccgggcaaacacaccgagaaggcctctttggaacactaggaaagacaaaacacagcatttaatttctgtatgatcatactcacacatgtacagaacctatgactgtaaacacataaatgagaaaaatgtaggtataactgtctggatggtccacatgaaaaatacaacaattagattaggtgatatattgtaaattaaaggagatttctttgaaaacattggaccccatgctaacttatttccttgaaaaaaaatatatatgcagtaggcaatttcaaaggaatcctttgaaaggattttctataggatttgatcctacaaaattccctccaaatactttgttccaaaaggggcatttagttacgtatttgatccactggaccatgtttgaaaaaaataaatcctagatgtgtttgtactgtgttcaaaagaatctaaaatcgttcttgggtagttaagggtttagctgggttttaaggtttaacttgaagtacgggtactatatagtaacaattcaccaacagattacgttagatcatagtattagtgtattagtagtatgtacttcctccgttttctaataaatgacgccgttgactttttctcacatgtttgaccattcgtcttattcaaaagttttattcaaatgtataagatataaatcacacttaaaatactatgagtgataaaacaactcataacaaaataaattgtaattacgtaaattttttgaataagacgaatggttaaacatagaaaaagttaacggcgttatctattaaaaaacggatgtagtaataggagagtattaatttgctgatcatgcatgtattgcgtacgtacggtaataattaatggtcgagaatattaacaagtactcctacaaattactgaatttaaaagtacaaacaactacaagttaccagaggagagaggacatatatgtatatatatatatacacgtacccagaagcatgtacagtcgcgtacgtacggttgcgttcgtacacgtatgatcgctaattgatgtgagcactgtagctcagcaagtacatgcgcgaaataattaaacatgcttaaaatgtactccctccgttaataatacacggattttgagtttttacttgcaacgtttgaccactcatcttatttaaaaaattttaaaattattatttattttatttgtgacttaatttattatctacagtattttaagcacaactttttgttttttatatttgcaaaaaaaaattaaataagacgagtgattaaacgttgtaagaaaaactcaaaatcctttatattatggggacggagggagtagtaacattgagctagcgagctagaggtactagcagcttcaaggaaatccaggagtaactctatggagatgttgccaatatgactctcatgtttaaaatgactccctatattattttcataatggttttcactgaagtgaagcccacatgatatcctaatcaccaaaaaaccggagaaaggagagaaggaggatatgacatatgagtcccactctactttttaatttccgagatgattggaatgagtgaaaactgactaaaaacaaccgagagagtcgttttgaatggctttaatagttgaaggggtagatatacctggtttttcagttgaaggatatgaattaaatccaacctacaccctctatctttactattataaaaatgaaagatgtttttaccggtattttggtacgtcatccgtgtttaagtcggtttttaagtttgttcgcttttggaaacacatatccgtgtttgagtcaaattttaaattcgtttgattttaaaaatacaaaatgaatcgtataagaaatctctttaaaaaaactcgcatgctaacttaagatgaatatcggactcctaattgcagcttatggttttccaaaaagtatatccaaacgaatttcaccctagctaaaccgtataataataataatattaaaatagccttgatccgtcagaactcacgaacatttactttctagtcttataaaaaaaatcaatttctagatgaacctaaacaagcatgtatccaagttcatcccccaaaagttatctatttttaggatagagggagtgcaataagtaggaacttaggcccttcacagtgctccaccctggagcgttccttcgtcccaccacgtagacttcgtgatgtcatggaggagagaatgtgtgggcccgagttcctccgcatgattgctcggttccttggtgagcaacgagttcctcataaaaaagcctgcaaaaaggtctgaagcatgcacaaaaccatcggaaagaggcgaggaagagcatgaggaggagaacgggaagagtctgggtcacgcgtctggctcgccacttccccaccgccgaggccgccgcgctcgcctacgacgacgccacaagccaccaccgccgccgcgctcgcctacgacagtgtcgcgagcgcagcggcgcacgacgacgctgcaagccgccgtcgtcgcgtcccacccggtgatcgtcgggctcgccagggaggtcgccggcgagtgccgtgggctgccactcacgctcatcaccatcagcatggaggaggagaacgccggcatgctgtaggaccgagatgtcgactagaggagggtgaataggcgatttaaaaactaaatgacacctaatcaaaactaacctaagttgctaggctcggtgagggttaagtctaactaagcaactaagttatgttttgcaaacctagggtgatagtggctcaattaattctctaggaaagtaaattacactcctatgtcaatgttttgcaatcctagggtgatatgatctcaagaaagtctctaggaatgtaaattgcacaaatgtaaatgcgacaatcaaatgagacaaggagacaagagatttttcaccgaggttcggaaactcgccggtttcctattccccgttgaggcgagcccaactccaccgctcaaccacgaagccaccgcacgcctccttcgtcaaggggtgggcaaggcgggagccgacccacggagaggactacccaagcctcgatcactcggggtagttcttccttcactccgaagttggtgaactccaaaccacccacaaaccggcaccgggcctcctccacaatcttctcggagaagtcaccgggcaactcctccagaagccatctaggaggcggcaacctccaagagtaacaagcaatgacccggcgtagagatgatcaatcaagtgccacactagctctacaaatggaagcaatgcacttgactcttggctagaacaacctcaaccactacaatggatgaacactaagctaaaaggtgtgtgagagagatgcaaggggtgtatgcaattgaattgggtgccgaaagagagcccccttgctgctggagggggagtatttatactcccaccaaccaaaactagccgttgggggcgaaatcccccaactctgtgtgctgctggtttgaccggaggtatgaggccggtcagcccgtgctactctgcaacggctagaaaactagccgttgtagccctgtcagagggcccaatcggcctggccggtcagaccgacatggggtggccagtcagaccgccctcaacttggtctgaccgaatacggctccgtcggctctatatcggccaccccgagcaacaccatcccggccttcagggggccggtctgaccgcacaagtgccgtcggtcagaccgaccttgtgcgccggtcagactgcccgcttggggccggtcagaccggccagggaccgccggtcagaccgccacaaggtggccggtctgaccgcccttggtcaggccgaaaaccagtgaatacaaggtgttagtgtgtgttgtgtgaaatgtgagcacaagtctaaatgcataatgacctaatgtggcaattaaaatcatctctttgctagatcattacccctcttaatagtacgtcgaaactaaaaataaactagcaaatttgatcgccctacacctcgattaattcaaaacaaaagcactagttttaccgtcttttttccctttactttgcgccgtcaattttaatccatcgataatcatccatgcgcacatatgacgtgaacctaacttaaaatatatagctcaaagacaacggttagtccacaattagtgcttgtcattaattaccaaaattaacaacgggggactagatgcttcacatgcaggacccgctacctcgccacgcgcgcagctgtcccgccatcgaggtcgccgccgtctgccctcgacaaggagaggaatgggcgggcggagaagctcgccggctcgatggggaaagcgtagagaaggagaggagctcgaggtcgaggccgcgtccgagctcgctgttgtcgccttgatccagtgagcctaggccagatctggctgcttagcctggcgtcgtcgccgtcgccgctcgggccaccgctccgcccggcttcaagaggaagacgaggtcgcgtggctcggtcgacagcgacctccgcgaggacgaccgtgccgccgcttgtcgtccgcgaggaagacgaggtcgcgcagcgacctccgcgaggaagaccccgccgagagtccgtcgttgcagagggggtagggggagggaggcgccggtgcggcgtctgtggcatccagcctcgatgatgagaggcaccggcgtcttcgcatccttgcccgccatccttgccccttgccgcttgccgtcctggtttgggaatgcgaggagagaggatagagagagaggggaggagagatgatggatgtgaaaagagagatgggtgggacccactaacatgtattgcttaagacacatgcactgtaaagtgtggttctttacccggttcgttgtctagctggaggctttgagctcctcatgtgcgttacccgcactgtgaccggccttatattagacattttgctcacacatatacagcagacaaagcccaagagcatcatcgattcatcgtcatcccgggatacccatacgagatgggtctcaaacgacccatgggacataaatctcatccagcccaatcccagcccaactcgcgagcccgtcacgtcacgcttcgcacccaccagtccacctcctcctcctcctcctcttccgcaccgcgccgccccgtcgccggccgcaaccaccaccaccactcgccgtcgcctccgccccccgcacgcgctcctcccctcccctcccctcccctcccctctccccggccgcgccgctcgccggatctctcccctcctcccttccaggaaccccagccaagcaggtagcgtgtgacgggggaagggggggatggggctctcgtcggcggcggcgggggaggggccgcagctgtgcgtgttcgacctgaggcgggggcagcaggaggggcaggagctcgacaagatcctcttcttccaccccaccgactgccccatcctcctccagctctccgtcatcggcctctgcgaggggatcatcaccttcgctaggtttgcagttttgctccacccccttctcactcgcatccccctcctgttcgtgctgctgcttggctcctcgcgcaggttggagctcttagcttattcggtcggagctttgttgctcgtggaggttagttgtttaggaacgatttgtagcacttagttgcgtggacgagcggaattccaacgaccttgaagctcatgggatttcaggcgaaggggtttatatgggaaaattctggcgtgttgattgtaatcggagttggaggtgaatgaatttggttcatcagggtgagatccttatgggggataattctggcgtgttgattgtaattggagtccgaggtgaatgtatttggttcgttaggatgagatccttcttagatccccatagaacttaacttttatctgcttcgagatagtatagtcagacatactacccgttctgttcttgaatccaaattaggtgcagtttcactgcttgttgctccttatttcagaatccgatttttaaattatttcacaaaattgtagtatatgtaactaggggcaaaatttgcctgttattttaatttttgcttttagttccaaccataagcactttctcgcgactggtgcttctgcacttataccttttgcttttatctgttggcttatctatctaaatattattcctgtgcagaatattttctcctgatgatgattgtgaggtgatagaatcagagaaacactcccatgttttttaccaagctgaagcagatatatggatggttctggtaatggctgttcttacattaacagttcatcactatttgttataaaccaaattgttgtactctagagcctcttcaattgggtgtagttaaaaacagcatgtaacctttgtctgtcacctattgtcattgaacaatatttactggaaatcctgaaaacattcaagaaccaagagtatttctagtctgccaccaaagtaaattctgtaacgagaacatgggcgttcatactcaagcatactatgccttcagtctcgcagatagtataatgaccattttggatttctttatttttaactgaagaagctatgagtttgcttcataacacttgttcctttcccagcaaattgtctgtaaatctttttttgcacttataacttgaatgattatcatactcatttccagtgaaaacttgttcatgcataggtagtggagaaaaacaaggacattgagtcaacttggcggtgtggtgcattgcaaggaattcttaaagaggttcactcgcttttcacaatgttccacggaccaattcgaactttacttgacaggcaacccagtgcagaacttgcccgtggtcaccttcgcacatttttcacagattatttaagtggtgagtctcgtttccattcatattgtgtataacatgagcgcaacattgccctttaaagaaatatacatttggtcttcatgaacatgttcttgagcagattttaatgctggtaaaaagatacaattgccaaccttccgtgattgcctaaaggagcgaggaactgtccaaatgctaacaatctcacgagaagtggcacttgaagttcaggtaggaaatgtactcttcaaacatgaaagacctcctagttacagaaatataactgtagtaccttttgatcttttcagggtacatgatagttgtctcttgcttttataattattgcttgtgtgaaatatgttatttttcttgctagcggcctgttatttatgtcctgtccagagttgtagtctggttttcagattatgagatcggcgttttcttgagggtctagtagtcattttcgaaggtagctaatgatgttataggcttaaaaacggttgctctgttgtacttgtaggagtatgtacttatgcagaagcctgctttccgagggggagaacttttggaatcaactctcacaacttaactacccctagatagctattgtctcactgttatagtgttatgaagctgtgcttaaagtactgtctaaagtcatcttgactctgataattacatagatttgttttctctgtttcaactattgatgcatgaatatttgcagtcactcaccacagttcttgggtcatgtcttggaaatgtcatgtgccaatcacttgtattatttgaagatctcttggtgtccacaacacttccaccggtacggggtctccctttaatcatcacttcttttataactttgttttctttgatggctttgagcagttcccatgtgattaatgtagttttaccactttgtaggatgatacactaaacctatatacttatgctatcttgaggttaactcctcgtgctttattgtccaatgcaacttcctggtcctatctgcggaaaggaacttcggttcatgctggccccacttctagttcatcaaatggaacagcttcagtagaaaggtatcgtagtcgatctcgtgatacttctcctggtggacaaaatcagatgcatcattatttcaggcctctccagcgtgagaaactatacaaaggaaaggatggttttgttgccgctggttccactacttcagaagttcgtggtgctgtggcttgggttcccatactgtggttccagcaggcagaagaccgcatgcatctctgtgtttatcagcacaagaacataaccattctgctactgattccagcttcatctctaataaatggagatgatggcattgctcatgtgaagagacatcttcttgaaaatgtgagtggcccttgcataatttccacccttttcatgatttcttgatgcggtactgagctcaagcaggccatgttgaatgaaaataagaaatattctcatgtctggtgtggcttgcaaaatattgatactgtggttgtgaacacatgctcatttttttatatttatattgcaggcatcacagaacattgtgactctggagctgaaattatcacgaggatggggaggagaaaatgcttatcatgttggtggatatcgctacttacttgttgatccagatagaaaagtatcaagagcctccccacctgggaaagtcaccaccctctcaaaggtttgttctgttgcatacttgcatatagagtaaacatacgatgtttcctacaatatgtgttaatggttctgttcttctcttcacctcaatatttccataaattttagatcctaaagattgttaatgttggtctgtttttgtagactaatatgttttagatgatcaattcgtatctcctgttcatttcttcctcactattgttcttcggttgcaattttacgtttttgtgttgaattggattgccatgcatttcttttaaccgtgctctgcaatgaaatcatgcaggattctctactttccttgaatagactaagagaagaaatagatttggagaagtcaagggccaagaggtctgactcttgtcatgacaaggattttgaagtatgcatcagagccaaaaataatgcatgggtcattgctaaagttacccgaggaagagaactttatatggcgttagagaaggctggtgaaacacttctttatgcatctactgccatcgagaagtttagcaacaggtatatttactcaataccttgtaaggtcatgttcggtaaatccctaggtggggggaatggaggggatttattccacacctattgtgatgtggaattattccctctcaatcccctccgatcctcttcaatccccatcaaactgaataaggcctaaaggggcagaagcatatcttaccacattatatgaccagctttggtttactgtgaccacttgagttataattccactgtcatgcattaaccgcctaaacgtggtatatctcaatatcttgtaaaggggcagaagcatatcttaccacattatatgaccagctttggttactttgatcacctgagttataatagttccattatcacgcattggcctaaccgcgtaaacatgctttcgatttttctaacgattgccttcctctctcaggtactgtgaaggagcattctctacagactagaacaccgaaatgacaacgattgttttatccaaaccactcacctatccagcttcgtcatttaggctgtgcggctcgctccctcatggtgtcgtgaatatggatcttgttattttgaagagattcgtacatgttgtacagctgccatgttgttgcctttctatgcatacaaaacaaatagcttcgtcagagaacaatacagcgcaggaaacagtcagtttcccctgccctgcgctccgacgtccttccagttccagattcgaccatcttaatttgtttgttgtatattctgacgatggacctgctgacttatgtagtagttcattcgattgcttcgatatctatgtttcaattcagtttgttgttgtgatttgcgtaacttatacccagagtgattgatttcctgggggatttgaagatgtgccagaaagaacgtgggatgctcaccgggaagagatcatgagaatggttagaaaactataggtaagatgagattctttggacacagtaaagccgagtgttcagagacaaagataggaaataaacatgttgatgaaaaaagaatcaatacaaaccaaaaaatagctgattgcttgaaagcgttcatagagaaacgtaatgatgaaaatcaatacaaaaaaaatggcaaaaatattctacaaaaccgattgctcatccggggaatcgaaccccggtcagtaccgtgggagggtactatgataccactacaccagatgcgctttctgtcatcgttctgaaaatttaggtatatgatgatataatttcccggtgagcgaacgaagataactgagggctttgatcactttcttatcaaaatcaacgttactaaaattttgtaatatcaaatttcgatatattttaatgttatcgaatttttgtagtgttgattgtatttgtcttaaagtcttaccaatttttcatagagtatctaggagagaatctttcgaaattaccaacatttaagtagggtacaaatggtaaagttatatttaactttttttaattacccatatatacggcatgtttggttggagggagttttaaaagggattgagagtttagagggatgatactattaagtgttttgtttggaacttcctccttttcaatatctggtaggggtaggtaattgggaaggaattcctcatttactttatctaagcaaatatcaattatccgtttttattaatgatctaatctctaactaaactccctatcaatttccatcacctctaccaaataagatattgagattaaaaattaaattcacatcttaatcttatcatcaattcactcatataaatttccaatcctcttcgctcaaattccaaacaacaagctatgagcgctgggggcgtctatgggagcagtcacctaacatgtggaccctatatcgccacgtcctaattaacccaggcggccaggtgggccccacgcctaggccaaaacccacttacatctgggccccaccctcgcctctcccggcgcgcgaaaccagaccatcgcaccgtccaccaccagtctcgtagcatcgtggcgccgcaccgcgccgtctccctctctctctctctctctctcttccccttcctcccctgaaacctaacgcgccaccgccaccgccgccgccgcctccctctcccaaatcttcgccgggaatcgcgacgatcaagccacgaggatcgctgctgctgctgcagcagctttgcctgtgcttaacgcccaggtataatgcggaccaggagccagcgcgacggccaccacgccgccgccgctgccgaaaccccgccttccggttcgtctccgcccgcccgccgcgccgcggcgatccaccccccctcccccccccccaatcctgttcccacgaaccccgcctccgtcatcttcccaactgaaaccggtgtttgttcgtcccgcaggggcaagcggaggatcaggaggggacgttgcgaggggcggtggcacgcctcgccgtcgccggagggcttcgccggccgcggagaaagggaagtcgcccgccaaggtaaattaaattaaatcggtgtttgtgaaggactaaaggctctgtgcttgatttcctcattgcgacaagtcgagaactattttaccatctgtggcttgttcaggaacttcgggctctaaatgttccttgtggttaagcgcgattgttcgacatatgttcacattgtatgacttcaaactctctaaactagtaaattgatcaaaaatgctctgggtccttattatttattcaagtctaagttttgcactcttaaggagtgtaattgagtcggaagcatatgtcaaaaggatgccaaataattactatagaatgcattgattttgagacaaaaaaataaaccaactcgatgtgttgaatcatggataggttctggcttaggactctgaaggtttaatgatgttggtggattttaagtattactcctagctgatagggctcaactgctattgtctcttcaggtggaaatggaatcggcattggaggataaaagtaaaaacgttaaggtccatgcagagggttatgacgatgccgggatgacgaggttcggtagggatggctctgaaaagaacagtttggaggaagaagatccagatgcagctgatatggactgggaagaagggattgttttcgcggcggaacacgatgagtgttattcccatgagcttggagagacagtcaccgttgagttcactgatctaccctcttccactgaaaagaagactgctcggaggcttactgctgaagaaaaggtaaaatatttcttgagagaaattttcagttaaggcgtctgacacagatgagctcatggacatttgcattaagtttataacctgttactataagtctaattttatcgttgaaaatttttttataaaaaaattctatttgccttctaagagtttcctggcgccagctcatttgccaagttgtatgtaatgctcaggagtttcgtcacaagctttggaccatatctaaaagagtcactgccttttcctttcttgtgtgctttaaatatctttgttatctttgaattttgacctgttagttttatttctgattatccaggagttggctgaactcgtgcacagggtccatttgctttgcctactagcaaggggtagggtaattgacaaggcttgcaatgatcctctgattcaggtgcgagcattacagtggtattcattatttcatttacaccagattctgtatttctcatgttccaaaatgatgaagtggcattatgatttatgaatcatagtggttaaaacagaggtgtgtttcaaacagaattgtgtcaatattctttgaaatgttctttccaggcttcaattctctctgttttaccacaacatgtactacggaattctgtagacactccaattctgaaagctaatgaactgcgtagtcttgtgagctgggtaagtccccttcatatattattttattgactaaaaatgtgaagttttatgaaatagtagtttttagatgaaatcttttaatttgcatttatttgtctgcagttccacaacactttcagtgtaattgcacaatccgacgacaaggggtcttttaaatcaaatttggcatttgctcttcaaagttatgtaggcactgctgaagaggtatcatcttctccctgaagattatgctgtgaaacaaatctgctgtctttatttcagcaaacttatttttcttattcatgtttctcagatttggaaaacctaaaaagtgaataagagttgtcatatttcaatgccccaaaatatgttttccattgagatttgatatggattgtcaatgtctacttcatttcttttggaaaaaaaaacaatctttagttgccactgaaagttgacaccattggttatgtgccgtcaggaaacttggtctcccttcattgtcacccctaaatattgttctgttatttctattgtcgtctgcccttttaggtaaggttgccaccaacatataaaatactgtcagtttttttttctttttggggccaaaatagaaggacgagagactccagcagctcggtatgcgcatgccaagttggtggcatagagtgttccatcagtaactgtgcacaaaacaccaaaggcctaccgacatgactcttgcctatagtggtcatgagttacgcaccatgcagtaacactaccaaaggaaagcaagagatacattcacaggtcgacggtcgaccagtcttctcaccttggaacgagggagaatagggatgcattaacaagctgatcagtcctagggccatcaaacgcatggtgcaggtgtgctttctcatggcgtgaacaggtttcagtgcacaaacattgaaaccaataagcatacgaggtagaatgcgtcatgaggagtactgtgtagttgtcagtgggaatcaactatccttttgcaattccagtgaggaaatgctctgaaacaaatatggtaaaatgattgctttaggtaaagaaatatgggtatgggaacacatctttacgctgctgaaattgttcttggacccctggtgctccggttctcaatggggaagataatgatggagaggttccttgatgtcacaatggaaggaggatggagccagtgcacctggagtgaccatgactaccttgactcctttttggctggagaagatgcagaactgtcttttttttttgtggaccacttaacagcaaacttatacaggactgtcgagtggcaaataaggtaacaaaactctgaaggagtagcaatgaagggagaacttttcctatggcatataaggtataatgtcaactttcagtctttcaatggcaaataaaaaatctcctcttttgtaaaacaagacgctatttctgtttaaagctgccaaataattcgtttgcaatgcaggtttgtgcactttcagtggcattgtttagggctctcaacttaacagctaggtatggatttcactctgtaattagttttatgattgattccatccattccagaacgttagcataaaaaatccataaatcattttgcaatccattctcgtcgaatgctgtttgcttttgttccacgcaggtttataattatagtaaacagtttccatgatatgtattatatgtttaattccgtggtgaaaactggattttctgatctcttccagagaatagatttcttctttttctttgttctgataaaaaaaaagaatttgtcatattctaaagaagtggttcagtagaatggactcttaactaactttcaataaactacagtttgataaaatcctcgggtgcttgggttagaatagttgatattactcctccccagactgatttatttttttttcttcctatcgaacttcccataaagatcaaggaaatttcaattgtaagaccatctattatagttagtaaaagcgcatataaaggttcattatgttgtcctgtggttttgttcgataaccttctgaaccaattctaagtatagcttcccttctaggtttgttgcgaatctggatgttgctggtctcaagcctgacactaaatcaatggggacatcaaatcaggatgaacctaggctttgtacaaaggcgctgccatctagttcttttgttgcaggccataatgagtataataacctttcacctgtcctgtcacaaaacaatactgaaggtagcatcaatacaactccaaaacaagtcaaagttcaaggctgcaggaaaagtttgtctaaaaaattgtcgaagtgcaaggcaaatcagagagatagctctgcatcactatcaaaagatagctcatccagcagccaatatccttccacctccagtaatgctgaagtaccaagacgaaaaggggatttggaatttgagttgcagctggaaatggctcttttagcatctgcagctaaaagtcaagacaacaagctagcaactcaattaaatcagtcaactgatagcttactaagttcaactccaccattgaagaagttacgaaaaagtgaagaagcctcaagcaactcgagcgtggtttggtcgaggaatagagcaccgttattttgggctgaggtattttgtggtggcgaggcatcgtctggaagatgggtccatgttgatgttgcaaatgatattattgatggtgaacaaaaagtagaagctgcttccgctgtttgcaggaagcctttgagatatgttgttgcctttgctggaaatggtgctaaagatgtgaccagaaggtttacctctttcataattcctaacttagtagctatatagaatcatgaggatatattctttgcttttggaaatttgtaaaagaactggtttgagaactgtgttctatattttcctaggtattgcctgcaatggcacagaattgttcaggggagagtgaatcctgagtggtggaaaagtgttttggcacccctagagcgtcttgaattggcagcaacgaacaacactgaagaaatggaacttcagaccagggccttaacagagcctcttcctaccaatcaacaggcaatgcacttactgagtttacgatattggttaacttctagttatgccttttgcttctttcaaaggttgcctgttggcttttctaattatttatgtaaccataaccacttaggcctacaaagaccatcatctatatgcccttgagaagtggcttcacaagaaccaagttcttcaccccaaaggcccagtgcttggcttctgtaaagggaatcctgtttatcctagatcttgtgttcagacactgcaatcaagacatggatggttgcgggagggtctgcaagtcagagaaaatgagttgcctgcaaaggttcataatagaatcacagcgctagcagtttttttctgtcttcatgtgaagtaaccatttttctgtacacaggtcgtgacgcggccaaagaggactttcaattctcagtcaattcaatctaatagtaatagtaatgaagatgggcttaagccaaccatggaactatatggtaaatggcagctggaaccgctgcaacttccccatgcagtaaatggtattgtaccaaaggtagacctccttgattatgactattgattttcattaggtagctatcagtgcttattttgtggtgttccatgctgattaaatgctaaaatatgtccaagaatgagcgtggtcaagtcgatgtgtggtcagagaaatgtcttccgcctggtactgtacacctgaggttaccaagaatattccaggtcgcaaagagacttggaattgattttgccccagccatggttggatttgattatcgaaacacccggtgccttccagtttttgatggaattgttgtctgttccgaattcaaaaatactatcttagaggtatgctgagtacttgatttatttttcaaaattctggtcccattcatcctgctgtctacaattttagtcggatcctttatgcaatctgatgtggatgtttaattaggtaaaattattaacaatctttaacaatcacaaattagcccaaacctgttagcaccttagtcaaaagtgtgtgcttgaaaggtatttgcacactttgtaaatatttttattttgttttcttccccttgatgaaatgaaatgcagttctctcgttttcgagaaaaaaaaaggtatttgcataagcatgtttcataatagcgcttaactcattgttgagcatgtctcattataatgcactcaatgttatggaaagtagtgtaatgatcaagagtagaattgttatattcatgtatatgctagaggtagtgatggtattatagtctctaggttcctgtactctcttgcgtaacaagaactaacagggaaaattgctcagtaacactaatcactcgagttagaaaataacatcgatgtgtcactgtcatgtaggcctagggccaaagctaattctcctagtttcatcaggtacatacaaagctagctctatagttggtctaacttactcctacgctttctgccaggcatatgcagaacaagaggaacggagacaagccgaggagaggaagcaggaggaagctcaggctcttattaggtggtatcagctgctgtgttccgtcgtaaccacacagcggttgaaggactcttacaaagcaccctcatcagagcacggaccagaaggaccatcccaagatgttagtcagcagaagggcacacgcaaaagtcgaagctcggaaacgaagactcgctcaagcagactacaggcggaccgaccatttgattctccttttcctgtccatgaccatgagcatgagtatccagaggaagatcagagcttcgacgaagagacgtttgtgaggacgaaacgctgtccatgtggtttttcaatccaagttgaggaattgtagcaaaatgatatcagaaatgcactaacttaaggtgtagcctgtttttggtcccaggtgaactctcaaaactatggtagctgtgatgcttctgacgaatgcaggttttgatgcatttgtcttgagttgggagttaagagtgagtttgctaaacccatagttcagctgttgcactgaaatgaggtgttgaaagttgaagctgatggtatgaaatgtagtgggtgttaaaactgttaacagtatatgcttgtttaagtttcagcatagtgccatcacgctaagattttatcaaactaatgttgagtttgccagttatttcttttacctcttcactgctaaacttgattaaatttctatcaccaactttattgcattcacatgttgagaaagaatctcagggaatttgagaataatgaaataaacaatccaatccaacgtcaacagtgtgtgaccttatgacactgcagaatcggcagccaggaacagtagaggaaatggaacaacaacaaatttggcaatgtctccttactgaaagggaactcgagggaaaccgtggacgccgcacgccggcccggctcgccgccggtcacgccgacatgctccggctgccgtccgtgctgccggagtcggcgttccggcacgcgtcctcgacgatgcgctcgatccgcgcctccacctcggccatggccggccgccggtcggggtggtgctcggtgcactccatgcccagctgcagcagccgcatcatctccccctcggtgcgcgcctcgttgccgatggcggcgtcgaacacctccgacgtccactcctcctgcaccaccgaccgcatccaccgcggcaggtcgacggcggcgccgccgtccggcgtcgcgtcgagcggcggccggccgctgagcagctcgagcagcagcacgccgaagctgtacacgtcggcgctctgcgacacgcgccgcgcgtcgaccacctccggcgcgcggtaccccgcgccccgcttcgtagtcggcggcgccgccgcgccgccgacgagctgggccaggccgtagtcggtgacgtaggcggcgtcccgtgtcgcggtgacgacgacgttggacgacttgatgtcgccgtgcgatgagattggccctccgcggtggatgaacgccacgccgcgcgccaccgccagcgcgatgcgcgcccgcgccgcgaagtccagcttctcgccgttgcctacataaacatcaatcaaatcttatatgaagttactattcaggaaacgtattgactccaactttaaacacaactacaaaagtgtgacatgaaaaaaaatactccctccatcataaaatataataatttttagccttcagaatttattctaaaatttataacaacttttctaccaacattttcttcacaaccaatcacaaccctccaccattcatttttctcacctacctcaactactcatccaatcacaaccctccaccacttacttatacctactttcttaataaccgtgtccaaccttaaaacttcttatattctggaacggatggagtactaaatactatgtgacggagcataaagacagcggccatatggatatttatcaacttcatgtgcagatttacaaatagatttgaataaatgtttgtctttattttgtgttagggttattagttattgtttactacttatttttctggtttatatatgctctctattgagtgaaataataagagccctttgaatcgcaggaatgaaaaaaaaataggaaatgtgcatgattttaataggaaggtaaatacaaaacaaatgattgcaaaatataagaaaaatataggaataaccgtttgattggactcataaaaaatacaggaatgggatgagagatatagactcaaaagaaaaatttttaagaggttagagctcttactaaatttcctccaaaatccatataagattgtccattccatagaagtttcaaagaataagatagggttcaatcatttatttcaaataccttcatggaaattttttttatagaattaaaatcctccaaaattcttatgtttttccgccaaacccataatctctttataagcaaaagaccgtgtttctttcgctgcacgaagagaagtgagaaggcgaggtgatgtgatgaacgaaccgtggaggagggcggcgaggctgcctgcgccgacgacgaactcgtagacgaggagcttctcctccctgctgtagaagtaggcgaggaggcgcggcaggctgtcgtggctgacggcgccgatggccgcgacgcggtcccggaactcgcgctccgagaggctcacctcgcgcagccgcttcacggcgagcaccggctcgccgccgtcgagcgtcgcgcggtacgtcgtcccagccgcgcccttgccgaccacctcggccgacgcgcgcagcagcgtgtccaggtcgtacggccgctccggcgcgccgccgacgaacaccagcttggtgctgccttcgcccggcggcggcggcgagtgcgactgcttgacggcggcgtccatgtccgtcctcgccacggtcaccgtgatgggctccgccacgtcgtgggcggccgccgcggcggcggtgctccgactccgtggcgccgtcgcccggcgccggaagcacgccaagaaccccacggtgagcgcgacgacgagcgcggccacggcgccgaggacgatgccgatgatcgcgccacgggagagctttccgccgcccttgctgtccccgggcggcgacggcggcgtcggcgaggggttggcgcacggggcgagcggggcgccgcagagcgacgtgccgaggaaggcgctcgccggcatcccggcgagcgacgccggcacggcgccaccgagctggccattgtacgacacgttgaaccgcgcgaggttcggcagcgtcaggttaccggggagcgtgccatcgaagccgttgcggtcgaggttcagcgtggtcaggctcgcgagccggctgaactccggcgagacgccgccggtgaggcggttcccggagaggtccaccttctcgagcagcgccagcgagaagagcccctccggcaacccgccggcgagccggttcccggagaggttcagcgaccggagctggacgcagccgccgatgtccgcggggatcccgccggatatcgcgttcatccggagcgacagcgtccgcagcgcggtgaggttgccgaccgtgcccacgggcaccgctcctctcaggctcttcccggggagccggagctcggtgacgcggtcgccggaggcggagcacccgacgccgcgccacgcgccgccgcacggcgtgggcgccgaggggtcccacggcaggtgccgcccccccaccgcgtcccgcagcgccagcagcgccgcgcggtcgcccgccatgtcggccgccgccgcgcgcgcgacgagcaccagcagcagcagcagcagcaggacgtcgcggcgtcgcccggacgacgccatggcgaagcgagagcgcgcgaggaaggcggaggatgctgtgctgggtaagggatttatgggcgggcgaagaaggcggcgcgcgcgcgcgcgcggcggcgagagagcttaggtttctccatttggaagagctcggtttttgtccagctcgattgatcgccatgcgcgcagctggcatgcacacgcatagcatcgtggacgacgacgtcgtcgggtggtgaggtgaaagaactgaggcggcgggtttggaaggcagcgagcgagcggcggcgaggaagagcgacgccgtcaatggcgccggcgacggccggccggccggcgagcagattgggcccgacatagcatgctgaaataagcccattgatttgatgtgactgcccaaacgtagcattaggcccatgataattaatacagtactccgtattaaatttccaaatttgaggttgcccatttttttctttagtgaaatggaacagtaagacaattaactttgttgccgcaacgcgatcaatgtttgttgatatgcatttcacaaatggttaccaagccaaacatgtgggttttttttgtttgttttttttaacatgtttgattcagattattgagtaatagaattatacaaaacacaatactgagtagaagaaagttttctgataaaatgtatttttccgaatcgaggagcaaacaatccatttcaattatctaaataatccgaaaggaacgaggactttaccgttgagctgtcgtgtattcatgtggttcctaaagcaaacattaaaattcctcgtaagtagtagtagtattagtatgtctgcatgcataaacaataggaatggaaagataccgctaaaagtttttccgaatgtgaaaacaataagtatcttttttaaaaaatagaatgataagtaaattaaaatggagggagtactttctgaaagttccttatgcccccaagtcttcacttcatcctctttcatgcatatgagtttttgccttattcatgtatgtctttgtttttctttataataattacatcttgggccaaagatttttttttacccaagtttcaccttcaaactactctcgatataattgtcaacgggggatacatgtagatcgtattctgaggtattagggtacgttggtacgaggatttatacgaaacgatatcaagcacacagaaaacaatgattatattagttcagacccctcgtaaggtaatagtcccaatcttgtttatatgggattatgaagaaaaccacagagattataatagagaaccacagaaccatcgagttactgagttcacccctgtcgagaatgacccgacgagatcaatcaacgagttggctttaagtccttcggattgcttctgctatggctagtggcaaaggtatgattcgatgatcccgtaccccctgggagccttgtatttatacccttaaatgtcttggtttccaaatagaactcaaagagtaccttacacgtacgagatcacactcctccaaataagactctaacacattatattcggggagtcagtttccttatacatcagcctattttaaggtaacattcccgtatacttgaggatataccatattcgtataccgcgtaacccccaggataggaggtatgtcttatccgtaaccctaacactaatgttttcacttcaagacaggtattttacctattttacactttagaccaccgtcacaccatctctctctcccttctccacctcatgttctccaccgccccacctgttattgctggtttgccacctcccccgagctcaagctcaacatttgactctggtgtccccaatattaagctcagtctcttccttgtaggaagacaacggtggggagctcaagctcgacaacgaggacctctacaagctcattgttgccttgttacctcagcttcattctaaatatcaatgtccggagtaaggaaaaactacctccttccttcttcttgtcctccatgaaaccattgatgccatccttttccctagatctaactgaccagagttggggacgactgccactaccccgcttttacttcttcatggggattgccgatgcagttgcactactttgccctccagctctgctccatgaggagagggagatcaacggcatcgacaagacccaaaacttgatattcacttgcaacaccagaaacttgagcatcatcaagaccatgagctcgatctctatcatcgcctatgctctcatggctcccaagcttgacctcctcctcctccaatttcacttgatccagtggcgtttgtggtcgaggtgctaagaggcatgatggagaaatgggattgggaggaagaatgtcgcggttcaagagaaaaggagcacacagacgccttgtcaatcaaggtccgaatggtggtggtagggaaccagaggtggagaagagatagatggagagagggtggtccaaagtgcaaaaggggataaatataccatggtaaagaaaatggggacaaatatacatggctttcaatgaaaatattagatatgggtagtcttagtgaaagtttggtaaaaatcttactcccaaaccacaatttactccatttcttttgatcgctctattcccattccatttgttgactatgagctgattgttagattttttttttacgttgactacattgtacttgttggtcataagtaagtgcttgcttaaaaagcataattgtcatgtgaacaaatttcaacaagaaaattgaaagtgaaatagtaattagttgaccccggatttaaaaattcttatatgaaatttgataaatagttttagactaaattttacgaaatattaaaggatagtttcactctactctttccaaagaaatttaaagtaggttcaattttacttattttttaaaaaatacaaattttatttatgagtggaagataggaaaaatggtgatccgtgtaatttcccttttaaaatttcaccaaatttggttgcaattcactagaaaaatttaaattttggttttcaaaatttggaattttggccccttaaattgttgtataattgaagcttttcaccttgataaattttataaaattacatatattttgatcaaactattacaaaataatatactttaaagtggtgtatcataaaactatagatttatgactgaatttatataaaaaaaactacatatttaagatgaaattatcccagaactatatggtttgcacaaagtacagtacaaaactacaacatttgtaactacttaacataatagtatgtagtcgtagggatttaaattgtaaaacctatagttttgtgatgactgtagtattaaaattgtagttttgtgatacttggcattaaatatgtagctttgtgataaatcttgcgttaaatctatagttttacgatacaatatcttaaatatgcagttttacaataatttaattaaagtacagttttgtaaaattactcctacatatttataacaaggtacacacaacttttactactatataatagcaggagacaatataatcattttatttttaaaatgacattcacgtatagtgattggtttggtcggaaatacatgacgtcataactgctaaccacaattccctcgtaccatcacatggcaaacacgcgcgaaatctgacacgcgaaatagtacgaccgtgacgcgccacagctctccccctatccgatccgacgaccagcattgagcgcgctccccctgccacgtcaccgatccgcgtactctctcctcattggctgcctcctcctatataggattactccccctcccgcttccacccccaacccaatccactccactccaccgccgctcgctcgccgccgccgccgcgtcgtcgtcgtctccggcctccgcttcctcgccgacggaatcctagcttagccatggctggtaggggcaaggcgatcggctcgagcgccgccaagaaggccacgtcgcggagctccaaggccgggctccagttccccgtcggcaggatcgcccgcttcctcaaggccggcaagtacgccgagcgcgtcggcgccggcgcccccgtctacctcgccgccgtcctcgagtacctcgccgccgaggtacgccacgcatggacgcactcgaattcgtggtcggattggattggatggatgaattcgggctgaatttcgtttggggatttttgaattctcgcaggttcttgagctcgccgggaacgcggcgcgggacaacaagaagacgcggatcgtgccgaggcacatccagctcgccgtgcgcaacgacgaggagctgtcgcgcctgctcggcgccgtcaccatcgccaacggcggcgtcatgcccaacatccacaacctgctcctccccaagaaggccggctccagcgccaaggccgccgccgccgacgacgagtagagacgaacacagattcctcactatgacgaacactacatgcttccttccgccgatggattagacaataggcatcctgcttaatttagtttttaattgtgcttgtttcgtagacaagggattagttgctctgtaattggtgttaatttatatgaaatagtgtcatctttctcgatgacttttgtcaaaagaaattctctccgggtgttcagattttccaggttgatttgaatgcgttgtctataaatcgtggtaaatgtttcttgatttttttaactcttgggactttttttttttgaaacaacaactcttgggaaattgggttgttgtcaaacgtcgcgtctggtttttctagagttcgtgcgttctcagcgtggtattcaaattgagacttgatttggttctcaaaattgttggatctagcgcaggatttggtttgaaattgagcattggcgcgggcgggcagctttgaaattcatgtgatttcaaacagtgccaaggcgggaagacgaaaatttccgccaagaaagaaacggcttaacggcaggaaagagagagagagagagagggggatggggaaaatgaaagttgaaaataattttaaaccagctccttgcaagtggaagcagcctctatacattaacatgtgggtcccacttgctttgggcccacatgtccgtgacaccgcctgcacgttcagtatcccattcccatgaaaggtacacatacggctcattagagtagggaaaacaggagggtcataagtcaattactatgagcttctattgaggtgatagatacaaaaaaatatatggtgttgaatttttatgtaatactatctccgtcccaaaataagcgcagtcatacgtttccgcgtccaactttgatcgtccgtcttatttgaaatttttttataattagtatttttgttgttatgagataataaaatatgaatagtactttactcgtgacttatgtttttaattttttttaaaaaaaattcaaataagacgaacggttaaagttggacgcggaaaactatagctccacttattttgagacggatggagtagctagctctacacatggtttaatatggatatattaatttcatagtgagataaagagagaaaacaataaaactaatctattatatatatattagctatagtataaatttatacggggtagttgttctgctattaaacttgctactacgagaggattaggctgctgcagtttaccacctgacttcacacagagtacatactttcttcgtctaaaacaaaccaacctcgtattaggatgtgacagcgaatctgaatatactctatatccaaatttattgtattaggatgtgtcatatcttactactagatttttttgggcggatggagtacatacgtacatggtatcgacaagggtttaccatccaccctaaggccccgtttgttttctccattgggaaagatttttcagcgcatacgtagtgagaaaacttattagtacatgattaattaaatattaactattactaacttatttgaatcttataaacaacttttatataaaaattattgaattctagttaatttatgacatattgattagtatattagtgagtaattagataattagtgtgtattagacgcagatgttttttttgttgtggattcgccgctacgttcatccttgtttcttttatgatatctaatgttttctattaacaagatgttatcatgacagtactaacgcagtatgaatctgtgatatatacacttaaattaacatgaaactaattaatcgctgatactcgagatggaaatgaagttcaagcagaaactaattagatcaaagttctgacgtggactctcctctcgcactagtgttgtcacattccaattcggtggttggagattaaaagagatggttagagtggatggccgcatgcaccggttgctgaatatctatatgcttaattagtgagaaaaaacgtggttttccttttgatttgtgcagtcgtttgttgttgctttgccgcttccatctagtgatggtcagcacatatatgctctgcacgtatgtagctgttcttttctcccgaagacttaaggaagattatgttttttacgtaaaacgagatggtattaacgtatgattaattgagttttaattattacaaacttgaaaaataaattaataggatattttagagcaacttttatatagaaagttttcgcacgaaacacaccgtttagtagtttgaaaagcgtctcacgaaaatcttaaacttaatccaactcttgttagagtagtcataatcttgcattaggtgaaaagttggaggctaatccatataaaaaaagtttgtagttctttgattttgccaaagtgtcaatgcgtcataagtttgatatatttcagtgaacggcatcatatataagttgatatttattgaggtcagtggcgattaacaaagcaacagtgtacgtatgaggtctgtaatttcacttggtggttatatttgttgttgaactttggagtaattctgaggtagaagtagagcggtagatcgatgaacccaaaccagaaatagtcaaaaaggaaaaaaaaagagaagctttgcaaaaggcaaaatttactttgagatattcttggttaagttcgtggcatttgctattggatactctcgttttgtggatttgtcataggacattctagttttacagttgtttgataaaaatacactttgaccattattttagtggatttaatatattctcttccaatggagctataaaactgcaaaataaaagtttagctgaatttaaatatattatgcaaattcaaaacttgtccaaagttgtggaaacgagaattgccaaagattttttaaaaatcgaacaaagaaacaaatttgaacaaatattggttgcatttaaataaatatttgtaaaatgtttttatttctgtaatttgagacaatttttgaattttgcaaaatatgtttagatccagtcaatatttgttcaaaattacatcttgcaaggtgacctaacgataaaatcatcttttcttcatttaaagatgatatattgaaataatggtccaaatgtctcttactacctcccaagaaaggtattaggactgagagagtagtaaacaatcgtaaaagtgtgtgctatataataaagtacacaactaaagtattcttaagcaaatgtcgtggatttagagtctcctagagcaaattttacctcagatattggtgtgtgcctttaatacacagttgaatagtacaccatacacccaaagtgcgatttaatgcatatatatacccacaagatatgcacacatatttatactcataaaattggatagcattagtacacaatttaagatttgaacacaagtgagcggaatgcacaacttcaagcaccaggactagcttacatggccacttatatatcaagatcttatttatggaagggagtagtccttaattaagaatttcctcatcagattatatataaaaaaagattttacgctcctttcaagatgcttaagttgaacagattgctgagaggggaggtcatatttcaatttcgaaatgtccatctgaatacctgtgttaatttgtacgaacacgtacatggccgtttcttccacgcacccgacgaaagaaaatgactcggcaaccatcaagttttctgctcattgccttttttgaagagcaatccacgcaacaatctgtcctctttttagtccttgtatagattgtatgaactaccttcatttttttaaaatgcttgttttccaaagcatggcgtctcaaatgaagcaaaacaaggtctgatcaattcagcagttttgttaaattttcctcacaagaggctttgttaacaatgtgctagcaatttgtctggttgaagaggaggaattaattcaaaccatgcatggaactaatcctaatccactcctaacaatactttttcaagagggtgaaaaaaaaaaggaaatggcatatgtcactgttggaacaatggagatggttggccccaaaggtttctttccaaacagttgaaaggagcctctctccaactgttcacaaagtttgtcacatttctcacccaccaaatcttccctacaaaaatataatccccacaagcaacaccacacccccaagtccttctccacctctcactttctccctcatcttctctctctagctagctcttctcttgcatatatatatatatatatgctgtgacaccagtatttcatgttctgggagtagcaaagcacatgtcaagattgttgatgctggctactactgctacaatggaggaggagatgctggaggagcaaggtgaaagcaggagagtggtcaggttggagcaagaggtgctgatccacatccaggtcaggaggatcaagcaggaggatgagaaggccagggggcttctccagaggctgcagctgctggagatgaggcccaccgccaccgccgtcatcggtttccgcgagctggcgcgccctccctcgccgtcgccgctacgccgcgccggtcaggccatctccgttggagattgagggggggggggggggggcatttttctttcccttgatcaatgtggtgtaaatatgtaggagagttcagagtgtttcaggttttcagttcatgtgatccatccatggattggcataacttgatgtgttctcttcctttgtgctgtaaatacaattgagccgcttaaattgccaggttgcattgtgttggtttttctctttgatcctttcttggccggaatagcttcagataagaatgcagaggtcacatcagcaagcaaagcggatgaagcaaagagggaggattagccactcaaactttgtataatccatagacagcagattggaccagaaaacatggattatgtcatgctaaccattggatggatgacaaaccgatgaatcgtgtcattccagtaaacaacaaagtgaatattttttccttggtgttgccgacaaggtagactagtgaaagatcccatctaccagattagaagtcagcatcaacattggagaagaaaaatcatactagcaattactactacctgataaagaaaactattgccgttaaaggacatccaagacttgggataatatagactaaactacgtaacttctacggatgatgatgagtcataaaatcccaggatttacttttgtttgggaagcttaacacgacaatctcaagagcaagcagcaccaaaaaaaagaaaaaaaaaacctagggttgcaaatcccagataatcactacacaccacagttgcgtcttcttcaaacttctagaggcagagtttgtttttgcaaacctaagcagaaagttctctgcttccaggagtactacagctcaatcgggctaacctatcataacgataatcttgcaacagatgcttatagagcagttgtgacaaaatggctgccaccaccgttaggtctgcagcgatcagtcggtcttcattgcctcagcatgataagtttccaggtctttgtccagctcatctgcagtcttcccagcttgcctccttccgcgaccacggccctggaattgaccacggcccctgacactgccagtgccacggccctggaactgggactggaatggggcacgacccctgccacggcctcggccccggccagcttggaaggcaccacggttatatctattactggaatggcaagttcaggtgacagatcagcaaaaagatcaataaagtttcaacacatttgtggtgtttttcagtttggttgtgtcaactagggaaaaacacaagcaagatgaaattgtcaccaaccaccgccaaaagtgagaataactagtagaaaacaaccttattttcttctttgtatgtcacaaatgcatacagtatccatgactaaactaggaaaaattgtagtatagcaggaacaggtggaaacatgattaatttatgctagacatgtagtataaaatgtaaacctgaaactctgcacattacatgcttcttattaaaaacaagaagaaattggttacaataataaccaaatggcagttgctttactgtagatcatgatgcttttaaaataaccaagcaaaatgatgtggtcactattcgctactagtaccagataagtaacagaataaattacacagctaagaaaatgatactgtgagaagccttacactgtaggacctgttggtctactgctggaaccactgccacgctggccaatttcaggcctgaaatatatttatttttgttgagatttatagaaaaataaggtagattgactgaatggttgataggtatatagctttaaaggctcagagaaaaatgaaaacaacaaaagcccaacatagcacattttcaaactggagttaaatttcacaagttatcaattgacttgcaacacacaactgctaacgaacgtgacgaaacatatttatcagttgaacttttatccgttttcagactatagtccttcctaaatatggctagctcattagaatatttcacacaatactagaatctgctaagtaaacagctcatattggcagtgacaagttaaattagcacatatactggcccaacaagaagtttacttaaaaatattacaactcatcaaacaaattatcagcctctaaagtaacacatgaacagaagcttgtagacatgccatattgttagcagaaaaaagaaagaagagtttatctgcaagcaattaggagttctgatagcccagtattcaatatttaacttgggacatacagactgcattgtgatgtgtgatccagcttaggttccaggtatgtcattttctttttgtccttggaagctaaataagaaattgagatacatagaaatggaaggattactcacgtcataacaactgttcttgtaggtctgccattagaagccccaaccacatttatgcgaggtgtcataggcaaacctaagtcacttccaataacttctatcttcatagctttaccatcaagcagaacattattgtaacgtttcaatgcagcaattgcatcacttctcctagtaaacaccacttctgctgtgccctgcagaaatttaacaaaaaaagatattagcacaataatcgaggcaagaggcagttagcaaaagtttcagtgatcacaaaagttcatttatcattttctttttgcagaataagcaccgcaaatggacactgtttacatgctgttaatttgctaggccagctaattagtacataagattgtgtatatataaatttttttgaccagaaaacagagagggaggtccccacgctatatatagtacataattattacaacaaatacatgtattttgcaaatgtactctaagcagatcaccattttatggagtttcaaccagaaaagctcagcaaagttcaatgtgtgaaagaataagaaagacataatccctacatatatattactaaaaacaaacatttcctatgtttgtcttcttgctgttatctcaaacgcaagataatcactaagatacatattatcctattgttgttttattgttcttggtaaatctaatgcaaggcataaatctgtgcactggaagttttcatccataagacaaggtataattatacttcatatgtgatcatctagagcaaactgaaagtactgagtgggaagatgacaaggtgtgtatggtttcccttgaaacaatgcaaattggttcaccgaagaaaaacatcactttgagtttacatataatacctaattgaaatcaaaatatgctctatttgtaaatatgataagaagtacaaacatttgggcgcccataaccatcaaagtgaacagcaaagcgcttcaagtgaccaacttctgaaaacagctcctacaaggcgaattgaaaatgttagcctgtcaactctatatccaacaagaatagtgaaaagaaatatcccaaaaaattaattagtctaacaaacctttatatcctcattggaaaccccatagtccaagtttgaaatgtacaattttgtaccagtttcaattccactagctgccatactatcactaaacagatcaggtctccaggtcatgtctttggttctgctaaaagactgaaaatggccaaacatccagcatgtgagaaaatgtgtcatcacagaagcatatcacctcaaactgttctgtatgatcatggcaactatcattagtaatatcaatctttatggtagagcagaaataagcagcttgactatgaaaatgctgcattaacttaaaatggagaggaagagagttccacaaatatcacaagtggagtagataaatggctagagcattttctctggagacatcctagaagcacttcaccatagcagatcccaaagctgtcagatgagagctgcattgaagttccaggtattgcacaaggatcaatgaagatccttccttcggcaccacatgcagattatatattgaattgcaagaataccacaaacttctttttttttcttttcatttggttcgatccatatgtgtgacaaacctccttttccatttatttcgatccatttgatcgaagagcagttgctgtccttcaaagttcccactagatgtatccaccagttatttctgccactccataaatgaaaccttagaaatgatctacccaatcaaagtttttcacaagagattaacagcaaaggaggagagcattcactagcgtggcattggttccccttgagttctctaggaacatcaaattgtaaaaactttgggctgtcaccctagttgggccagctccctgtaatctcatttcctcgttaaccgatcggcaaaaccactgccttctcctctaaaaaaggaaagactaatagcaaagctacttcttcctctcctccacctccacatgatagagagatgctctagccaaatccaactcgacaaaggctcgctccattagtgataacttctgcccctccacattgtacaaaatcttagagatgctctctcttcattcattcagtaatttatttttttttagcgtattcaggagaaatctgaccatgaacaaaaacacagcgtcagtttcggtggccttgccttagcaatagtgcgcgctgatggccgcgagttaaccccgaggccaaggggccctcgaggaggcatccctgatcttccacgcagcacatatccacctctcccaccaccacctccaccacctccaccaccttgaacacggccaccaccactaaccctatccccacccctcctggcgtaatacgccataatcccaaactcgcttcggtcagatcagattaacacggttcttctccttcttctccaacaatcaaacgatgaaaaacctgcaacattacaaggctcgatcagggggggaggcgcgaggcgcgaggcgaagagaggaacctcttccagatctagaagaagagaggggggtaggattagggcaaagagagaaggtgcggtgcggtgcggtgcggtgcgatgcgatgcgatactcaccggcgttgcgaggatgcggagtaggaagcagcaggacgccggcggctgctcgccgctgctcggccgtgcggaggcggaggcggcggcggcggcggaaacgtgaggagaggaggagatgtagtagagaaggaagcaaaggtggagtcaatgaagaggataattgcgctgggctatttgtttagcggtatgggctttcatgtgggccggtctgagtcgagtacggcccagcccggctgaaacggaatcgagaaggtgaacctcataggaataagcttatatcggaaaggaaaaagtacaccgaaggtccctcaacttgtcatcaggataaagaaagtactcgaaccg

SEQ ID NO: 6108 - DNA, 88348 bp, Oryza sativa
atatcggaaaggaaaaagtacaccgaaggtccctcaacttgtcatcaggataaaaaaagtactcgaaccgtaaaaccagatatgtggggtcccttaaataacaaaaccggacacccaagatccttcggtggttttgaccccggttttggtctacgtggtggctaagtcagtgtgggacccacgtgggccccacatgtcaacatgccacgtcatcactccctctctctctttcccctcctctccctttctcccatctctctatctctttctctctctcttttcttctgcaagctggccagtgaatggggaggaggtcgccggggcgacgaggtggcggcggtggctgcgacgcgggagcaggccaccacgccgggttagattcttgcaccggccaaactctcccgggatggtgctggtgaaccggttcccgaacagctgaagaaacttcgccggtgaaccggtgaggttgttgacgtccaaaccgagagcccacatagccgagcagttgtagaggcggctcgggatgccgccaccgcaactaccatcccactgtgcaagccgagccatcgccctttccaccgcttccggccgctccccgccggcgacacaggcctcgctcggctgtgctgccgccaccctcagcaccgccacgctccaccgctcctcggcgtccactcctcttcgccgaatacccaccggagtcccaaccacctcgcgttccggtgagttccgccccgagttccatcgccggcgttgttttcccaccgcttcggtcgcccgttttcctccctaacccatccaatctcttcctcaggtctcgccgatcctcggcctcccctcctcctgtgccggacgccgccaaatcgtcgtcgtcgtcctcgcccgagggacgccgccgcctcctcgcctccctccgtcggccacctctccccgccgtcagccgcttggtgagcatccctcctttcctccccgctcccttccatcgcttgtcggccgccgcttccggtgaggacctctcctccctccccttttttcccgtcctcctttcttgccggccaccacctcttggggtgcgccgccgtcccccgtgcgcgccgctgtcctccgcccgcccgccgccgttccgcatcgccggctgccgccgccgccgcaccttggctcggccgggccggctttgtgccgcgccagtggccctggccgctgctctcccctcgggtcgacctgggtcgtccacgtggtggacatgtgcccgaggccgtggtggaccgtgtccaccgtgcgcccttccccttgtgccgctgacatgtgggacccgcctgtcggcgccggttccccttgctgacgtccgcgaatgccttttcctttgagaaaataattattaattgcgtcataaatcggtaataattctagaaattcattaaaacggctcaaaacttctaaaatttatgtctaattcatacgaactccgaattgagccattcaagttgcaaaattcatctaaaattgggatctacatgtttttttactttttatgtactatttccttggtttttattagtgtttttcctcgttttgcacgccaacgagtagattccgccatttcggaagtctgcggtcgcaaagataagagttcagaagatccaagtaaagaagcaagggaagtcacacatttccccttgagcatgttgatcccaatttacaaatgttttaccgtttgcaaataaatatgcatgttttgctaattacatgggatcagggtttacctatctgctcgcttgtgccatgtttacttgatatctgtcatttgtcaatcgtgggtaataaatcgactagctcatgttacttatgtgacacatctagaactatatgcttagccatgcttaattgccactagctcagttgatgggataattacagttttagacctgttagtatcatgacgagccgcgtgctcgagacacccgaccatgttgcattggtcgtaattatctatctaaaatgcaactgaatggtgggctgtgggtgcatggttttgcgagtcgcacccatggcaattaagaccagtttacgggaaaccctggaagacttacagtgcttgccacaagcgggaatgggtaactgcctgatctgaagtatagctcgaccctttcctaggcaccggtggcgagggtgggcgtgatggagttgggtcggccggggtgtccaattgtccagctgccggattcaccgcggtgcacgaggggactgcctgctgccttgtgaggagtgggggtgaaaccttagcgtggtgtggatggttaggggagagttatatgaagggtcttgtcacaatcactcgacgtggtgacgtgttcatcatgggcacatgatgacacggtgacatgtcggtggattgtgtcttgtgcgtacagttatgcacctctggctagagtaaaactattcgaatagccgtgcccgcggttatgggcgatcgagcagattcaccgtgattagtctcacccctgataaatcgacccaatgcactgtagttcaggtgggttggttgggcctgttcaacgtggtgtagcattgatcaatggagatttaatattaccttaattactcaactgtcttactgttttgcgcaataaatgttttacaaccgcctttatgcaaatagccacaagccattcttgaattcccttgcatgtctgcattgttggtgtggcttgctgagtacagtggttgtactcagccttgctattatttcccccttttcagaagtgtagtgattctgagctgaagacgaagttagaggactaaggctcagaccccagttgagttttgcgtgtggagtggagctgaagcctcgttaggatcgcctttttccgctgcttctactttcgtttcagtgtgaggactaagtgcctcttctgtaagtattttacgctttatttatgtttgaaactgtatattacttgtcgctttatttacgtttggaactgtatattacttgtcgttttgtgtaccctggctggtactggacagggatttaatacacaaaatagtctggaaatttgggttaaatttctgggcgtgacactggtgttggcccatgtcagtccgacccgaccgtcgggccgtgtctgggcctcggcctcggcacagtgggccgacccagcatggcatagtccaagaaaaaaaagtctattttgcctccctcggcttttcctcttagttgagtctcatccccttgttgacaacataaatgttattcaatacacaataaatcaattacggtctttctatttgagtaaaaatataataaaacttataaaatccataactaactcatatgtactctgtttaactccattcaaaatgcagaaaattcataaaaataccccaaatccattcaaaatcctagtaggcttttcgctgacacactatatacttcatcttgagcaaattttgtaaatttttattatatatatagtttcatcctattgtgcatatgaaagaggattagctcttagattttttatgaactggacccatgttaagaaccttattcatattagctaatcttcagtgtgaaatcgttatcatctagtgagtaatgtctattcgctattgctagctcatgcacgcgatgaagtttccaaatacagacaatattaaaggctgacagatatgctagctatttgcacattagccaccgtttttatcaggcaaacattaacttgcatttattcgtttgatattctcgaatgtgtaaaataatttctttccataatctagtgattgttgcgatatgatcttccattataaaaccaccatattcccctttctttgaactcatatcaatctaaccatttcccatcaatccataggtgcagtcttgctagaaagtggtgaatcgtgaaggccatggctcgcaacaaggtgaagttgcagcggatcatcaatgatgcgaagtggcgggcggcattcaagaagcggctcaagggctagaagaagaaggcaagcgagttgtcgacactatgtagtgtggatacatgcctcatggtgtatggtgagggcgaggtgcaagcaacagaggtttggctgtcggtgcaggaggcgacgagggttcttgagcgcttcaaggccatgccacagctagacagatacaagaagacgatggatctggatggcttcatcaaggagcgcaccgacaagctccaagaaaagttgcacaaggtaagacgtgatgccgatgaaagcgagaccaagatactcatcgttgaagccttctatagccgctgcgcaggcctcgaggatcttaccattgagcagcttaccagccttggctggatggcagatgcacaactcaagatcgtcaacaactcagtctatccgtaaccgtgccactgaaattttacaaaattagaaccatgccactgtcgtcacgttttccgtcaatttccttccttttccaccttcttccttctttctcctgtcttcttccttctttctgccatagcgaggttgagcgcgtttgcgattagcacggtgtccacacggcttcccgcgtcagtgcagccagcgtcggccgtagcgacatcactattcccgccatcgtggcggtggcgtgcccgcccgcgcagagccccatcttcggggccgagagccccatctcgtggcatctttcccttctctctctcttccccgtcgcatggttagcgggaggcgcggcgaagcgcgtggtgccggtgtccaagtgaggcggcatctcggacctcatttcccccctctctctgtccccaccccttgggtctgatcactctgcgtcgaggagctgtcgggtccaaagctagtgccagggtcggccgctgaagccttggggggggggggggttcctcatcgtcgcaggctagctccggccgctgtctcacctccttctcctccatctagcgggctccagcaccagcgccttgcctcctccactgccgccggtgctagcaagccggctctcccgctcccgccgccgatccgtgcgtccccaccttgccgtcgcgatctttttaactaggaaacctccacatcatttagcgatatttagatcatacatgttgcctgcggaaaacgtgagacattaattaggagatcatatgctctatcgtgtgttacctttatccgttataacgcacggacatttttgctatattcattatattaaaagttaaagcaatttatcaagtactacctctgttctataaaagttgaatttatagggaatcaaggatagaaaaacaatcataataaccttattatttaatgaatacagtgcacgcacacattctatatataaacttaattaacatgaaggttgagacttagagaagggatggaaggaagggagattaaaaggaaatatttttttatgtaatcaatttgctgggtcccacattagtagaaatacaattttagatagaaattcaaattttatgaaacggaggtagtaaattaatgtgggaaataaactttccttttaaaatcatggctgagaatattttcctaatattcttcattccctaatatactctataattttccttaaactttcatagtaaaaaacaaaggaataagttcaccggaggtccctcaacttaacagcgagaatttttgaggtcccttaaccacaaaaccagaaatgtttacctctaaactcacacaaaccgtgcactcaagatcctatagcagtatatatggctggtttcgctgacgtggcatcctagtcagaaaaaaaattaaaaaatgtacgtgaggcccacatgtcagttgcacatctcttctcttctagttttattctcctcctcttctctattctcttcttcaggccggcagcaggcggagagccggcgggcaagcgcagatgaaggcgacgggcggagagccgtcgggctgctgtcgccggagctgcatagccggctcctctccgaccaccgcgcgcccttgctctccctcctccgccgccaggatgacgagctccggaccaagatcaagaaccacctcctcgcgctcggatggaccatcgcctccaaagcccagcctccctggcctcgcgcccaggctccgctacgtctccctcgccggaagcatgcatgctatttgtatgtatgtatgtatgtatgtaagctcgctaatggccaggtgattagcgagcttaggaaatgggctcagcaaacaccacctcatcctggaaggcaaccatccatcatcataagaagtcaatactgccctggtccatctcctcgtggaaggcaacctcgcccgcccgcagcacccctgtgtccccatcacctggccgatctgcttaggagcatcgtcaaccaacgcctacgtcggacttccatggcagctagcacagccatcctcggcgccagtacgatgtacgccatcaactcatcatcagacgccagtcgccgacgatgctacctccacggtgccaccacgttgtcaagacgccggatgtcctcgcatgtgcggcagctgcaacaacaagagcacggcgacggcgatggtgcctccgcccctggccacctctgccgcccacggcctgccgactccccccccccccgcgcgccccgcccagcgctcccgccgccgacgacgccctccccttctcttgcgtcaccggccggcgccgccggcatccgaacctctcgtgacccgtggcccgtggctccatgcacgcccgccactccgctgccgtgctcgcccaccgatgctctgcccggcggtgctccaccggtgaagaggagaagaagagaagtgaagaggaggagaaaagagaagaaaacatatgtgaagctgacatgtgggccctacgtacttttaaattttttttctgactaggatggcacgtcagcgaaaccactcacatatactgccatagtaacttgagtgcacggtttatgtaagtttaggggtaaacatttctggttttgtaattaagggacctcaaaaaatctcgctgttaagttgagggacctccggtgaacttatttcaaaaacaaaaggagagagaagcaaggtccatcgcttgggccgacgtcctcccccctttccttcttacttgggccgacgctcccgcacggcccaaggccgcgctagcccatccccatgccgaaccagctagcccaaggccacgccagcccagcttgcccgcgcccctccttcagtccagcccactcgtcaattttgtccccctcctctagcctagtccactccctcggcccgtagagtaaaacagaatgccaaattagtgcacgattaaggccctatttctttcatgttaggattattataatctagattattgagagtaaactgaaagaaacagataatttattaaagtagcttattataatctggatcccagcttattataatccgataagctcatttatgtgagctttttccatattattgggtgaaaaattacccaccatgccaccccactccttctttaaacttgtaaacccaataatctagactctaataatctaggaaagaaacaactaaccgcctattctactacatattatagcttatagtaatctgactcaataatctagattataataatcccaagctaaaagaaacagggtctaaaccagaatgtcagattagcgcacgattaactaaatattagcttaaaaactcataatataaattaatatgatttttaatgaaacttttatatagaaaatttttttgggaaaaacgattgaattccattagccgataggcgaaaccgaatttttttttttactaggagagcattgcaggcgaaaccaaacttggctttggtttttcctccctctcgaaggaagcattcctcgccactctctctccatatgctgcccgccaccgccaccgcctccgccgcgccgccgccgccgccgccgttgccggcgtcccccggcggcgagccgcacgccgccctgctcctgtccctggcctacctgccgctgcgcgagctgctgtcctgcgcgggcgcgtgccgccgcctccgcgacgccgtcgcgggggacccgctcctgtggcggcgcgtcgcggtggcggcgccgccgctcgcccgccggctcaccgacgaggcgctcctcgcgctgacggggagggcgggggggacgctccggtccctccgcctcctcgggtgcacccgcgtctccgacgccggcctgctccgcgtcgtcgagcgaaaccctggcatcaccgaggtatatagtgggagggttttcccccacaccgcatgttcgcttcattttggtttgtgagaaaagtttggattagggaaagatctatagatgctttgggtagttgggtgttgctcgcctaatgtttgctgtaatgcctacgcaccgtggctgctttagctttcagcagtttggctcatgttaccgaaatcgaaagaggggggaaaatgcaataatgtaatgataattgatcaagttaatttgaattcattacaatttaaacattacatgtttacaaatacaaatcgatgttagttgatacttgatacactgtactttatcgtgtttggagcttgatagacttatgttggtgttcatgccctcagtaaatagcaccccccagaaagccagcgcactagcattttggacttttagttatttctgtatgaaatactatttttacacgaggacaactcgacatggagcttgaagctttgtgcttcgagagagaatgcatgttattgttattccaattcctgtgatatggacctttttgaaacaacactagtaatcttatatggtatctatggtggcaacaaaaggtagtggttggtttcttgcttggaagagataaattaattcgttgagcacattactcaatcaagtgtgaattctaggatcctgcttgcttgggtgcccattttgtatcctgtgatctgtgttaagtgatcccattagatactaacattaacatccacactagtcgacgctggatgacctctccttcgcatttattcgttgtaaattataaatataggtcaatgtgacattaataatattttttgttcgtactaaatgtaatagtaaaaaatagtcttagtgtcttatagccaaccctttagtgaaagatgtgctagagcaacaattttccattttgctgttcttggacagtgtgatctcattacccattaaaatattattattttttgggtgtcctagtattggtatacaagttagcaagcgagtcttcataaagttactccatactatggttttggccactgcttccaactttaggcttatatataccactcagtgtgctacatggtacatactgtgtaagtgaaataaagggttccgagatcctattttatgagccttttttatcacagattcctgcactttggaattgggataaagcaggtgccagatgaatagaaatcgatgcctaatacacataagaaaccatagataaataataccagacacagaacattcccattgaattgacaccacgaaataataagaatttcagtttgatcccatgggtataacagtacaaacatctgattgaattattgcctaaggctttaagatggtaacactgatcctacacaatcttgggtaaccacctcacgtattttatacatggttgtttgatgttcttgctgattaaacttgattttaacaaattttttgtgatctcagacattctgaatgtttcatgtatgcacaagatgcatctcattgtgcagtatgtttttggaattcacacgaaacagttaaactagtgcgggaaactggaaaagttattgggttccaaggctccgagcagggaaaagttcttgatttaggactctttgttaaaagatggaataaatggcacaccatgctgggtttctcttactcactttcgctggggttgagatttctctatacgtcttgggttgtttcactaaccttgctaactgcaatagctactgggattagggagtcaacagtatctattgtaattttgaatttaatacatcaaatctgcagtggattgattgtatccttgagagatttttccttggatatacaaccatgtacaccacataatactggaaaagaatgtttatcttgtcaagaaaaatatggaacaattagggcactgcagtatttgtgaataataatgtataggtcttcaactttgaggttgccgtattatttcccttagccacctgtttggggataatatgagatacatttgccttggactttggatgtaccaaaccttatatggtaaaatgtggtgcagttggtcaatactcaatacttactgctccctccgtcctagaatataaggatttttagggttggacacgggtattaagaaagtaggtagaattaaatagaagaaggttgtgattggttgagaagtggaggtaggtgagaaaattgaatggtggaggattgtgattggttgagaagagaatgttggtgaagaagttgttatattttgggacggagggagtactctctaatctacatcaccctttgttctttaatcaatgaaagattctcagtatggagtctagtacgctactgaaggacaccatgatctcaactagggctaaaatttacaaggttagttagaagattgccatgactaacttcccatagcctttctaacttttgaagtgagcaacattagacatctcacacacatgaagttcatttttctcttgtttttttttaaaattcaatctaggaactgataactgtcatatgacaatttctgataagtactgtaaaagcaccaaaagttccattttaaaaaataattattgctagcaactagctgggagcaagttatctagttccattccaaaatcatgattgttgaccacaatttttttatggagcaatagtgagtttgttaaattgccactttcagttaccagaatgactttggaggttctagttctaagaaaacatgggaaataattgcatgagctgatttgttgtatgaagtttgaacttgctttacctatatatagcactgttgacttaacgatgctattgcacttagtttttatccataatagatgctggccagaagttacagtcttctattgcgtaaatctgtttactactgcagaatgctaatatatatgttcaattttgatgctttgttatttctggaagatgaaatcaatatcatatgctcatgaaaagtacatattcacttcacgtcgtaccacttacttctatgcaatagctttagtgacctttgggtgcatcttatctaacttattctttaacttgcagctctatatgcccagatgtacaggcttgactgctgaaggtgtggtgaagattgtccaggttctttatgaatgcaaggggaatctaaaccgcattcgactccatggtatttgcaggatgactaagcatcatcttgatgctatcagttctgccatgtgcaagggtaaccaacaagaagatgatcaatcacttttctatagccacagagtccatgaagtgctcaacaccaacgatgaacgccgtattgatgttgatgtgtgccctatgtgcacaaatgtgaggctggtgtttgattgtacaagggatggctgtaggtttgtaccttctgatcttttgaactcttatttgctctttgcttcgaaaatttcccttcaaatttgttgaaagtttgccactgtttttcttatttgcttattgacaactcatctttgctatatggtcacaatattcagtgcctttagatatttgatagtgttgtctcctgtggttgtggaatagctgacatagggatctcatctttcctggaaagcttttaagtgatggtccagaaactcatttattctctcccctatgggctacaggaaagcaactgcacaattaatttttatttggttgctctcgtctttggaacaactggttcaatatgttaaatattcttcagtattttttcaggtctattgactttgacctgaactttgttcgcatttctacaaaataaggtttgatctattttgatgatttatttatatttcaggagaaaggatagttgggctcaatgtcgaggctgcttcttctgtgttgcccgatgcgaaacatgcggtgggtgcatcgacttggaggagctcagcgagactgaacttgcatgctcggacttcctgtgcatggagtgctggcttccgctcccgaaatgtagcacttgcaatcggccctactgcaagaggcatgaaaatctgaaggtagatttatcaccatctggccagtttacttgtcatcgttgcgtggaattttctagtaactcacgcgagaacctggaagaaagttcttagaggtgagttcctgcccctctacaggaaatacaagttgtcgagtatacttgggtatgaaactactgtctgtgtaccagtacttgctgatgacttttacttaaagcgtcaaatgtactagactaactaactgagtgtactggaaatctaggattctgaattatttattgatcacgtcaaatttagcgggtgcagacttcatggacttgtgcaacttgtctgaaactctgaataacactgaaacagtccattgccctcaagtcccatatgcctatggaatgtgtttaaccttccaggcttccagctcagaatgtgctcagcatgacagactgaaggacaccgttattaaccgccatttgtcattttggagcgtgctgtactctgtctggctgccatttgcgcctataatttcagaattcaaatgatactcctgcaagaaatgctactcgactggaataccttccatcatctgttcatcttttacaggaagaagatacctgtccctgtactatttcgaatccgagtctaaatttgagtagtcaattgagggtttagatcatgttttgcgataaacttgtacaatattgaaatactcgacagttgatagcactttgctttccaaaatttgttccgtagtctatatcagtattttggtccctcattatcttggtcgagagagggtcactaacaaaataaccaaaatgtaccttttctaatgcgattgtttttaactgcacatccatcttcttttccgcttctttaccgaattattgtcatgaattgtttactccgtgcttcaaaaaacaaattttcttttttttttaaaaaaagaaactttcttctactgcgttgcttggactacttgttttaaagttattagataagtttatttctcaaaatatgtaatttattcttacaactaaacagattactgtcacgataattcgatgaataatctgtttcaaatgctaaagcagatcagcggcacctactgaataatcccgtgtccatccctacttttttttagacacaatttctccatctccctcgaggggagcaagccagcaagatctgaaaaagggttttaataaaagcataaacaattacttcaagttcatgcgtctccatttgctatttgagcaaccattttcaggagggaatccaatagttggcacggtgaagtcagagtctagctttaccaaattgagatatcgcactctcgagcgagtccctccattttagaccacacctaataacatcaagatcatgaatcctcccagatgtgaacctggaatactggaaacacgtgtatttcgtgcacaatgagcaaagttagttttacatccagaaacctgtttcgcggcgatcatttcacaatgatgtttcgctgagattttttttatataatggataaaaatccggtctctatatccacaagtgtatatacaaccaaacatttcagaaaaatattattttactataatattctatagcaatagtcaagattcctttggaatataggaattttacaggacttgaggtatgttccttttctcttacagataataaattatcacattcatgttttcaaagcacctaaatggtacgtttttttttggtaaaaagcttcctatttctatatataagtttcttgtaatacatctttagatcaacttttaaattttgtataactaatttattcacatgaaacacaagaattttacaagggccttcttcttttcctcttatagattacaggttatcacagtcatgctttctaagctgtgatttttgcaaacggtttctacatatataagttccttagaatactttttaaaatatttttttaactttataatagttacttcattcgcttgaaccctagaatattattttagaaagaaaatcaaataatccatcatctatttatccatttagaacaacagaactaggcctaattagttcagttcctataaaaatactctgaaatttctacattcctctgagtgatgaaacaggtggcagcagcagattggtcctccaaaatttcgacatgtgaaaaaggaaccttgctactacacccttcaccagtgagttccaaggcaaggcatcactgatcagtagttgtgctgttcccatctagtcccctgcttcttgccatgaactcaagtgaagggcacctcctttttcccctacacacaaaataaataaataaatcagtgctactaaatcacaagctggaactttttttccttttttttttcgcgtcggtgaccgtcttcaggtacactataactaaccaccaaaatccatgacatttacatgagcactaacaccccccggagcacacgcgtcatgggagacaggatttgcagagagcaacagcccaagaaaaggggcatgagctttgtgaaaattgtgactctgggtggcacatatgtcactgcaaaacttgttgcatgaacagggtcagaatgtgagttggagcaggaggaggaaaatgttggttgggagaacacaatctttggaccactaacagtctctccatcatgtatggtgatctgatcatctcttcctttgtgtggaattgaagtggattcagaaaggggaaaaaaaaagaaagaaaaggagctgccttgcatggcatggcaatggcacctggccctcctcatctttcagggtttcacatatcccaatcaaaggcttaatagcacatctaattgtctaatgataaaggatgatgggaggcaaaagtacatccatgatgatgataataataataatctctggtttttgtatagtaccatgtttttcagctttgagtggcgaaatttgacctcagcgcgacaccgagacgcggtgtactgattgatggcttgttctagctagctgaagtcagagggtgcccttttcttttttttgaactgcagtcagatgatgcttttgattgtctgaaaggatacttagtgttggtgccaaactgcccaatcaagatatgccagggaaaagaaatgatgaagtgcactactttaccctaaattgacttgggaattcaaattaagcatgcagttcttcagtcaacctatgaagtgatcattcatgttcgagaaaaaaatttgtaaaaaataagagtgtttttacgatggtctctaccagcagtattctacgactagtacagatcacaataaaaattgtcaaaatataaacgggtctttttgtttactgaagaagatgtagttgatcattccgaccttgtgtcctgaccggcctgaagtgaagtcttgatggatactgttaagttggtcgatcagttaaaatgaaggtcatctagtacaacaaaataatggctttcattgccaatcaatctattgctggcactactacaattcagaacacaattttaccactcaaattactttttactcactattcatttcatttaaacctataaaaatttagtcgaatatcctccaccgtcatcgtgtcgcgatccgcaatctctctgtatggatagaaggaagaatgttttggatcttagctcacagacttttgtgggcaatttcatccctgtgatatcatgggaagtttcatatgttgacaagggagagtgagcagtgttgacctcaatgatcattcaacatttcctgcctgctggaagccaaaatcttgtccaacaagccgtactccatactgcggctacatatacctctgaaattgctgatcaaatcttcaaaaaaaattgcaagttctacacgcgcttgctcgatccgtcgcggccccataatttttcaccggaaaaaaaatggatgaaaatttttaaccatggtaggacaataaggacccctttgcaagtcatatctgaagctctagaacagatgactgaacattttacatgttgtcaattaattaagctggtcggcagcttaatcgattgatctgaggataattaatcttgtcaataactgttttcacctaaaaacaggtagtagaattctctgatctcacctaaaatccatccagggcaaaaggtagaccagaggataattttgtcagaacatgagatgaaagtaaagggagaagaaaagaaagcatggaaactttgtagtgcagcacttgcaattgcaaagcaagcaaaagggacccaagagcagaagctcatgcttcatggtggcacgtaggccaccctcacagccttcactgccgacgcccggcccgggcccaccgcgcagcctcaccggcctcggacacgtgtacatagagctagtaagcaaaataaaaaataaaaaataaaaaaataaagagagatagaagcttgaactacacatcagtacatcacacacagagagacccttggtgcttactacacatcagtagttagctactggctggtttgttttgtctcctcttcttgcctcccccttataaaggaaggtgagcattgcatcttgctccttagtactcctcctcctgcatcatcatcccaatcctcaattcagaattcagaactgccatttgctaccttacataccatacctagctgaattgctgtcagttaatctcttgatcagatcgatcaccctgcagcttcttgttgtttctagcatttctggtgaagaaaccaaatcttcagcagcttaaggtaggagatcatcaatggggaggcagccgtgctgcgacaaggtggggctgaagaaggggccatggacggcggaggaggaccagaagctcatcaccttcctcctcaccaacggccagtgctgctggcgcgccgtccccaagctcgccggtgcgtcgatcgagatcctcgtgtcgcagtactactttatgtgtgttttggctatgtgcatcctacgatcgaggccgaaagtttatatactttcattgtctgaaaaagggtatgtttgtaataaaattatagggcttctccggtgcgggaagagctgcaggctacggtggacgaactacctccggccggatctcaagagggggctgctctccgacgccgaggagaagatcgtcgtcgacctacatgcccaattgggcaataggtacgataacattgtcctcgacacgttgggacaacatgcctgaacgtatgataaattagttttttaatgtatatataaccatttttatatacaaaacatgttaggtggtctaagattgcgtctcatttgcctgggaggacggacaacgagatcaagaaccactggaacactcacatcaagaagaagctcaagaaaatggggatcgatcccctcacccacaggcccctccagccgccgccgtcgccgtcgccagagaagaagcacgcagagagaaagaacacggcggcggcggcggcggtggccgagcagcatcagcacgacgaactctgggaggaggagtccccgggattctgcaccgacgaggtgccgatgatccacccggacgagatcatggtgccattgcgcgaccacccgccgccggtttgcacggccgccggtgcctcgacgccgacgacatcgtcgtcgtcgtcgtcctcgtcggtggcctcctcgacgacgagctgcgacgaggtcgacgccgcggcgctgctcccggtcctggagtggcccgacgacgccatgtgcctgatggagctcgacgagctgatcgccgcggcggcgccgccgtccctgctgtgggacgacgactaccgcctcccgctgccgccgccgccgctatcgccgccggcgatgtacgaggagctagacgcctttcagtgctacgaccagcagaggagcgcgtttgagcaggaggcagcagcttcagcgtggaacaagcttgagctcttctaatcaatcaaaattaaactctgtaaattatgtttacagtgtttattataatcaataattaccgaactaaaacagaacagtgttgtttcattgttctagtattgcctctctggttaattgttccattggaattgcattagtgtagtgatgtgaaatgatcaatgttctcagttatatattgcagaattcgatcagtttatgtcaaaaaaaatcgatcacttactaggcaacttcagtttttcttttttttttaaaaaaatcagatcgatgaaaattgtccctgcatgtgtggggtagtaataatccatgatattataatttcatatctaaatatgaccctgtttagggaagcttctgcaccttctcccagaatcagaaactcctctaaacagtctagtttttagtccaaattctgagaagctgtagttgtagaatccaggaaatgaactacaagctagaagctggaaaacccagcttttccatattcttggaagttgctaccaaccagctgcttctcagaattttaagttccccaaacaggctttatgtccctgtggctgatctttgtactttctataaaaaaaacagaaaattcagcaaagagccaatttttttcttagaaaataggatataaacccgacctctacatctaaccagatggacacaaccgagcataaagagcccaatgagagttatggatttacaggaaaaaaaatgttgtttgctttgctcttttttttaagagtaattctacggtctttgaggaggtaccatgactccatgaggtacctcataatatctaggtatcaaatttacaatagaaaaaataatacctcatggtatcatttcaaggactgtaaaattgctttttttttatgtcatgtgcacttgcacgcgtgcatgcagatgccgtaatgctaaaggaaaataaattcaggagagaaattaaagaatgagacctacgtatgaacaattgagaggagagagatagatgctgatggttgtagctagattctaagaagatcctactagctaccaaactctccttgagtgcagtgtgctttgtacttcacttcattcatatcccaggtgcaaaaggacaataatcaagtcgctggatctaaagtactcccatgggataaagttgtgtgttatgtgagttaaacataattttgtactttactatattctaaatcttatttatttagacgtgtgctataaatgtactccctccatataaaaaaacaacctaaaataatatgagatataatctagtataacaaacagatccatgtccatatttgttgtactagattatgtcatatcttatattagattgagttattagcggtttaaaagttaatactaagaacaaactaagggataaaaataactcgatcgaatgttaactctaaatttagattttaattttgaattccatggcggctaataagataataagtaaacaattggaagcgcaagtagattcaaactttctctcccatgattttacaaatttcactaaggttattgtgatttcaatagattttgaacacgacttatcactagtgatcttcctataagataaattttagtgttcctgacggttagagcatatatgatagttgtagaaatattaggataagattaatttgtttagaaccatttcttattgctaatcctttcatatctctactcatataatctttatacatatatcatcccgagaggccgagacccaatacaatcattcagttacatactatatttctcttcctatatatttatcattgcttcttcgatcgactacggatatatatacccatagtggaagaagcagtgatgaatatagggagaatagctactttagtccctaaagtttctctgtaaaatcagtttagaccctaaccttttaaatggtccaaagaaatccttaacctttttcataaggcctagaatattcgttgggtccaccaaaatcatcatatggatatgccatgtcatcattcatgcaaaatcaataatgaattgtccaatttacccttacgtatatcatagaaaaataaatataagggtgaattagatataaccataggaaaaaaatacttctttttttcacccttttgaggtatatttttgctcttacaaataccatatattttttaactttttccttttgttttttactttcctgtgcgtaagggtaaattggacaaatcatatagattttgcataagaaggtgacatggcaggtccatgtggcgattttggtgggaccaaggactatattagcccacatgacaaatttaaaggacttgtttggacaatataaaagattaaggactaaactaatctaggagcgaaactttagggatcatattaactattctccaatgaaatatatatatatatatatatatatatatatatatatatatatgtatgtatccagcgtgcgtgtaacagcacagtggaatacatatccaacgcgaaagaaggaaagcagaaatagtttctctagaaaaaacataaataatataatactaagatcatccatgacgcatgatgatcatccttagccggacacacgctcacggctcacatcagcttctttctacgtacaatgggagagaacgaaagtcgcatccatatgcaaaccagctagtatctctttgctcaaatccaaaatttgcatgattggcgcatacaaattcaactgctcttcttattttttattaattaattagcttgaatgcggcttgtcaatcctcgtcatttcacttaataacattattaaccgagaggttctgtatactcgctcgatataaaaatataataacttctaactcttaaaaattaatatgtcttaaagtcgatttcttcactaccttccacatcttaatctatcacaataattattttttaatcatagatatgtccacttcccaaaaaaaagattatagatatgaccactacctagtgactagttggttaattaggttatgaaaaattacatatatatgtttgtttgagctacatataaccaattttaaatttagaatttaatttttaagactagcatagggattcttaaggcgttttaatcattcagctttgacttccataccacttatataagtaaaagtacaaaaatcaacattaaaattattttccgttacatcagtcgtcgcgggtcttttaacttataaaccatgaataaaaaaatatcttccttgagtccgaataaaaagaatatatcttccatataggccatctgtaaggaatttttctctgttatatttgtagctagtcaaagtagcatattgtgcatgcatatcgtggcagctctctaccactacgacagaaacagtttttccatgcgagagacccagtaggtagcaggcgggtcgactgtctcttctttttatatatagagataattaattaactaactatgctctatttttgaaaatatttattaattaagttattttattatatttactaacatgtggcgtgtcaaatgatgtgtggacgtgcggcctcaatggtacgaggtgtatgtgcaacacacgtgctagctagaccatatgctttgcatgcggcggcgagttaattcacataatttaatatgtgttggaggattatttcactagctttgctttttcctaagacaaacaaacatatgtatgtatcttttaccatcagtttttaaaaaattatatagtttaatatcatattcaccatcttaaataagttttataatatataatttatacgttgttaaactacatgattttttttaaaataagtttgacttgagaaaaaagagggagtccagtaaacgctaattaccgcttaatgttctcatgttccaaagctagccctaattaagaattaaatttaagggtattgtgctgcttaattactataattagctagcttgggatatgtctagctatatgctattaataagacagctagttattcataggtagtgaagacataatatttgacttcttgttttatgcatagataatatttttatcatacaaaaccttgatcagtgtacgtgttttccacgcgtattcttcgcactctaatgtgcatgtgttggtcgatattttttttttccaaaatggatatttggtgtggaataaatgagcatcaggtgtagaatatctacacatgcgtctaatagtctgttgaagtgcgcggtcactcttcaaacgtaaaaatgatataccatttttttagagaaatatatgccgctttgacaacgactataaattagtataatatattttgaaaagttagagaggtttgttatggaattaatatttgagaacatttttctttcaccaatccttgcatccataattcgcttgtggtatgaaaattttacacttctctcttttggcactattccgttagtacttcctctgttttgtcattatctagtccaatctagtagttgttgatcattatgtacttgggggacattcaaattaatctatttatccaaaataaatatttaatctgtccatgtatattaattatcaggaattcttgtttagcattattaatttgcttgcggaaaatgaagaatatagggtaggtttaatttggtgccaaaatgaaccttaccaaaatttggcaatggcaaaaattttagtaaattgataacattgccaaaattttggtaggattggcttaataatgttgccaaaattccatacacattgccaatatttggtaacaaactaaatgtagccacataattattaattttaccaaataatagtatggttaaaaatgtcatcaatttgaacagactcgtactatagcaaaatttgctgctttcgctctacttcagtactccatccgtttctaaatgtttgacaccgttgactttttagcacatgtttgaccattcgtcttatttaaaaattttgtgaaatatgtaaaactatatgtatacatgaaagtatatttaacaatgaatcaaacgatagataaagaattaataattacttatttttttaaataagacgaatagtcaaacatatttaaaaaagacaacggcgtaaaatatttagaaacggatggagaatttgattaagtggactacaagcgtaattaatggatattgaattctggtactaatggtcatttcattggagaaaaagaaaagaaactgagggaggattatttccatggatggaacactcttttcttcatggaatataatttaatttattacgaacaagtatctatcaaacggggtgtttggtaataagaagaggaaaaaaaaaactaacgctggtttatctttgcttttgggcatcgtgtgacgtactgaaacgtcctactgtctactgatgatctcaagttgtcaattactgccaattagcaataatttaatcaaagttgttcacatcttcgtaggttgttcgagctgtttcatgcatgtacccgtacatatatgcacacaagttgatgatgagatgatgagttaggagcgtgttcggtgaggacacatgcatgcagtccaacaaaaggttctagatattgacattgacttgacgactagcttgatcgcagttccatgcattttttattacaagacattttattttttaaaataaaaattttgagtttaatatttatagaaaaccatagtaatattttttaaataccaaacaaatatattatcaaaacatttttaatgctagatttaatgaactaatttgatgttataaacgttgatatttttttataaatttaatcaaacttataaaaagtttttaaagaagttaaagtatcttttaatatgaaacggagaaaatacatgagtagaacccacggcgattcgtcgaacagctagctagaccagccttttccagcaacttccgagttcaaattaagaaatttgctctaatccggtccagtaaaaagtatctcgaggtaccggcacctcatagtactaaattgtttccgatcgttggatctagctggacagaggtattgttagattcaacgatcggaaacgatttggtaccatgagatattgataccttgacatactttttattggaccggaacaaatctctcaaattaaactctatcgatgagaatcgtttttctttccacttatacttcctatattattcttttcggtttaaagattatggattactgcaagtttgcttcctaaacttccaaaagcgacacttattcttacgaaactttcttcattagtattttttagaaaaaaagatttaaatcaactttttaaatgttcaatattttatttattcgtctgtgcccttaaataattttcataaacttagttgtatccatcacccataaagaatcttagggtgctttcttttctcatatttctcaacttctaatttttctgtttatcaactagctttattttaaaagttctatgtaaaagttgcttaaaaattacattaatctatttttaaatttttttaattaatatttaattatttatgtgctaatgagctagtccgatttctatatgagaaaagttttcaactcttcgacccgaacgcagacaaaccgggcagaccggacagacaaaccgggtagacagacaagagagtttggaagagcttgctgcagcagtagctacactgccttcgtaaaaaaaaaatcctgattttaaagccggacaagtgatttattaaagtatgattaattgtgtattaattattttaaaatttaaatagacttgcataaatttttaaagaaaattttcgagtaaagtgtacgggcggtccttaaacttgtaggggtgtctcatctaggtccctaaactctcaaaatgcatatccaagttctagaacttgtcatagtgtgtcatctaggtcccaaatcgcaacaacccattatagattctacgtggcgttgatatggcatgccatatggaatgacatggcatcccacattgaatgacttggcatcattttggctgacaaatgggtccaatttaaaatttttccatttctttttttcttctctttttttccctttcttctcctttctttgtgacccgagcagcagaagaaagggaaaaaataagaatgagaagaaaacgaagaaaaagaaataacgaagaaaaaaaaaggaaagggacacgtcacgtccatgtggcatgccacatgagccgtaggattctaaaggagatgtgtcgatttgggccctagataatacactttgacaagttctggaacctgaatatgcattttaagagtttagggacctatatgacacaaccctacaagtttaaggaccgccgatgcactttactcaaaattttctatagaatttttgttaaatacataatgtttagcagtttgagaaatgtgcatttgaaacacgatcatacgaaaagccagactgctataagtctggatacgtttattaaaatgtgtcacatctaataaaatttctttatattttgaaacggacaaagtaggctaaccgctcagttacatcagctgccgaaccagaagccacagcctcacaggctctgtacaggacagcccatgatgctagagcaagtttcaccgaatagcctcaaaatctaatcagtcatataaattaactcttacaaaatttaaaattcaagtatcaaaatatttaaagtagacaaaaacaaagtaaaaccgggcataaagaaagtacacgctgcgatcctaggcttaattaggcatatgaaaagaagttatgcgatcaaaatattaaaaatagaaatccgccattcaaaataagtaattggatcaatcattgatcgatgtggtggtagagtcacgatgtatagtataattctatttgttaggtttaaatccgagcgtccataaactatatatagatagtagaggtacttccttagtaaaaagaaaaagacggcgaaagtggaacgacgatggattcctctccttttatcatacgtaggtacatgttcgtcgcttttcatcaatttttttctcctttctgaatttcggcaaattaataaatttcctaaattaatatatgaagataacatttttaaaaaacacaatacaaacgaagacgctcataacatacacgcacttaccccaaacactcatggatatacttatcatatgagcatcttcgaaagactgggttgacatctacttacatgttcatctcttttcgtcgtttttctcctttctaactttcggcaaattaataactttcctaaatttatatatgaagttttttttagaaacacagtacaaacgcagacgctcataacacgagcacactcaccctaataaatacacacgcacactttatatctatgagcacctccaaaagactgagttgacatattttgagattaacgaagtcataacaggcgactcactatcgacaggtacgtcgcgtaccattaaaataataaatagttgtaaatacgagcacacacgttaaatctaatatttaaattcgagtgaactgattctataaaaaaaaaacctaattagttgaggtaggctcacttcactacatgaaaacaatacgatctttcattatcagggaaattattaaacaaattattaaagctgctttggagagacgacgcggttttaataccgctttgcaatagtacagcatatccacttgacctggtatcgtgagcgtctggactgttccggccggcagatggcgaacacgtatactcgacagtataaatgctactacgtactccctccgtcaaaaaaaaataatttctagggataaatctagacaaatatggatccagattcatccccaaaagttggttttttattgaacggagggtgtaatgcagtagcaacgactgacacattgactaaacccatacgtcaacgtctcctattacatcaactgtacaaatttcccaccaatgtgtggtgcccacgcccaagcatagctcctatatgcaaggttgccttagcctcttagttcccaaaacaaaaattttcacgctgtcacattaaatatttagatatatgtatagaatattaaatataagaaaaaactaattacacatattacgtgtaaattgtgagacgaatcttttaagcctaaatacgccatgatttgacaatgtggcattacagtaaacatttttaataaaggattaattaggcttaataaattcgtctcgaatttgtaatttgttttgttattagattacgtttaatattttaaatgtgtgttcgtatatatgatgtgacaaccaaataaaaaaaatttcacaactaaacaggccttgccagagcactggtatactgtagaagatatttgtgcagccaatcgatagcatcgatgttttctgaattgcccgttgctctgtgtatagaattagacaactttttttcaggagtattattatatgacctcctgtaacatttgatttttaaggatagatttattaagagaatcacttacgaaaattatgttttacaagcctttgctgatgaagaccaccctaaaagtatttttaagggtggtttattaacaagtctacatgtgaaaaaaatgttttccttctttaaaagtaatagaaaatttattttaaatccgattgaagtgaatcaaagttgtgattcttacattatttgctttaatataaatggccgggttcatatttccttagaacatttattttaatacgattgttactcatctcatctcaagtactttgaaattaagtagtaaatggccctaataaaaaatattaaccatgttatattaaagaaaatattgtaagcatctcacataattttggttcaccttcagacttatatgaatttttatagtttaaacttcataaagaaccgcaagtaaaattagatactagagcatatatataattagatacttagccctgttcttttctctaataagagttgaatgaagattaagatttttatcgcacgtttttcaaactgttaaatagtacgtttcgtgcgaaaactttctatatgaaagttgctctaaaatatcatattaatctatttttcaagtttgtaataattaaaactcaatcaatcataagttaataccacatcgttttgcgtaaaaaacttaatcttcatcttcaggagaaaagaacaccaccttagatgggctcaaatgtaaaaatgtaaaagagatatatagatcccgtcaatctttacaattctgataaaaccatgatgtaaaaccatgtctccatcagagattgtttgaaaacttatatctaagagaacttgtaacgaatatttggtcttctaaactctctcaaataaaaaaactatcaattaaattaataagtgcttgtccatcctttcatacattaaaattaaatgataggctaagtctctttaagagcagagatctaggtctttttaaaacagagtttttttagtaaggccttgtttagttttcaaaaatgtcacatcaaatctttagatacatgtatggatcattaaatatagataaaataaaaaactaattgcacagtttgtatgaaaatcgcaagatgaatcttttgagcttaattagtcaatgattagcgataagtgctacagtcacccatatatgctaatgatggattaattaggcttaataaattcgtttcgtggtttccaggcgagttatgaaattagttttgtcattcgtgtccgaaaacccttccaacatctggacaaacgtccgatgtgacacctaaaaaaatttcttttcatcaactaaacaaggccttgtattattcgtgatctcacgatgaagtcaggcacacgcgtgatcactacagtagtacacacaaatcgatcgatatcaatcacacactcatgaatcattttgtgtttgactcggaacgagcgatctatcactctctcaaactgtgctcttcctcactcttgacgatacaagtctaccggtttgctaattagcaacaaagtcaagaaaagacaccagaactcgtcaattacattgaacgttcctacctacgcgtaccaacacacatatatgcctattgcctaaggtctaaatcttgaagataaatacatatgtgtacaacgtatgtatacttcatgaaaggtaacttcccgatgaagtatggtcacaagtttaaattcattaaccggccggccaagattttcctgcaagtcttaatccgcacaatcaattcacaataatcgctgtttctcatgtgttgacaagtgctcattcccaaacgataaatttacaatggaggacagaaaatttacaagtgctcattcccctttggtagaacatatattcactcaggtacattttttactatagacgacgtacctgttaacaaacaaaacattgtcataactttatcagaaatatcgatcccttcctcaaaggtgcttataggattccactttgtaagaaacttcctgttgttagggcaagccggccggcgggaaatagcccttgtgtaaaattattatggttattctatcaacaacgacgactcaaatctgatgtggtgatggaattgtcgtggatacatgacttcactaaatgatgtttaaatcttaataattataattatataaaggtggttgcaatttcaataaaaaaatatgagtaaatttcacaaaactacaggtatttttgaacaatttatcacaaaactacagatttaagagcttgtttcataaaactacagatttagtgtcttcgtttatcacaaaactacaggtactttatataatctatcacaaaactacagatttaagaacttgttttacaaaaatatagatttagtgtattcgtttatcatagtgctacacatttagtgtcttcatttatcacaaaactacagatttagtgtctccattctcacgaaactacgcgttttagcattgttaaaacatgtaattttgtgagaatggagacactaaatctgtagttttgtgataagtgaagatattaaacatgtagctctgtgaaacaatttcttaaatctatagttttgtgatatattgttcaaagtacttgtagttttgtgataaacaaagatattaaatctgtagttttgtgaaactagttctaaaatctgtaattttgtgactgattgtgtaaagtatatgtagttttatgaaatttactcaaaaaatattgatgttccagatttattgttgctgtttctttgggcgtgtatggatgtggtgtatgtacatatatatgccgtatgcatgcattttccatacaatcgcaaaaaaagtcagtcatgtaaactagtgatactttttgatgaagtacttggtacagctacatatgtaggcaaatctatactttctataaagttaaaccccactaaatctaaagcttaatatgtaaccatgccacatcatcatctgctagtaataattacatatttaatttcatgcaagaatacaacatcatcttaaaaaaattgatacaatagtagtgcttgattgccaaattttttttttttgagaattgcttagtaatttcctacagtaaagcgcggggaatcacatagtggatacaatagttactgctgtaactaatttaggactcctctgatatacatgttttcttaaaaaaaaattccataggaactagttcatttcctttaaaattctcgtaagtttcctcagttccaaaatgaggccttatcatttactaccttcatgctaaaaaaatatctttctagacagtttatcaggttcatagttaaaaagataactgtagtatttatttacggggtagtaattaataatttggctcctctctccattctcaaatatctgacttcgttcactctccccatcttactttgactataaattaccttttattgattatattatgatttatatagtcaaatttatgactccagacacaccttaataatatagtagcatattttcaagcagaagtatatatagggaatttgaacttcaattatttgagaatgggggagtatatatagggaaaatatgtagtgaaaatcatacatacagtgaaaacttaaaaaactaccgttggataaaaaataaacttttaagatttgttcatgtcatcaatagtaaaaaaatttacttacatattcaacaaagagtaaaaaattagtaaaatttttacttttggtgacatggataaatcttaggcatttatttttaaatccaatgattccttccatttatcccaaaataagtttatttttcagcaatcaaagtagaggttaaatgcattaggagtagataaaatgaagaataattgtataaggatttaataaaatagagatattctagtcttttattttttatcgatatgtgagatgagtgaaaaatgaacctattttgagatggagggagtaatatatataattgctggtattaattaatataaacttgtatgtctaattaagtcattttccgtgagaatttcatatacatgttactaacataaaaacacaaaattgctcccaattctacatttctttgatgtattagacagtcaatgcaacacaagtcggagagttctcgaagctgaactttctggtaaatcaattatcgccccatatatggccattcggtgatggaggctgcagcggctcgaaatttcctgtaacgttcacatatatacatatatcgtggttaagcttatttaaatttattagttaattaatcactctctcggtcatttctggataaaccacttgacagtttatgtacatgaacatcttgacttggtgtgtcctggtgatggtttgagtcttctgaaactgactgacgatgcataagcatgtggtttagaaactctggaaaatcacccattgcacgaatgggcaaggggggggtctccatcataaccacatcaaagagaccatcaaattaatcacgagtaagcgtatcactctagaactcatatctgagagctatatactttggtattgcaaaagactagacactatcaaaattcagtgggacagagctactccctttatttttttatataccatacttttatattcatcttattaaaaagtatatataattatcatttattttatagtaatttgttttatcattaaagtactttaattatgacttatacttttaagtatttacataaaaattttgaataagaaaaatgatcaaatgtagcgttaacggtgtcatatattaaaaaaattgtaacattaaaggtctcatatattaaaaaatagaggaggtattactataagatggatagatagaaatcactgaaattttagtactatatcataatttaaagtggcgtttggtttactaacaaaacaaaatttcgatgttactaaattttggtaggatagcgaactgaactaattaactctactcctactgacacagtagtcatgatccaataggccaatcttgataattacttttttctcggatgctcgaggacacaatgacgcattgtcaccacacaaactgacacacaggagaacggcaccttcaccgaccacagaaaattacttcataaaaattgagaagtgaaacgaaacaataacctaaagtctagacaagatctcttgctttcatcaaaggaattaacagcaaaactccagatagatagaaagacgacggctcacctaaccagaacataacaccccacacgatctgaataaactatcaattgattaattgattattgatacagtatgtaatatatatatatatataatgtcaggaccagaaaagcaacagcataacacctagatatagctagatagttcttctttaatttgttatgcaactcatgacccaccttagcttatccctgcacacaccaactattttatacttgcatgcacagcaaaacagaattgcagattaatctgaaagtgtcaaccctaccaaacgtccaaaccacacaatcactttctgtgatggctgagtttgagaggagaggaaaagagaagatcgagaagatacgcaaaatgaggtgagacattagcgcatgattagttaagtattaactattttaaattttaaaaaggattaatatgatttttttaaagcaacttttctatagattttttttgcaaaaacacatcgtttaatagtttatgaagcgtgcgcgcggaaaacgaggtgttttctctctcaatcactcagaaacgaacgcagcctaagtactattgttagttgtgacataaatctaacgaagcagtgagatggaagaatggtgtagtttccttggtgaaatggctcttgatgatgtgattggtcactggacatccatgatccatgcatgtgttcaaatgcaacaagttgatttttttttatcttgatttgttagtacaagcaagtgggggcgaacctaggaccaaaactagttaggtgattctcgttgctactaagcatagccacagaaatgttttaatttattttaatatgaggtaattaaactagcaattgtctaaacacttaagtatgctgggcccctccagaaatcaacatggcaatgctagctctgcgtcactgaataattacatggcctttttttttctctctaacacatttattcctactacaatctccgatgagtttcatatgaaatatgttatacagaaaaaatattgtaaggttaaagattaatttttcatgagctatgttcttaatatctgaaaccattttgtgaaagtacttgaagtatgagtataatttttatacactaggtgtatatataagttgactaattgtagataaaatatctatgaagctgggctaattttcattttgagagagaaagcagttaacaggatcaactattaagagctactgtatgaaaatgagctgagaagcattaatagactgacctggatgtgcaacaggagtgaaggcccaagtacaggagccaggaggtaaaactatagttgcaaatgatgtgattggtaaactgggaggtcaaatccagtgtcgagcttttgtttctgtcacagcatcatggtgcaagagtaaatattaacattactaacttggtgtttcatcaggaaaaataaatttctgcataacatgtgcctaacaaaatatataatgatgaaaagaactacagtgaccaccagagcgatacagagacgctagttgtgctggtctaccatgactcatgaccgttcagatatcatcctctttgcacttctccagtggactcagcttatctcaactagccaggggaaacaatagacaagtagtgattagaacaggataactggtctgatacagcaacgaattctgaaaaaggcgtcaaattcaggaaaggcgggcgatgacatgtattccagtacttacagatgaagtggtctctaacgcgctttagtcctacttgttccccagatggtcccataataacgcattccctgcaaagagtgtgtgcctcttggcttagcaacaattgatatcttttcccctgcatatagagagagaagggatgataaagaacaggtagaaaccattgcttcaattatacttcctccgtttcacaatgtaagactttctagcattgcccacattcatttagatgttaatgaatctagacataaatatgtgtttaggttcattaacatctatatgtgtgtagacaatgctagaaagtcttacattgcgaaacggagggagcatgagtcagaaggctaaagccacagcaacacacaccagtgttagcaccttgatattttagcagagctttgtaaaagaagatctgaagttctgaacacctatcattctgcaaattttcatggttattgatttttttcttttattgtttgaactctaaatcaacttaaaactcaacaaactatcactcattttcacatctactcaagtgttggagtttatttggtaaggacttagaaagactaaaaaaccatcatcctgcttaagaaattttttcgggaggaacattctccaatcaaaatgctaaatgagagcttctcatcagctctcaccatgcataatttgaaacatgtttaggtaaatcaaatgtgttaataatgttgcagtgattaatgataactgatattataaagagaatctcgtgtttcggtgtccaccaaacacattaaagcaactacaaatatagaaaattctgtaaaataaatgccaatatgagtgatcagcgttagatagtaaggactaaggactagccagtcttcaataaacaaggtgactggttactcaagcaagagatactatacaactctgcaccctccccttatcctcgtgtacacacctccattcagtagctttgggaaaagaataccatccaagcaagagacatagacattacagacaataatacaacctcttactcaagagctgtagatgacctcgcattgtttggtactactaggattggcaagtgacaaccattccctaactatatatcccaagataacactagtaaaataacaacgcccatagctagtgggaacagaaattgcagtttccctgatctccaatgtcaaaaatattgagtgggcacttcttcactagcctatctgcatcatcaatttttacttctttgagaaaaacaactacacaataatataacactaagccatgaaaacaatagtatatagcaactcatggttttcttataagagattccagcaaaagaattttacctcagggaaattctgtaccaggctgtagtagcaactggagaccacttagaatgaactttcctcattcccttaacagcatatgcctcaagttcaatagcctaaaatagaaccgactaggcaaattagaaggcacggtggtttgcggagaattaccccatgaaaaattagtaaagcaatttcagagtagcaggtctctacaagaaaatatctttgcagaaatttctatcagcatgcacatgaactcaggtttccagcagaaatttaagccgcaaaaaaaattgattggtcacaaaaataatggtaaagctacatacatcaggattccaggaaatgactgcgttgaaatctttattataccatgtggactcagcaaagcgccataatccaaatagtaagcctaaatgacagcagatataggtaccaagtatatcatatagtgtcaaggggaaagccatgataacaaccaccataacaaacttacttggccaggtccaaacctcataatagttatatcgttaaatttcacaccatcctttttgagatatccttcttgctttggccgaaggaagtgtaggtcttttgcttgttcccagattgagcaggagatgacatatttaattggctattttctgctaaccacacctcagtagaaaatatcagtcaaccttacaggaaatatgacaggattataataacgataagggcacaaagaatagaatacttaatttatcattgatataagtcttaggttttagcaatttaatttcttacatgattgattagcataagagaacaacttcgcaaaaaaaaaagaagagataacaagaagtctagccatcaaagctttccaagtagaacaatgataacagaattggcatgaataagctgaagtaccaataactaaggatccactgtttgattcagcgtgcatgaatgatgatggtatcagaaaatcagttaagaaatttgtttagatagtttgagtttttggtacacaaaatattatattggtacatagtagcattaggcacatgctttgctgccaaggatttaccctcacttttttctttgtaaattattctgaacagagtaaatctgattgatgtggcatcaaaatatttttaaatgattccaaatagttttggcttttattaagaattttttaagatggaagaaaaggttggtgccttagctgatttatgctgtatattcagataataatatgaaatgtcgtcaatgtggggatttacccattaaccgcatatctaaagactaaggatccacaatttgtgaaacataacacagttttcttcttatgtaagtctcgtagcacagaatgtgatgtttcaaacagataattggatcatcctcgcttaaaggagatggtggtttgaaggtcactaacagcatcaaatcaggttgtttaatctatccagttgcagctggcaggtgcaaattgtctcccataaaaataaggtccacaatttcaagataaatttgtaaacttgatgcttatttagtaaaaatgagaaaaacatggcatttagtcttaaaagttaaaaagcagtgaataaaaatgactccaaagaataacctggagaagaatatttagaaataaatcacttttgcagttttgcacaattcaaattggaagggaggaaattcgtacttagaaataagatgattggaaactgtgaaagggttaggttgcaggacagcgaagataactgtaagctgggggcctttctaacatgaaacacgcagtttgtacacaataatgaggcatcgttctctacagaacccaacgaaagaataatacagctattattcatacacaagtattcatacatagcaatcaaatatatgaatgtggaattagaaaattttaagttattgacctgagatataataaaaaggatccatttgcatccagtggaatcaaaccaagcctgtgtagaataacttcatctggtgtaactgatgtgttgtcaaccatgaggactttctcaattttccgttgtaggaacattgtaatttaaaataatgaagtacatgtattggaatggaaccaccaaatacatgactcattagaacgcaacaaacagttttcaagatggtagtatggtacagatggcaacatgcgcatacctctggtacgaggattcttcataaggcattagttatcgatgcatcaacaccaatcatatcaaactccatattatcttcagtctttatacatataaaacagttaggccttgtgcacacaaatatagagtaataaatataaatgttgtttctaaagaataatctaaaaaattaacatcatcaatgtcttctaagtagcaaattttacctgtataaatagacaattatgagactaacagactcaaaaactgaatatactattctgtaaccaccaactgataagtaaacatccaaacaacctttatacttttcaaatagcacaactagataagcaaaatagattaaagacagggcaaataaaactgaataatgaaaatgaaaaccccttctttccaacactgtgagaattaatccatgagatgcaataaggtagaaagtgtcatgctgtattagagatcaggctccaccttcgcaacagcaacctatcagaagttcagaacacatgatttcttcaggaacaaaaatagaatttaacaaacaaaaattacctgcagaaacatgaatacaggcatagcatataggtgcatcattcgttatagattctacgtgttttctttcggtatttcagcttgatatatcatcggttgggagatgaggatttgtcccatagcctcgagtatttttatttatcttttcttgactaattggccatatacttattcgcagaggccgaagatgtaaatcatttttattatctaaaaaaaatataggtgtatcataatcacacacaaaaaaaaaaaaaggtgcgggagcagaagaaagagtagcacaacaaatggatacaggagttggggcatcagcctcgcagacggcacgcgcgatcgccggagctcaaggcagtcggggagcccgttgatctggtcatcttcttcgtcatcttccccttgccatcttgctcgcttcgtgctggtgctggtgctggtgctggtgctgctatgttgctgagtttgctcgcgccgcgtggggcgtggccgcatccaatccctctcaccaccccagaggacggattggttgcggcgctcgccggagggcatgggagggaggcggcgccggcggcggtgggcgagggagcgagtgactcactccggcgagtggacggagaaaggaggaagcagtcggcccattttagacaattgggcccaacccaacattggaacgctaccaatgggcccaatccaatacacccgcgttgggtatggcaacgctttggcccatctttatctgggctgctaccagtgtagcggcctaattgggtccgtttgtagttatgtatgggcctagattgctggcaaattgatccatttgttattttactccgattcaggattttgaacacaaacgatatagttatttgcaccttacaaatgtgtgcttgaacttctaatttgcagcctaagagttgatttaagaactattttcatttttgttaacaatgccttctaagtgtctgacatttagatgtgtttggcacaagccaactaaatggacagtttctagcatagcgtaaatagaaaatgtatccgtgttttcgtaaaacaataagtcaataagccaaccagtaccgtgtccccttgtgatttcaaaaatgggattctttttatcttatgttaccattgttcttactttttttttttgcgatttttgacgatcatacacatcgacttgtgtcagccagttgtcatgttaattctcttagacagtgcacgtctatcatgtatctcggcttttcccattgtgtaatctcagtacttgcctcatacacattggctcaccacatcacatcaatacttcatgcggtgtccatctatcatgtatctcacctttatcataggatggttcatattattgacgaaggctgacctcaaatctcataaatatcaatagactaaataattgtatcgggaatattttcttcatgacctgagccattttagtcaacataagtgcgcacacactactgtacaagaaaactgcagtttgcaacttcaaaactaacgaattccatcacaatttatcaaccatagtgggtgatggattagtagctagacaatgacaactatatatgcatcgcaaaccttttcctccatctggtcataaatatttgacattcacaataagatttagttaaaatttttaaattctaaccatcacttttttttagagtacttagattattttgtttcaaaaactcattttgagaaactattaatgatttgaattttaaaagtttgaccaaatcttaatctaaacgtcatttttttatgaccaaaggggctagttttgttcagttatttaaaattggtttttacatgttgcaacgcatagacattattgctagtaaagtattcaaatggtagatgtatatgatgttgatttataacaaaacattgggtgcaacttgtttacacttacgatacgttgtttctaatgctctattctactacttttgtcccgtaaaaaataaatttctaaggaactaaggatacattaggagaatagacaaattatcataataacctcatttaatgaacacagtgtatgcacacatttcatatataaacttgattaaaataaggttaaaacaatgagttagagatgggatggaaggaagagagattacaaggaaatatattttgatgtaatcaatttgttgggtcctatattaaatactccctccatttcagtttataaattgttttgactttggtcaaagttaaactgttctaggtttgattaagtttgtagaaaaaaatattaacatttttaacacaagacaaatatattatgacaatatatttaaatttacatataatgaaactaatttggtgctataaacattaatatatttgtctacaagcttggttaaatttggagtaatttaactttgacaaaagtcaaaatgatttataatatgaaacgggagtagaaatacaatttctacgagacaaatattcaaaggtagaagtttaatttttatgagggaggtagcaataattatgtttctgatatatttttctttaaaaaaaatgtttcaacagtatatcctttcttgttctaccgttcggttctgtttccgaaaaggaaaaaaaaagcaaaggaaatggtctgagcatttttctatccgttttcattcctagccctttagccataaatattaaatattaatatttagcacaagttttggtcattttttacaatatttatgactacgtagagtatactagcttgggagagactacaatcaagtaaacactgtaacatatcactgcatgcgatctccaagggaagcataataatcttagttagctgcgtgatgtgcatgctacaaaaactcgctagtcattacaatgacaagcattctcgcctgtatgcacaaaacagtatgcaacaacaaatgtaccgaacatataaaaatggccatggcaatggcatattggcatcagggatactctgtttgaattctgaagctagctttgtatgtttaaggctagaaccaaaaaacagcaaaattacatacgccgaatctgtaatcctatacaactcagcagcatttcttttcctctcaagtccaatgccgctatggctcagggcaaaaataatcaagaacagcctgaaattacctgcaatgtcacagctctcgtactactaagtggcggcggctgtggctagatcagcacttataaacagctctagccaaagaaagattttgcagccaggatagaaacagcatctagtgatctcttcctatgtctcatcataccctaacacggatgcgaaagaaggcgtccgatctggcatcaaggtcagccgactctcgctgagctgaatcttcggtatacaatgatcaccaggtctcatatctgtaactttgtgctggggggctcctggctgctgaagctgatgttccttggctgacctaagcacagtgagtcctcgcagttgttggtcgaaggggtgatgtccgtgcacgatgatttgctcggtgtgctgggactgccaatggtgtcactgctctctagtggactctttgaggatgggtatggcgcaacacttgacactctacatgataaacaaggcacatgtcaaaaatatgcacaagaccatagtaacagatttcagctgcaaagtaaaaccacaagacacacgatgacacgatttatacctttcctttcgcttctccaagaatcgggcgagagatgcttttcgagcttgaggcacagctggaacaagcaagaacatgaatcaatctcgaataccttatgaaacactacagtagttacgccgggaattcagaattccaaaaacattacagaactagcaacatgaaggtagagccatatacctcttggcatgatagccgaagcatttgtggttgctactggaatcggctgggacggggatgcctggctcaaaggagtaacagccaacggtaggcctccagatttcggccccgcagagtcgttggagctagaaaagctcttggggagagtcacagcttgcgacacgatggtgatcggattcgaaacccctgatacaagaggcacagaagcctctggtttctgaactacaatctgccttgcaggcaaagcctcgggcactgtaagtttcgcagcagcggaaataggcgaatctgatttacgagctgcactcggtggactcggaatggatgccctgcttgccaaaagcataagttcttgagcctgccacagttatgacacaatcaggaatcatacccccaagaactgaagtaacatcaaacagatttcgcgcgtcgcaaagatacgataccttctccaccggaatgttgtcgaacacattcaccaatccatcgtagaatatggtcatctgtgtcaccttcggattttgaaggtcccttttgcaagtcaacgatccaattgtcagctcaatgctttctcatttttttttcttagctttgcactcaaaattcagaaatgatttctattagagcagagtagagattatccaccttgggccgccgtagacgccgacggtggagccggccaccgagttgccgacggagaaggattggttcctgtaggggctcccgccggcgacgttggggaggctatgaacccggagcatggggttcgcgtggccgaacggcacggggtggcgcggcgacggcgacggcgacgggaaatggtgcggcgccgcgacgccgtaggagtccacgccctgctcccggtggccgtgctgcgccgcggcggcgtactgctgccggccgttgaatccaaactgccgctgcacacagctcagaccgttagaatctaccatgggagggacacgacgtgggcgacggggaggtcggaggcgaggcgaacctgcttcatggcggcagcgccgtcgaaggcgtcaccgggggacgggcgcggcggcgggcggaacccggagagggagaagcggtcgaacaccgccgcctccttggggtcctcctccctcgccgccgccgccgacgacctgaaggacatgaacgccgacgacgcggcgccgaccttggtcgccggaaactgccactgcatcgccgccgacgcgcctcctcctcctcctcgataatctgcatcacgagaaactacaaattcactcacaaatcacgacgcacagccaaaaaaaacacaacaatcgcagcacagatttacctacgcagaatcgaagaaaaaaaaggcgctaaatcacgcacaagaaaatcgtgccgatttgaacaagcaatttaaagccgtcaaaaaaattgaaaaaaaatgaaagcctcttttataactaaacaaaaacaaaaaggaaagctgcgaattgggcggccaatcgatgccatcccaaatccgcagctgcacgcattcatctctgctctggtggatcacatcacatgcccgaaatccgagctcgcatcgcacccacccaattaaaaacccgcatcgccatggccgcgagctaagccgctactactactactactagcaccaaccaaccaaccaaacgagttcatcatcaaagaagaacagtggagcaccgacctgaatgctcctccggcttgccggccgcctcctccttcctccaaatcgcgccaagaaaatccctctccatcccacgcgaaaaaacgcctcaagaacaagaaccaatccaagcaaaacttttatcccctcttcctcttcctctccttcttctccacgatgccttgacctttcttcgcgctgctgtgcttcgcttcgctttcctctctctctttctcttcgtttcgattcgattgctcgcttatttattcgcgagatttaggagggagccatgattagttagagataatttaatcattattgctcaccgcatttaattaattaattaattaaaaaaagaggatgggggtgtgggccccaccccgcccaccggctcctcctctcccgtcgtccccgtcccacgtggttcgcctccgcacacgcgaaccccccaccccccgcgccacgtaccccgcggtcaccgacaggtggggtcgggggatggtgggggccgcggtgtcagtgaggtggcaggggtctcggcgggggggcgttgtgccgcggattattatttaaagcctcgtgcgacgacgcctcggggggagtaagagcaaggataatagtatataataagattagctcttcttaaagccaacatagtatataataagattagctataaaattgactataattttcttctcctctctctatctctcacttatacatttaatgtatttgtcttggagattgtgttaagctagctcttacatgagagccaatccacttgatttttttgttacatctctccttcacgtaagtttacagtcaggttatagctcactattatacttgctctaaggtgggcccgaccacgtgcgcgacgcgggggcgacacgtgtccccaccagcgggggcgcgcacacacgagccgaattgcgatccaaacccgcgaggccccacggagtatgacgccggggcccacctggccaagcgggagggtggtgggtcccacgtggttcgtgtgcgggttcacgcaaacccatggtacggagtagtggtaaaaaaagattaaattgaatttttttaaaaaaaatgatagaaattgcgtcacgggggagtttggaattagcgatgtggttagtgtgctagtgggggtggcgttgagggttttttaaatttaaatgtttagtttcctttaattttttctattgtttttgaccctaccaccatgtgcgcatggctgattttaaattttggttgtgagttgctttcgtttttttccttctaagtgcagtattttatttttcttcttggtcggtccaggttgatttgggcagatttgtttattgccgtctgtaaaatgactgtaatgcccttgataagaaagagcatgcagcaagatactcctagtcctaggaccacttgacagaaatacaaaaccactgaccagtgactgagtttgagtttgtgactattcaattgtgaattgaagaatccatgtacgaatgcagtattgtatgcatataaatattatacttcctcctatcataaatacttagaatttaaaataagatttgattaaaagatttataaattttcaataggaaattttatatgaaaataagttcacgattttgtatagtgggcaattttatcatgatataagtacatttcgaagcaatgttttgctcttgcatgcaagaaattattgatgaacaaaactgtaacacttcagtttgatcaatatttgtctagaacaacaaatatttttgaccggatgaagcattgttttgatgttctgtacctaaagcaaaatcaaagataatttccaattgcagttataattaaaccacaaaattttccactcggtgacaagggtgaatatgaggctagtgaaagttgtgagagcgaacaatattgatgcggtggctcactagtcactactaggcttcattctaatttgcttgggatgatttaatgatttacaagaggatgaaaatccatacagagaataaggatagatgattgaccatattattgttgtggattatcgaccttattacaataataaattaaatattttttaaaaataaatttacaaataacgtagaacatgtattgtaatcaatgcagttgaagaaagtttttttgagaaaacgtattttcaaagaaagtttttggtgaaaacgtatttttaaagaggcaagaagcaaacaatctgagataataatttggtgaattatattaatccgagctagagtggtatggttccaatctattatattattaaaggaatagaaaaagaagcctccacgttcgctttcatggcctagaatttatcacattaatcggagaaaaagaaaaaatagagttcatataggaatacaatttaataatagctgaaattcggaattaaaagtatggaatataggaaggtaagactagagtctatatcgttatacaatagaactaatggaaattcggaattaaaaaataaaaaaaattaaatgtagaggttagagttcatataaaaatacaattagaaataaaaaaaattcaaaattaaaaatatattggatggagaatatagagtcaatatagaaatagaatttaaaaataattaaaattcagaattaaaaaaaatattgaaagataagtttagatcaacataaagaaatacagaaataatagaaattaggaattaaaataaggaatattagaagaagagtatagaatacatataagaatttaaaattcaaaataaaactaataaaattaaagtagaatttagagtacatatagaaatacaagttacaaataactaaaatttaaaggcatatttgaagttcgctctcataagacatgtaaaattatattgtcattttaatatatttgaataatacattgagaaaatatatatgctattataagagagaaaatataataatgctagccgcacaatctgcatgggccactatgctagttttcctaaattacagtggtacgtagccaatatcatgaatagtagtcgtatttatctaaaatagaatatttgtagtgacattgatgcaattaacctcatttttaaagtgagtttggcagtttgcatgactaacagtgtactggactcatttgcagcctatagctacacaagaaagctcgacacggctgcaacgagattaattaaaagttactagtcaccgggttgtttaatctctctattacgtttgataccgaaataatatcgtcagagatcttcaccgactacatgaaaaataattcagcagatctagtgcatgcctgccaaccactaccagtgtactgctcatctgcaatttttggcctattatatatgcatatatatttactcatacatatattgcgcgctatcaaggatgcgtataggcggatgtatatcagaatgaaatcatcttttggcttatacgacttatcagccaaaatttgaattctcaaacttaaatttaacgttgattttagggtttttccatcagagtttatttttacttttagatcgccaataacatgaatataaaagttttattcataaattattttttatttgtaaatataccgttttcgcttattccaatgggtccgatagtactccctctattccaaaattgatctacgtatttcataggtacatcaagaccaagaaaaactaataactctctcatactatatttactctagcaacaaactctatgcatgcaccatccctactattttctagccaatagcaaatcaagatattgcatgtgggttataaatacttgtgtgcatggatgcatgcatcaatgttcatttactccaatgcacaaataacgaatagacataatgaatgaatttataaatacttgtgtacatggatgcatgcatcaatgttcatttactccaatgcacaaataatgaatagacttaatgaatgaacacaaatatgtagatcatttaggaataacctaaaaaaaactacatgtagatcaatttagaatggagggagtatatgacacgcgtacacaacacaatacattaatactaatagtacaacatgatactccctctgggctgataatacttgtcgttttggacaaggatgaagtcaaactttagaatctttgattatgaatcatttttaaaatatttgtctttcaaatatggtgactatatgtgtatagattagtctttaaaaagtactttaataagatcatatatttgctaacaattttatacatattataatgaaaaataatggtcaaagttgttttttagagaccgtgtctttgtccaaaacgacaagtattatcaactggagggagcagtaacattggagtttcaatacgtacgcatgagagttcacgtgatactacactctcgatcatcatcacttcttaattaataattatattggtcaaaatagtggccgtagaaatgatacaaccaatgcatatgcatgtccggcaagcaacagcaggtagtatataacatttgttttacatatccatgtgcaaaacatcaatatggcagacacaatttttggtggaaaattatttccatatatattcagcaaattagtttgtcctggtttgttgcacaataggatcaattaattctgtggaatttggtttccaagttcgtttgtcaaactacattacaatagtcatatacttagaccagcgcaaaatcgaataaaacctcatttgtcaaaacatgtacagcagtcattaattttttcttaatatatatacttcatctgtccgaaaatgtaaaggattttgggtggattggacacatcccactagctgtccatattcatagtattaattaggatgcgtccttatcaaatatacatccgccaatttgtttcccaactctacatataccactaatttgggaaatcccttgtcctgaagacaagtggttctaatcccacatttgataaaaacaccaggtgagtgatataaaacaagacaatttcaatatgtaaataaaagcagatatcttcaaaattattactggtgcgataactatatttgctgggcaatttggctaagtcgtaatgacgatattgtatttggttaaaaaataacaacacaatctctctacatgcgacttcctcaggaacttattgggtccaccattggttattatatcatcatggcttgttgaacttttggaaatggggccatggaaatatttacatgccataacatgaatggagtttttgtaataggatttagtgcaaattgaatttattttcattaaaagtgttgccttctcataacaatctctatttttttttgctttattagatatatagcaagttgcagctgaaaccttgtaataagttttggccggatacatcctgatatatgacatattgattgacttactttatcgaagaaatatcttcttttacatttgtgtggaagtgaatatctatgtgtgtgataattaataagactgtcatcacataccaattactcatagggttaaggtttagggtttatgtcgaacgaattccaccaattgagtgtaaaacctggttaattaacttcgatccatgcagaaagcccaattaatatgacaatgattcataatgtatatattactattccagaattttaatatttaaaatcccctcaaaaaataattttaatatttgattgacatgtctgttactgaaccttgtaatttatatgtgttggcattctacaaagctggatggacgtctgtaagtcaagaaaatatttaattcacctcacatatgccaaatgtaattttgttggaaaataatagtaattgcaaatttcatggatgatttatgttgtgtagatcaaatatcgttaaaaacttatgtttaattatgatggtgcagcactttgatttatcatttatatatatatatatagaccttgtgttacatgagggtggtacatatatattgtggctacaagctaatttagccctggcctaacaagatagacttctgttttcggtgagccatttgcctttgattattttgatcattatttttcattggagatgatagctttcggttagtatatacaattgaatcatgcttgcatgatcgatcggtactaattaataaacacgcacctggggaagcattatatatatttggatgtatgctttggctgtcatggagttggaaagactctagatctgataatttatgtagtctatataaacaagtatataggcggttgagtctagaaataattcataaatatatgtatataccctctacgtaaaaaaaaactaatcctaactacgaatctagacatatgtgtatccaaattcgtagctagaatttattattattatttaagacatagtagtgctcgtatatgtgagcatgcgagatgaatgatagactaaattaattaatggataaaatttggctagctagctgggttcgcagagaatggacggatacagttatcacataggcacatatcattctattactctaatctatcgctaataattaattaaacagcttacattgtggtccaaaagggccaatttgtaatttaatcatgttttacataataaaaagcatctcttgaaagctacttttaatatttatatttgcactgcacgagctgcagtacgtaggggacaaattgacttccttttaaaaatctagtcgatcgatgatctagatctatgggaaaacggcttaattagtaattaatatttcttcaaaaatcgtctcacaaggtacagttaaattaaacatgcatgtggcaaatccatacatctcgtgaagcaataaactcgaaattggggatcacgtaccattagtcaacgtgcatatatcttgccctaactaatcttaattaatttaaaaatcacaggaatatattgaaaagctgaaagatatatatatgatttcttaacttgtttttgaaaatgaacgactcaattattcaaaacctaaaaaaacggttcgaaggacggttcttttcacaatataatatatcaaacgtaaaaataatattatcaaggagaccacaaattaataggatgtgatctggacgaattaatggagcagtatattttagttcgtgtgtaggagcacaatatagtacagctgcttagacaaatatctttcctgccttgaaaatacacatcaaccaacaaagttcttagcctgttatacaatattgtaacttgttcaaaaaaaatattgtaattaacatgcaaatgcacctgcagttttagttggtacctactacaattattttttcacttgacttttagggcattaaattaaggattgtatgtttgcaaaaacacttggaacataataatatagcatcatgagcctatatagtcttaaaaattgacttttggatcgaattaattgatgtgagatgcatatatatataaatctttcaatctcattgttcagcaaatatgctgagacaacttgcacagattaaagagacaccaccatttaatcttttgttagattgtactttgaatgccttgtgccaaaattaactgaaaaattagtctctgtcagaccattgatgcatgcaacacaccacacatggatataaccaagtaccatttcgacaagtggcactagctagcccctcgtgagtcggtacgtgtgattttctttgtttattatataagcgcaatgtcaacttaattgccattcgctgcaactcataagcacatgcttaggaggtaagaccaattcattgagatctgcaaaagaaattgctggatgataaaaaaagagaaacgaacgaacaaacaaacaaatttccttctattgaaaatcatgccatttgtatattattttgatgcttggatgagttgtgactcacacaattaatgtaactataataccctattatatttttcttatttaccacacatgtgctacattgtagataactacgtaccctccatctgaaaataagtacatttttatacactgacctaattcatgtataaaagtaaacttatgttgggatgggagaggtgtagataaagtaagggattgttcgtttgagctaacgatgggttatcgcgagcacgcttttcaagtttctacacggtattatctttgtaagaattttctttgtcatcatttctcgaataacttttttaaatcaaccttttaactttctaatatttaattcatccgtttgcacccttgactaattgtcatatactcagatttattcatgatccatcatccatcggcactttagaaataggctggcagagcataaatgaaaggagaagaaaacaaataaataatgtatctacggagcataaataaaaggagaaaagaagaaacaaatactagctggacaggtatggggagagtgatgatgtttcatactgatctatctatatatgcactgattgagtatggatttgatgttctaggcctagccatatgataataacttgacagctctatgtatatcaattgtgtgttcttgtctcatttgattctgtataaattaaggaatataatgaacagtgcagctagctagaaaacaatttgtaaatatcataatcaaatgatgttaattatatacagtgactgacgacccttcatgtgccgtggcacccacatttttgtcatagcaggaattaattaagatgttcaattagtcaaggataagagaaaagtaatatagcttgtgcaaattaaccagcgtgtgagagctagctgcagcaatactgaaatctctagcctttgtttggttcagtctggtttaattagcttgttttattgtgaagtttgtcagtaccggggagcaggaggtggtggtgttaactgttaagccttctgttagtcttagttaattcattttttttgaatgattgaccctgtccaacaaacatgaccatatatgctagctattgttccaaaaaaaaaaaacatgactagatgcatggcacactagctggaaaagatgcttgatctagaattaaaaaccaaatgcatggatctacattaatttagcatcatactgtgttcatgttgatgcccatcttttgcttgttatcctatatatttccgtaatgtctttttttaaaggattccgtaatgtctttatcaaataaacattataaggcatgtatgtatgatgggcgtatatatacttttttgcgagatgtctctttcatagagtggcattggatattttggcctaaaaggatttgtatataacaagaatgcactattacagaattgagtttcatgtacgagatctcctccaacttctaggtggactgtaatagcgtctgcatgtgataatcggttcctgggatgggttaagggctgcttgcaaaaatgtattttcgcaagtaggtccttagcaggcccggctgcgacaatggcaagcggacctcttaaagagacgcaggcatacaacaaagtggcgaatgcatcctcggtcccacccctaccctagcgcaccacccatccttatactctcctcactcactccgcaccattttctcttctctccaaccagcaggcctcatctctctctctctctccaccgtctcatcgcccagagttgagtgcgcggaagcggagcgcctccgcctccgtaccgttccagccatgtacccgcgcccaggcctcccagaggtgcggctccacctagcgtagtgcacggggagcccgtgtgaggcgagcaacatggagaggtggggaggcttgatccggctgtgggaaagccgcaggatcaagcagtggggaggctgaatctagtgacggggaagtcggatcgagtggtgggaaggtcgtaaatcgtggctaggaggctagaccaacccccataaggcagcgtgcggcggaaaggcttcccctgtcccccttcttcacgccggtggacatgggaggatcggctccagcttgggcaacctcgagagagttggatctggcacctcctctcctctgcctcttcattgtcgccgcgcgcttgggtctgcaccgccggcctcctctcctctgcctcttcgtcgtcaccgcgcgcactggatctacgccgtcggcctcctctcctctgcctcttcgtctccttcgtgcggcctcctcttctccatgcgaagagcttggcggagtggcgtatcctgcatggggaacctcggcggcagtggatccggcgctgggaccacaatgacaggatggatctggcggcgtggatgacctcagcgatggcggatctggcatgggagctacgacaatgtcggtggcagctgtgatgataacgttctcttggggagctagggtttccaccatccccgactctggtatataggggcagatccgtcgccccctgctccgggaggggcgttgattgctgcagcgaactcactgcggccataacgactaggttttggttttggggatttttattttttttgtgatttttcttttttgggtgggtagcattactgaccggccgcaaaaaattgagttttgcatgcgggtgtgccacccgcaagcaaaaatatcaatttttgcaagcatctccgagtagacgtgcaacccaaccgtatgggaaaatgagttttgacaacatggaaagaatttctatagtagggatcagataataaattagcaaatagacgaacaatagaatgagtgttttcaataaaaccttgttccgtttggattgataattaggaacatttaaggagatgtggaagaaaacagtaagcaaagattatttcaaggtggttctccagccagccattacctccttttacaaggaaattcaaaccaaattaaagatctctaggtattcaaacaacctaatatatatattacacacatgtttatccaaacaaattcactgcgattcctcgaacatatatgcaatgttgtatttgaaccacattttctccctatatagaagatatatacgaacacacatattacacctttaattaaaatgtatttttttagaaacaactaaaaataaacttattatatacacttaaatatttatttttatttatcacgaatcttgaggcaatatgacaggcatccggaccatacccccaaggtggtgtccggcgcactacaagatagtttcttttttctttttagaacttacaagagagtgttgatctgcagtctgcatgcacaggtagtgggagattgacgaagaaaaagtgtcatcttccttgtacaatggggccttcatttaatcactcgataattagtggagcattaactaattaaagaacagtgtggtggattgagatgaagtagctcttaattaatttgcagacaggtagcaagctaattaatttccacgatcgatcttatcgtggctccattaaattttgatcggaaagaggagctttttccaagctaagtgcctcaaagagaccgatgcatatggcaatcagttgccagtacatcatgatacatataatcatttgtttttgcaagcaataatatatcaatctatccaaattgtgttctgtccatcttgtacgatcaagtcatatatatgtattgtgcttaattactccctaataataatggacttatatgtactataggaaaatggcatttgtttctagatcaacatatatatagatattaaattatgacggacgtttttttattcaaaaatatgacatgcactatttatcatgtgatttcatataggagtgccaatcaattaacagcgttctttggttggacgattgatgtcatggccgtacgtaacggttagaagaattttagtcagaagtttatattgcaaaaaatatacacacactccataaagtgagaaggtcgatatcgggaagataagaccagggaaaccgaattaataagagaaaaaaatgtttctcgccttaaggttgatgccaaaaaaaaaagtcgctagcttatctgaaagcacgactgattcataataaagaagggtctaggtacatcctaatcctagtaaatcactaatcaacaactacaaaactagacataaccaacaataacatcctataatatgttttaccttttgatgaacaatttttttaacaatttttttaattttttttaacaataacatcatacaatcacttttgtcagttttttcaataaaatgacaaaactaccctcgtgtgttcttccattgcttctgttcagctatcatcaacatacacacacttacgcatgatggttccaccttgcagttgatttatcatttttgctaatccatccagaggatgtccccttgttcttaccgtcattaaaatagttatgaatttttaaaaaataaataacaagatagattaatattttatatatcggtacaaaaatttaaattcaaatttgatcttcacaaattgtaataaaaataacaaatttaattgaaattagtatacatctgctcatagacaaatgtgattttttttagaaaagaaaacttgtaaaagtgaaatttaaacttgcatatttgtggaatgatgcatcacacattattctatcttattaaaatttttattttttataattatttgcataacatggaaagaaataagtggacatcctttcaaggtattaatatgcaatgatatatcacacgttattctatcttattaaaatttttattttttataattatttggataacatggaaagaaataagtggacatcctctcaaggtattaaaatagtaatattatacttttgcatccctattacacaagatgatgatgtggatggcatataggggaagaaaaacatcaagcagtggcatataaaggattagcaacttttcgatggaatataaggaaactcgtgaattttgagtggcaaataagaaattctctattaattaggaacatataaaaagaagactcggttctcgctaaggaaaaaaaatgttatttcaggccaaacagtgcatacatcctgtaaacggagttgcagctagcatctgcacctataagcaaagccaaacaaatcgaagttgtctcaccaaagtgcatgcatgcatgtgatagctaatctaaccaagacacttttgcaaaagactaattagtaaagctactccagcatcatatacacacaagaaaaagaagatgcaaattgaaccaaacaaacaaataaataaatgtgaactcgttggttttctccacaaccctcaaagcaaaattaaaagctaggcagatcgtgacacagacccatatatattcttcccatgctaatctgtaccgtcttctctctctgctcttccttgtctgatcttcaaatggccaacaatgggcagacagacaagtgactagattgattgacaaacattagtacaataattaagggtgtggtatagtgctttacctgatcaccctttaatattgcatgtgtttttccatagatgcagcccaaagaggtcattgtcgattttgtcgccgtgatggctttcagaccaagcaagatttcgcaagttgtgatgtgaaagccggtaggccacaagtgatgatggtctagctcatctatgccggggagccacgctagtgatcagattctaatatctccggaaagttttatacgacataaggaggatcggaggtaactagttatagttctgcaggaaatattgccaatgcatttttggcaaaattgaagaaccaagaaccaaattaaatgtgtggtagtggagttacagtataggtaaattccagtgatcataaatattactcgcatttattaggtgtgtttcaatagaaatttggtaagcttaaatatttgttgtcgacttctctttgaccgtgttgtaaggaggtacacatggttgtgtgcatgtccatctactatgtaatcgtaaaaagaatggctcgcagtaaattgctcaggttttgctattatttgttttgcatattcgttcttaggcatgctttcatctttaatttatctacaccgcaaagtatgtaggaccggcttcataagatgtatggttgtggttaagatcaactagctagggcttgactggagagagagctagtgggtggtatagtggatttgtgccactggatggaagcatactcatacttgcctgtgtcctgtctagatgctctgaatgcacatgcaaagcaaagtgtaataccccgtatattaaaatattaaaagatatttaggttgttttagtttggattgatttgttaaaataaagatgttaaccgaaataaataaaaaaaatatctttagaagtgggccaacatgagaaggcccataaacccagcccattagttctcccctaaaacctagagagaggggaaccgaatcccacttcccctcatagtgccgccacccctctccctggccggcacctccttccttcccttctgctgtgttcgcatctctcccttctacagcaaattgctctctctatatctccgccttcatagcttggatcaagaagcaaagtagaaaaacgaaacgaggaggaggagagaagtaaaaggaggggttagatcggagtctcccctattgtctccttacaagttctctaaagaaaccctaggtgaggcttattcttttgttgtatcagttgttctagcatggctttagtgctttaattcgtggtcagggaaggctagagaaggagtttgggtagttgcggttcggtttgttgcagttctgcatgtgggcagatttacagtgcttcagttttttgatattttggggctctaaatgttattttctgcaaacgtgtataactaggaagttgtagataatgtttggatctatcttctaaccaaagggcgcgattttatctcaagtggtttaggagatataattttttttagtatgactgttgtttttatgtcataatctggatagtagtagattgaactgtttttggacgggttaaacagtacaatcagccaggtcacctatagacaaagttgtagaggtttttcttagctttccatattggtaaagtacaccctgattgggcgagtagaactctagttatagttgttttagtgcggaatctgaaattctggacagattctgaagcctgctttcaagcgcaaattagaccatttaaatggcagaataaaaatacgatttccacataagagttgtaggccttgttctgtagatttccaaaatgtatttattttcactcatagccttttcatatttcaagatataaaggtttgaagcagtagtcttgtgtatagtccaagcggtgttccttgttattgagttttgatgggatggggcagtaggttcacctttttcattgttttatatgcatgtttgaatgtgttttctgaggttttgtttataattaggtggtggtccatcagatcgtgcatgataccaatccttcgttggaggcaagtgcatgacgaactaattgtgtgattcatggattgtttactctatctatttatttctgatatatttctacgtgataagtaactgcttatgttcatattattgttcacgccatttagatttcaagttgatcttatgtgtacgatgttattcttgttttaatattctggattctggttctgcttaaataattcaagttccctgcttgtcatggatgtgcaatatggtttcaatttggttctttgattccggtttcaattattcaagtaccatgcgtagtcatgggagtgcaatttggttctttattcaagtttctgtgggtaagcgctgatcacgcttactcggctttgccggcaaatgctaggatatattcactattgtccgggatggaaactactattacaattcatgcctgcacgggatgggaactactatcttctttaacttggtgtttggaaatgtgtttcctatcaaagaaagaaagccttatgttcatgctttattgtcaatgatgtatatatgtattttctagttccatattgtacttgctgagtatttttatactcactcttgtattttatttggttttaggtacgtattgagaccgacatgcatgggcgggaagtagcacctttatatacacatttatctgcacactatcaaactatattgcctaggtccataatgatacttaaactatatcatgattcggtcttgtaataatcttttagatttctaatagtttcttccccatggattataaggatggatcgcactgtaggaatgatattattattagttcaatttataactgtttgtcgtgaatgtccatatttacaggggagactctgccgaaatttctaataattttgggagttagtggttttgagtgtattttagtgtggcactccaggtacgtggctacctggggcgttacacaaagtgatcttaagctcatcgtataagcatatatattcacgctataggaagaacccactcaacaatcttctgaaaaatggcccatatcagatttgttttttcaaccatatggaatcaaacccacataacttcaagagaggtaagtatgtactccacggtgactagacctatgagactgtttgctagaaatacatataactatttgaagtcgtaaggacatatacaatgggtacacggcttcatgctttactaaaggtaaaaggtcaaatgagcttggtgaactgacgcgaataaactagcaagttaagcctacaaacggtctaacgtagcgaaaataagtttttgatatgtttttcaaggataataatggtagcaggtattgaggtgtaagaggttagtggcaccaattttaaccttgatgctagctacagaaaataggaaactagtactgaggacttatccttgctagagtcgacactaagttgagcgctgctgatgaaacgatgggtttatgagagtttttttagctatattgaataagagggatgtttgaattaaaaggtagaattaatatgatatcaaagttatttataggaagaattaaattcttaatttcctttgtgctatcatagatcacgttgttttagtttttcttttattcgtagggaactcttcgttggattttccctttgccctcatcacctcatggggtataagaccgaacatctcatttcaatgtaattcaacaacatttggcatgaatgccataatcaacatatgatggctggaatttaacattagccgatccctatctacaaccttgacaactctcatggacataatcaacatatgatagttatgaactcactcatatctcctcaaggtttaattaagtctcacattctttcaacgcgtatgggagagaataagtctttatctctcaccctccacatttttttactatgtcgttaatgtagtgaaaagaaattcgaaaactgtatacttgactcaccactaaaaaaaccttgtatagaccagccttataggtgccggttcaggccttttcccatatccaggtgatgaaaaagatataaaaccaacacctttaaggacaataggtgtcggttctaaagaaaaaccggtaccaatacgatataggtgccggttttttaatagaaccgacacctatacttatattgtaggtgtcggttctaaaggaaaaactgacacctatagtataggtgctggttttttaatagaacagacacctataaaacgagccgagccgattgaatgtggcgccaccgacgaaaatatctgcgccaccgacgaaaataagtgtgcatcgcttctagtctcttctcccatcttctttcgtctctctcccatccttttctctcccgtgtccttttctctcccccattatcttctcttttcttctggatctggatctagtgacacggcgcatcctcccaacggtggcgcgcggaggatggcgggcggccggtcggcggatggcgcgtggaggacggtgggtggcctctccacggcggcgtgcggaggatgacgagcagccacgtcgaggggctcatgggtggccattcaacgggcgacctccccacggtggtgcacgaaggatggcgagtggccgtgtcgaggggctcaggggcggccggtcgtcgggcagcctcccgacggtggcgcgcggaggacggcgggcggcctccctatggtggcgtgtgaagaacggcgagtggccgcgtcgaggggcttaggggtggccgctcaataggcggccttcccacggtggcgcggaggactgcgagcagctgagtcgaggggctcaggggcagccggtcgatgtgcggtcgtatcgaggggtacggactccccacgacggcgtgcgccggtggactccccgtggcggcgctcggtgggaggcgagcggccgatcaacgggtggcctctcccgcgtctgtttgtgcttctctcccttcctccctctgtccgtgcttctctcccttcctccctctcggatccttcaagatttgttctttgatgttcttgaatctcaggtgtctatatgttgttgtttagatgatgaatgtgttcttgagatgctaccagggatgatggggagcggctgcatcgagctgaattttttttttttgattgtgggatgttataggtgccgatttctaaaccggcacctatcacttatcttcataggtgccgacctataggtgccagttggaaaaactggcatgtatggggggttttccaaccagcacctatagcattttctgtagcagtgacttctatgcggatatccttaaatttcaccataaataattcataactaccaggatctgagcgacattacaataaacattttctcctttgtcattttgacaattaagaatttgtcactgaacccacatataatgaatatatgaggatcagctataagtgataaatagttaaacgccacgccttaaaagtggtaaatagttaaatgtcccatttggaatagcaactgcggacaagagctaggcaatctgaaccacattcacgtgcatatgcatagccaacaggcagctagccgttcgtcaggtttgacaggcatgtgtccgaagaattctggacgagaggccaaggcacagagagagtgctgtgccactgtggcgtgggccccactccttgtatgggcccactgtcatcgtcctcctgatcgacctgataatatcgctgcttccacgtgatgcattgcacggtgggtgccctcatccaatcattctcgcattgtttcctacacgtttctctctgccctaatccaattatatgccagcttcttgttattaccttctcctccatattaaaaaagaaaataaatggataacaaaaggaaggggaaaaaagaaaaaaatatttgatgggcaattgggcattgcgtacagaaactgaagaatgattgattgatgagattgatatttacaaactaccaataattagaatttagtaggagtagttgcgtttatgtatattatgaccagattattgccgtggattatttgcttcatgcttctcaaaatacatttttttatataaaagaaatcttctatactgtattgtttagatcccaagctagtttggcgagcttattaatttttaatctacccctatataaacgagtttgaatcatccatttcattttgtacccgttcatcgctttagaacggatccgtcttgttccgaagaaaaatatgcaaaagtactgaaacaagagtgcaccttgtgaaagtgtcggtccagcactggagctcactataggtaggtagtgaagtggtaacaataaaattgaaaggtactaatctatatataattcgagtcaaagataagcattctcttccatgcatttatttatctatcctacttgaaagccgccaccacagccatggcaaattgcattggcaataaacaaagatctgcagctacactagcttatcaacctgtagcagttgaaaggcagtacgtatgcgtgtgtgactgtgaactgtatgatgggcaagactcgtgcaaatttattactcctccttttttaaaaaaataaatatatgaaaccgttaaattttaaatacttcccccgtgccataatataagggattttgactttttattacactgtttgaccattcatcttattcaaaaaattttggatttattatttactttatttgtgacttactttattatccaaagtactttaaacacaattttttgttttttatatttgcacaatttttttataagacgagtggtcaaacagtgcaagtaaaaaatcgaaatccttatattatgagacggagggagttacatttttaaccattcgtcttatttaaaaaattaatgtaaatatataagatataaatcatgcttaaagtacgttgagtgataaaacaactcatgaaaaataaattatagttacgtaaatttttttaagtaacaaaatagaggtagtactcatactaaacagtcggccttaagcaccatactttagcctaatcttgctatgctctcttttgcaaaagcaagcgtgaacaataacatacacgcacacgcacctgctatcactatcagcaatatatatttcagacaagttcacataccattctgtgataagtgataacctagctgagcatggatgaatcagctgggatggaagaacaatatataatgagcatgcttatcctcccaaggcagcaagaaagtataagaccatgttgagagcaagtttaatttcatagctaactgttgacttcaaatcatttataatcaatttaatagccaatttatacaatacttacctataaacatatattacacaattaatatttggtctcacctatcatacacacatgcatcttggagatcgtactgcagctgggtataaatctgtagcccgctgctcctctctctcatgttttatctcctcgaaatgtgtttatagctggcttatagtttgctactatacctactcttagcgagcttaaacttccaagaaagtaagaaattagtagtaaaaatttaaaaaggctattttttttcagcttctgtccttctgacttgtggtgtatgttttggattttacaaccaccgcttttcaaaatctaagtgaaaattctagattgcttagagaagctaagggttacgagagaaactatggctggcagaagcactttaaagtttaaacaaagcctaagtagcataaaaagagcagaagctaagctagtagctagcttaatctctcctgcaagacaggcacaagacactagttcaatcttcatcagaagaagaaaaaaaagaagcaaaaggcgggaggagcaaaagacatgcaggtacatgggtcaaaagcttcaggctgccagcactactacctcagaatactttgattgcacggattgatttgatctttacaatagacaatcataccatcacctgtacccagatccacaaggaacatgcctgaacaggaatgcagaagaaagaaagaaagcagcttgtgtgcaatgcaaatccaaagctgcttggatcgatcgatcgatcgcaccatgtatgtgaccatttcactctcatgcatatatgctactacagtagtactagcaaacaaagaactcgagagaaaatgaaatgtgatcctcctgctaaacccaattcatcccaatctctaaccaccacagtaatccttgtctgtgcaggtttcagacattcagtcacatgttggatcgatcagcagtgaaacaggtgtattgtagtaccactgatggtgaatgcagaacggcagaggtgcagaggtttttttcttgcctctttcagacgtagttgtcaggcaattgtcgagctgcagggcaaagataataagcaatcaatcggatctaatctcttcggaatggtgcagctgagctattgaattcagacaaactgaatcgcacagggggggtttaagattgttcaaactgaattgtgaagatagcactatcgaagagcccaatttccgaagcaagacagctaaaaagcagacgatgtgtactatataactgcagagcgacacaagtttggtgagcgctccaagcagaaactggcaaatgttgaacgaatatcaaacaataattaactgcaaacttggtattctgggaaattgcaatgatagagtattcacatagaaaaaggttccaagtcccaaaccagaccagaattcctgccatgtcctgatagcagactgtagacactatgttctagtatgatccagagttgaaatgccgagcacacgcatccttagataatagaaatgttttacatttcgggcctctgccttcaggtaccgggtcaggattgattgagcacacctacaaaagaagcatgattaatgagtaataccatatatgttcaacattccagtacttgtaatttggaatgtgtggtatgtagtatctctgaccattctaggtagagctgagtggactagaagttcaggaaaaaaatataaccttaaacaccaataaaaacatggagcaaaggtaaagatggttgtacataaactgctttggtgagctgcaagggtcgttctgatactctgatgtgtttcaaacatgaaacaaaagataatgtaatgaatcgtctgagattacagattccagggatcagaagggaaggcttcaccacactaagtagggcaaaaaccatactaagttgatactgttgtggtgtcacctaaccatatctgctctgattttagagctatgctgtgtggtctggtttaacagacaaaatacacaaggtgtgtttttgtgtaaaacagcaggcagcattcaaacaatgctagcggagcaggtgggcatggatgaggtttgtgctggaaaaagttgtgcagtgctcgttgcatttccaacacaaaacaaatactatatcataaaaatatttccgatgatagattcactttgagttttttgttgcaccacatgttactatgtttgtctataaggttaatcaaacttaaataaatttgagttacgaaaagcccaaaacgtcttataatatgaaaggtggggagtactactgaacgtgtatagaacctgtgtggcttcaattacggacttgcaatcgccagtattaacaacacagaatctcagttcaatgaaattgcatggccagtaaattaagagatgactggctgggatgggccggcgattctcagtagcgggctgacttctagttgggcctatatgggcttgtccgctcgtgagaatattgggccgactgagtgaccggccatacgcttgggctggaggaactgaagatttatagtgcagtaagttttttttttctttgagtaacaagtttatagggcagtattacttgcactgtgccaaaacttgcctttctttcggagattttctagaaaaaaaatattatgggtacagcataaaaactgcagagaaaacaccctttgtttcgaatatagtgattacctacgtttagaactgtacattgtcccgtgtaagatggaaactactccctccttctctaaatgtttgacgatgttgacttttttaaacatgtttgaccatttgccttattcaaaaaattttgtgaaatatgtaaaactatatgtatacataaaagtatatttaacaatgaatcaaatggtaggaaaagaattaatagttgcttaaaatatttgaataaaacgaacagtcaaacatgtttaaaaaaatcaacggcgtcaaacatttagagatggagggagcatatgtcagagactctcctctcttttccatctctctccaagctcgccgagcgtgaggtagagctcaacaaacacatcgtggacagcatggtggcggtcgacggcgagctcggtcaagcgcggtctcaccatgctcggaaacctctcatttataggtacggcccacgcctacgtcctctaacgtcgcaaatcctcacttgtgatatcatccaagggccattaatcaatcatctaagggatagagacaagatatatactggttgataccctgcattttgccgcggtacatgtggatgaatacatacatgtttaaataatgtgaaaataatatggagataatgatttgacattgattgcatattaagttctaaaaatacaacaaaattgtaaacgatatatcatatttgcatgatatttaaaatactctagataataattgctagtgggtaatgatgtggcacacttgcatatgatttaaaatactctagataataattgctagtggatgatgatgtggcacacttgcatgttgagatttagaagttagtagacatcaactttacagtaaaattgaatatgataagccaaaacggcctattaaggaatataaaataatttatagataaaacttgtatatatttgtttttaagtgacttaaaagctaatgcgtaaaaagaaactacgttgaaaatatcttaaaataaacttcaaaattaagtttaaaagttcaagttttgtcttttgctttagcttattaggcgaaccgatgggacctgaatcctctagtgacctaagtgcagggagcaaacactatattacagagtgaaaatatagagcacacacatctttagaagctgttctccatttcatagacatggatcctctgcaatactacgcctgcagtcccagtgactgacagatggatccagtcctacatgttattgttacagataatctctacagatttctattatctaaggatgtggacatatctattggtcttgaaattacctgagtgcagagtgcaaaccctgaaatgttcccaacatctctcttagaattgagtggaccgagaaagtgagaggttgagtaacatgaaaccttaaacagcaagaactacatgagaagtaccaacaaggcaaccacagtaatacaaaaaccgctttggtgagatgcaagcatgcaacctgcaagggtctgatgcatgtgtttcgaacattggaaaaagaaagagaaaaataaaatcattgcaaatgtaataaataagctgagatttttgcaaattcgtgagatgagacttccctaattttgtagttcattcgcgtgggccgttttattggaatgaatccagcccaaaaccaacaacatcctgttgggcaggcccggcccaccgatgtcatccctcagagacggactacattctggctgggcctatatggactttcgagaatgttgggctgtccgagtgagcttgggctgaaacagctcgagacaatgtagcatagctctctctctctctctctctctctctctctctctctctctgttcttctctctttttggcgaaaccatagatttttcattctgcttacagtgccaagacttgccttcatttcgtactcgaaggtaccgcgagatgttaaaagtatttttctttttgagaattacacgatgttaaaagtatttaaccatgtgataatttgaagtaggagtagtagattaactctcggcgtcaaaactgtaaagagaacgatctttgtttcggctgtacttgcggaatactccctcaatcccataaaaaaaacctaaaacagaaaatgatatattctaatattacatacaaataggatatgccagattttgtcatatatttgttttgtatggaacggagggattacctaggttgttttacagctatcaaaaccctaaattgtcaggcaaaagaaaatctggtcaaatgaaaggcatcattgatctgaaataatagaagaggattgcatattgtacagcgaaacggatcctcttacgctaaaacaagcatcattttacagctacaccggccatttgtttactaggagctacagctgtgccatactgtaaagtaaagacccccaagcctcttttgttgactagagtaaacaaacaaatgcactggacggctggaacatgcatgggttgttgttgatcgatcggcaacacacgtggcaaggtttagggaaactccatcctctattaataatcgctcactcggaggagaaagagtaacatcaacgctaagagcacgtacaatagcaggctataaatcagctgtaaacatattttaataaaataaataaggagagagaagagcagcggctacagatctatagccagctataacacggactccaagacatagtgtgtgtataacaggtgagactatatattaatagtatagtaagcaactattgtatgaattgaagctagtggtggactatcctattaaacttgctctaatctatcaaataagcatcaccaatttggcatcattttttgttaagtagcgtccttttgaatccatcgagaccatccaatcacatctacaattcgttatctttggtcacatataccttctttggccttgataatcacctgtactagtagctcgcgaccagtaaaagcgttttaggtcactgatagagtgaagattctacggacggacattatgccagtgtagtaattaagtgagctaaacaagttaaaaactaatttacagagtactgtgttctaaaattgacttctcactacttaagtatagaagtcgcgcttgacttacgatgtcctaagcacaaatcgcgttttgaagtttgaaccatcggactataaaatcatcagcttagaggcgccttaggactggttcactttcttagcattttcatctttttcaaagttgaaaataaaatttggtaaggcaacccattaccaacccaaacgtcccaacttttggtaattctacaactttctactctcaaaactaccacccaaattctaccaatattttggcatggtagcaaaccaaacaaaccctactttcaaatctaactttttttgaaacacaaacaactttattaagcaagaacagatattaggggataaaccccggtacacaacaacggatagaagttaaaagcagagacaatcctgaagaaagagggttaaccgaactatggaaacaaccttccagatgaaaccgaacagcagaaaaaggagcaagccgacagagagctgcggtggagccgtgacgactgcagagccacaacgtcttaaaaccgtgacgactgctaccttgggcctcagttgaagtgcacaccacttgacaaaccgttaatccccttcggttgcctccacgggaacggcacaagatcgaggttggttgttgagccgtagatttttggtgtgagcgtcaccggactcagcaaaacatccccataggattcgtcattgaatctgaggaattctaacaaccctgacaatcgaaattgcacagggggtccgagctcaacccgaatgacaaaccatgtgcggcttctgctactaggaatcaaaagagagggccaaaacgtagaccagccaaccaacaacaatggggcttttgagaggctgccaatagacttctgtcttgctttgaggcctgagatggctaaggagagggcgacctgcaacatggaaccataagattttgagcagaacaaacacccaatcacaaggcttccaaaggcttcggcttgaaggaggatgtagatgacgacgagccaaccgctgccgccaacagaggaagaagctgcaccaacagtggcaccggctagcacacagcaagcgactggagttcagggggcgacaactgccacaccgccgatcatagcacacatgccgacgcctgccggcgccacagctagcataggtgcgacagagggaaacaacgccaccgctagctcgggcacggcgaagggggacgacagacgtcgtaacgccgaggacagcgcagagaccgtcgccacctcaacgacgaccaccgaagtgccaggcgcgacgcagactccgtctccaccaccaacacaaacccgcacacgagcagggtgtcggcaaccactgccagaagctcctcctccaccaccaccaaggccatccagatccggaaactctatcttactttggggctcttgctcggggatgatttgaccgccatgtcttcgattcgccgtccacgaggcgcagaggtaccaactcccaccaccgccgctaacgagaacaccggtcgccaccattagaggccagactaactagagaaacagaaccaacctgactaaagagtactaggggaaggtggccggacccctcctccaaccctcgccgacagcgaaccgctgaaatcgaaggggaagaggggctggaggggagagaaatcagagaggttactgtagaggaaaggggaacgagaggggaatgcttcaaatgtaactctttggtaacactaaattttggtaaggtaagcaatgaagtgaacatgcccttagacttgtgaatcaacttgccaaactctagttataagtatatagcagaagcccattaccattaccatttgtatttactctgaaataacaaaatttatttccctacggcccagcgttgaagagactaacagaaccttaacctcgaacagcttgactaacataaactcctacgaaaacgtggctaatagagagcccttgcaagtactacagtgcattctattagggctcctttcatagaatttcatagaacttccatgaaacaactaggactttcatagatttttcagatattttttttcaattcttgtgaaattcctcctctctgaaagaggccctcggtatgcagcactaccatcgtgtatagagtgctatgtatatgcgcacaaactacaagatgatcctacattggcatcggcataaacaagctgcagaccaaaaaaagaaaaattccaccaaggttcctgcttggttatcacgcggacgcggttgtaacaattatcacgtacggtaaccttctcaacttttaaaaccagaccacgatgtgaggtaatcttctcaacttttaaaaccagaccacgatataactcacagtaaccacacggttttttaaaaccagaccacgatataactcacagtaaccacacggttttcgcagtaaaggcaaagttacaacggtaacagctaaaccgtgaagtaacgataatcctatcccaaacggtttgataaacccagattctaactactaatacctcacagaagtgagaaagcaaaaaaaaacaaaaacaaaaactcctatacgcaaatgcaacagaggcacacagctggcagcacaccagtacagtacagtagaatgaatggatgtgtgcaatgcaatgcaacactacgggcagctacacgacaaaacatccaaagtactatcacagccacaaccaccaccactctctcactgtccactccactccactggataagcatggtcaaaccagctgcagctgaatgattagcacgccatcaacacagcagttagcatgctaagcaccgtcattatcagcatcagaaacggtcaaaacactcgaggcaaatcaaatcagcatcccttggaaacaaatcaccatccattaattgtacacatcatcatccacattagcttagcttaattaatccactcagcagcatcagcaggagcaggaggagaagcctagctcagccttaatcttacaacaacaacacataagcagcagcagcaacatgattaagcctaattacccgattaattgtactaagagcacaacaattagaggaaattaaaggaagcgaagcctaagagagattaagattaagaagaagtaattaacaaaccccatctcgccccccccccccccaattcgatgccactacgccctaaccctaaccctagagattggggttggtcaggccgccgccgcctcgctggggacggcggggcgtaccttgggtggccggccgcggccgcgcttgacgggagcggagccgtcgccggcggcgggaggaggggcgggagccgtcttggccttcttgggcgggcggccgcgggacttggggatggcgtcggagatggggtccttggacttgggcgggcggccgcgggggcgcggcgaggagggcttgggcggcggcggcggcgcgttggggtcccgcggcttgggggggcggccccggccgcgcttgggcggcgcgtcgggcgcgtcggcgcggaagtagttgttcttgaggaagatgagctcaccggactccttcatcctggccaggtgcgccgtgagcagcgacgcgtgcgccggcggcaggtccccgtacttcccctcgatgaacttggagatcgccgacttgttcgacccgctcttctcgttcagcccctcgatcgccgccagtatcatctgcacaccacaaatcccaaatcaacccccaagaaccaacccaaacaaagagaaaacaagaaattcacctccgggtagggcgggagaggcggcggcttggaggcttcgtcggcggcggccatggcggaggaggaggagggggtgggggagatggggatggggaattttcgctcacgaagaggaggatatatgaagaagagagagatggatttggatcaggaatagataagaaaatatggaggaggaaggaaggaagaggagatggatgggctcgccttctttatttcttttttttttctctccatttttttttattgttaagctcggctgtgtcacctgtgtgagaggggaagtgagaagatgaggatggacggctgggatgagtcgatccgccgccatcggacggcgcggggagggatgggtcacgcggatcggtgacgtggcaggggtaggggtaggggaggggagaacgcgcgcgctcgagagctttatgttttgtttgcttttgcctcccgtcccgacccgacccgcgggtgccttttttgggggagctgtggaatgacggtattgccctccgtggtggcctcttttttttggttttttctgtggaggtgggcggtggtcaggcctgtgatttggctgcatggacaaagcggaaatgccctccctcccctgagttgtgtgtgtttatatcgttattattgctaatattgttacatgcacagctgaggatgtacaacggtatagtgtggctggaaatacacctgttttggttgtaatgtggtatgcatgtaattggtttaagatgatttaggttttgtctgatctgtttgttattgaagtttaaattacaggtaaatcgtaatgtagaaatagtagaaaagttgttacttccgaaaagtccggcgctgaatagtgcaactgaatttcaagtctacgcaacggttgcctggatttgcggatttaggtgaaatatagttgacctctttcataacgtgttgtgaatttgtgctttacttaggtgagcggaaataaaatcaagtttttaatttagattcaaaatagagtttcacggaatgttcagtggatagacatgtatgcttgctagtattgctatgcatatggttgatgaatagggtatagtgctactataagttatcgtgttttcattagttgtaatatggtgagtgtataattggtaagataagacattctaagtaaaaggcaacgaagaaatatatttggttttttttaggcagatgtgattattatggttacatataatgaacactttaaaaaggaaagttttaactttcaaaatattaagcgaatattaatgtaactaaatttcaaataaataaatggtcactcgggcttatgaaacatgtgatctaataaaccactttttatatcttagctactttaaaagcgcaattgtcttcatccatccttcccaaaaacaaaatcctgctatgtcgatcccctagcttccaataaaagctccaaagacccagcccatcatgaaaaccggcatagaaagaaactaaatcataactttatctcccaatcctattggaacagatgggaatgtaattagttgaattgtaaaattatacctaaatatttttctgcaactgaattaacctttgaacaaatatgatgccatgatcgtgaactcttttggaacaaagagaactacggaaattgtggaggatttgattcatatggaaaaatttctatgtagtcttttggaataaaggaatagctctctcagattattttgaaattcagtaatggactattttcataggaatttggagggcaatctagcataaggttctaccgcatgtttatctcttccatggcacagccacaaggttcctctgttttttctatgtaccatccaaaacaataatttttgaacttccacgtgttcttaattcctatagaaaatcaatgggcatgacactcttcctacgtttttcctattcttatgttttcacaagtatagtggcatttacaaatttgccactggattttcttattttgtaagaatactatttgaatgatagttctgttggtagttttttttcttttcaattttatagtgggaattttgccataacgatttagaacggggtaaattcgcaattgctcctatttatcatggttctttttagtatgaggtagtatttgtatagctagagaacatgagtacagagtaacaatttagatagattaagacaagtaacaaaatttcttaagtaaaattcgtataattttttttaacaagaatttaggttttctcaacttttgttttgatgcactctacctcccataccttaaaagtgagatcatgtgcgcattgcaattgcatgtacatggccaacaaaaacagctactagagttaagcagattagtagctcgacatgtacagttgtgtggaccgtatgaactagccggcactataaaaaaagctcaccgataacgaaagatacaaaattttcgattgggataatagaggcatcttccttttaatttaaaataccaagcgggaagtttacttgcttgagcgcatgggtaaaatcgtctttttggcgcttcgccatcgagtagtagtatagcttagctgccagctaagcccacagcttcgaaatttttgaaattggagcgtgcgctgcgctgggccgagccaagagtgcgtgaagaagaagacgaggaaaaaaaaaagaaaaaaaatattatatatatatagtactcgttttgttttttcccaattcagtttgagctcggagtactaatgctggccgcatttgcttcgcgcgaacgccacctgtcaccaggacacccgaaaagctactcgtacggcaacgcatctcctccctgcgccagtggggcccgcatgtcggtgagagtaagagtagtcgggtgcgcacgcgccgtgtacgcataataataggtgtagccttgcagccgtttacaccgggagcacggctcgccccggctggcgcatcggtcgctgacaggtggggccgggtgcgcctggggcccacctgtcggtgagggatggatgagagggtgtgtgtgcaccgtggagagtgggatttgcattgctgatgaactgctttttgggaacggggtatttaaagcactctcctccctcttccacctcggtgactgactggtccccccacacttctttttattactgtagtaataaagagtatgctagtactgtcactttgtgcacacaccccctctagagtttgtatatgggttaatttgatccatcctattataaaagtgtgattttagataagtatcactaatgttcgtttccatactattcgtaatcatgccacccgaatacgaaaatatttggttcacaagctcggtttgacttggttttgtttgctctgaattttgtattttttatatggtcaaaattgtccttgcatgccaaagacttgactcattcctcttttggacccgaaaccctagccatcgtcgacggcaagcggtggcggtgcttgaaggcggataatagccaacacgaatattaccttccaatcttgactttaatctataaaaattatgtagcttatccaatctacaccaccagattggatttttttcttcaccttcttaaattttaaccgaaatacatttttttacatagtatggctctgtttgaattttataaagatgaagatgaagatgaagattaagtgttttacgtaaaacgaggtggtaataacttgtgattaattgagttttaattattacaaacttgaaaaataaattaatctgatattttagaacaactttcatatagaaaattttcacacgaaatatacagtttttgtgcagtttgaaaagcgtgccatgaaaatctaaaacttaatctcgcctctgttaggttcttgaacatgacctataacttatttagctactatataattagaatgacaaaatgcttatacaaatcgaaagtatgttgacatgcttaaaacctaaatgtgtatagaaaaaaaatgttcagaataattaaatcgcacccacctactaacttcttgcaatagcatgcttacttttttatgttcttacactaaatttcactcacatatatgccaaattgatgtattgtgctctattaaaattatcaattgtttgtggattttttttctttagatcatataatcacatgatgagacgagcatgccttgccctcctaaagacctcttttgtaggctcatccacaagaaaagccaattatgcaaaggcatccaaccgcacttgttcaacttttcctttatgggctgcacaaaaactggccactagaaagtgcaacgtccaggttaacaaaataatttgaaagcaaaaggtccaatttattctggctatgtgttggaccaatttcaagttgacagtcacagttccaaaacgagctcattaaatgaaattattaaaaattccaagcctacaaccaaaaaggcattatgcatgagagtatggaccagtttagatcctcggtaaaattcttcaccctgacagagcaaggctaataatacagccaatctgttggctataaggttatttatagccttctcttagtctacccatataatagttagctctttacaattaatatagggcccacttgtctctctcacagagtttcttggttcttgtgtgcaagccggctgtaagtttatagcccgcttctcctctctcttctctcttttctcctccacctcaacatttagcctgcttatagcctactattatacttgctctcacatcgaatatttggacacatacgtagagtattaaatataaacgaaaaaaataactaattacacagattgcgtgtaaattgcgagatgaatttttttaaacctaattgctccatgattcgacaatgtggtgctatagtaaacatttgctaatgatagattaattaggcttaataaattcatctcgcagtttacaggcggaatctgtaatttatttttttattattttgcgtttaatacttaaaatatgtgtgtccgtatatccgatgtgacacgccaaaactttacacccataaatctaaacacccctatatccaacaatctttctaaatctgactctctgagtatctatttagtcagcttgccaaacaaattagagagctaaatttgtctttttcactccagtaatctctctaatctgatggtggatcccacatgtcaatctatatactgttagcctaaaaaaaacaaatattaattgttacacaaacatttgctcgatatagatctcattgtgacacaatcaaccaaactaagagactacccaccttgtttatgaaattcatagattcagccaaaatgatgttggggagaggagacaatgacacttacaaagacaacacaaaaataccacatgaaattcatatagtttaattgttgttatatatgtatgctagctctctatatattggttgttgttgtgcactcggtggatagatggatggtggatttttatagaaggaatgggaaggtctaggtttaggggttgtggtttttttttgtaccgacactaccgtgatattttctcttcgtttggagcagccgatcgaaggtgagagaggctttgacttgtggatgcagctagctagctaaaccaacctccggagcacgtgatcacgctgcacccatgcaacaacatgtaccaaacccctcatctagtcactgacagcctgaccccacctctcataggcacgcatagcaatcctttcttgcagtagattgagtaacctctacaagcatgtcatccaacctttctgtttggtataacaaaaacttgcttggcttgatatatttacttggcttcattgtaggttttttttatataggtgttctttagttttgtgttttgcttttctttaataattttataggaggaactgtggtattgactaggattcttgtggtgaaacatgcatagttatttagatttgggtcctaaacctggcatggatgcttgcattatacttgttattgtatcccgatttatagcaaggactaagtgtcatatctcttattcaaccaatacgccacctctagtattttcctaaagcatgttttaaatggaggtaaatacttcttgagttcctaacatgtaactagaagaagatcgaactatccgagcaagaacacattggttggatgagtagtattcgagcgtgctacgggaggtaaatggtacaaggagaatgaaacagaagcttttcaagcactgttaccaagcttttggcaggtaaaaacataagcttttatgctaccaagcaggaatattcgcacaaaaagatgtcgggatatcactccaacttcacttgcaagttggcgctagtggtcctaggaatcgtccgaacgtatggatacacccttagggttctaagcttttgaagggcattattgtaacttcatgtgtacctcctaaggctatataagctgacccaatcctagcgaactaaaatacatttttactggtacaatgacgacaagtgttttattgacacatcttgatttcacttcaccttaaggctagacgggaagagaagtactttcctgcctatccccaatttcttcatgaccaatatgcatgcctagtttacataaggttaggccccaactaatattatttagctatgtaatgggatagacatgctatgtgagatttgatctccaatcctgtataaatttgttagggtacatctatatgagtgtgagggcgtgcatgtggtatatgcatatgaaatttgcttaaaaaccctttatgggatttttatcagtccaaccgaaatgttaagctatagttgaagcttaagctaaatcttaagctaattaagggattataaagcaacttcttaccttcggaaacacattgagttctatacgtagcaatcaattgaatcttagttgatgaagaaagatgtgtatgacatacttcaacacaacatgatcttaatcgcgaagattattaaatatgctagcttcaattaatccagcccacaatttttagcgagctaaacctcaattaattaaggccccatcaggaacaggaaatttataggatcactgtatgaatagccaggaagattccacatgagattctcaccaaaatctttgtcgaattccttaagtacgttgcaaaatggggcttagtggaactgcttatcaaacagaaacaagggttggtgtttgtatggaatcagatttgtctgcatcgttcaataaattccggtgactatgcgcaagtgaattgccacagaacagcaagctgacgtcttcgtagtatatttatttggaatcgcagatgttaactatctttctaaaactttgttaaagttagagaagtttgacctacgacaaaactaaaaccaccttacattctggaacttgtaaaccaccttacatactagaacttctgaaacagagggactgagggagtagctgacacaagaatgggcaaaccaacccctggtctgtaccaagctttccatgcaggaaatgggtaggtttgtgtttgctgccgctttgccatcagtctcaaagttgaagtaggtatgacatgcccccggaccggcaattcaaagcacctgttcatctaaccatatgatgtttcagtaccacagttcatagggtagttaaagtgacctttctcctgatatgacagacactaatagtagtaagcctcttcaggatacttaggccattcacaatacgcctccgtggcgttcagcctcagcttgagaaacagcatattctataccacgtcgatcgcgttcggagccttattaggaacgcgtagcaaattttggtcacccgttcttcccactaaaagcctgaaaatgctggcgcagtgacagggaagaggggggagagtgtgaaaactgcccgctccgctggcgccgtcgccatcctcctcgccgcaccgccgagcttgtcgccgtcctctccgcaccgccgagctcgtcgctgtctgcgccgccgagctcatcgtcctcctctccaccgtcgctcttcctcgtcctcggagagaggagcgccggagaggggagaggagcgtcggacaccaccgctctgccgccgctccggtcgccgcctcgctttgttcggccggtggagaagggatagagcagagagagagaggagagaaaaagtgagggtaggtatatgcactgtggaacatgtagctaacaatgttcctaggtgttcttgagctgagttgtatatttgcaatgcattgctaatgcccttacgatgcagtcaccaaagaaagaattaatgtatataataatatagtaacctcaatttgcagagttgaagtgtcctttacaaggtaggagtagcatcattatacaggccagatagcttcaaaagaatcaatctttctgacagatttttcatgttaactatgtgggtcataatgtacatggatcaggcctctccttgtctgtggctggacactgcaaataaccatgcttggtgtccatgggggagaggttatccttcctatctactattgactgactacaacctgatacaagttgggtacaaaatgaatcgacgactaacctcgtgatagggacagagaaaaaatgggttatgaatctttacttgaaaactattgtggtggcgatgcttctgaattctgatcgctggtggttacattgaaaaaaatcaacaaggttagctgctgcctgtcaagaggaccactgatcggggacggtgaggaagtactttgacatggctttcctgaacctcttcttgtactgcatcggagatatgacggtcggggactcgttcttggggcctcccaggatgcctgaagctttcacccaggtctcgagctgcttgtcccaggtgtactggcgcaagtagtcaataatgccaatgacaagctctttcttctcctcgtcgattccaacaagtagtgagtaatccatgacatccgctgtctgcaaagtatttcaaatgattaacagtcattttcagtaatataaaatgcaccaattcatgaagttgtgcagttttacaagaaataagtattttgtgcaatcccttgtctgaaataagaatatatatatgagatgaattatcaagattaatttccataacaacataccgcaagaaaagaagtgtcattccaaacggctctttccaatcttcgttttgccttgctccctaaaaatattggctttgtatgcaatgcctctaggaggtttgaatccaagaggactttactctcactggatgtatagcgtgagcgcaatgaaccctttagatcatagactctagatatcttcctttcaaagaaaagattctccatcaccatgaggtccatctttacttccctaccaccttttaagcccttgatattaacctgaactcaagaaaaggcagcagaagttagaaccaggggaatactctatacacttcattcatcatcagataaatcatgcaacaagaagaaaacaaacctgatatactcctacgattttggccaggcaagttggactacctgaagtcagggattccatcaaatatctgaagtactgaggagcaaactctacaaacgattcaagctctgtcctggtgacttgtttgattatgaatctctcatcaagagtctttgcaaagtaaacattgctttttccaccttgcgcattccatctcttgcagcggctaagtgaacggatgaaatcaatatcctttgggcagcatttcttcctaagtgcggcaaaatgctttgcgaaataacaagtaatggaaaactttgctttatcttcagaaagtggcgattcatcatcaaaagaaaacttaaagtgagttcccttagaatccaaatggtcttcttgtgagagcaaggtcccgtcaagtccatggctgctgtcaatggcatttggtaggtgtaagaaactcaaacttgaattcagtttgcgtgtgacttgctgcacatattcttgtgaagtcattgcataggacacgatactggtaggctcatcatcatagactgcaatgacagcatcatcttcatacccaatctgaggcaacagcagccgtgccccatcatcgatcatatgtgaagcagatgagatatatgtaagtgtacgggtaagaacaacatttaatttctctactgcaccaggagacctttgagaacaagccctccgtatgtttggcattggatctttcaggatactagtaaaatccccaaagtattcagcagatctgaatgacgacagatgcaatgaagtaggagccaatccattgcgttctcgctggtgtatagcaaatttagaatcaaatgaatgaattctgacaggggttacagaattcccatagcttggattgtctgggaaattaaacgatccatactcatcaattttggtaaaaccttgtagaaggtcatcttgtatctcactagatccagtccatgccaaatcaatcttatctgaaaaaatagatgcaagtgagggtaacctttcaacaggttccttacccattgtagctgtagtaactggctgctctgtctctccattgaatctgcggaaaaccttgtccagatcttctgcatcatccacaggatgagttacaagatcaatctgtgaatttgtctcacccatcctgtattccgtatcattcaagcagccttctctagatagcaaggattttcttggacttcctgaagattgcgacaaatttgtggattttcctatttttgtatcccccacaagcaggtcagctttccactctttcagtctgacatctaagaaaatatcaggatttgaaacatgactgtcttttttaaggagtgaatctatgtaacaaagccttcgatcccaaatgtaagcatcaaggagaagaccgcgtctcaagcggttgagctcaagaacatcaatagagacctgcacagaatgattgctatctgtaataactggcaacagcaggatctgcaaaacaaacaaagaaagagacagggggtcaatattaagataacataaccttttgtttaacctgaacgcatacaaccaggaaaatctcgttgcactacctcatatccatttctttccattttaagcaaatctttcatctctatgatctgcctttgaacacctgctttcaccggctcatcctctgatgtaacactattttcattatgatgaagaaaatcatatacctctgaatgtaaggtctccattttgctatatatctgcaaaagccaaaagtcaagtatatgagtatcatattattagtaagttcacagcaaaactatatgatgcagtctatgaacatggtcatcataacttagaaaaattgcatacctcaactgccatccttctcatccaatcttgtcgactgcggcaattgaaatccagtactgaggggggtaggttaactgagagaatatcaacaggagaatatctgaagaaagcaaccatgtttccgtacctggatatttagcagataaattgaaatcacattgaaggattgagcaatgttaattggtgaaggatacagcagatacatacccatagaaacgaaggcagtctctctggagagaatgtccacaacttgcaactcggttagcagtagtatggtttgaaaagcttagctccaagaacttcccaaacgacagaccccaagctgcatctgacataattaccctccgtgtggcaggtggtacaccatccttaggttcgcacttgaggcatctatgccacatccatatcctaccatcacgttcacctggtaacttttgagacagaagccgccgaacactaattgttaaactcccatgctgatgagtatagcacctgacatgtgattctgatgactctttgcatgacgggcagcaatatgcctttgcatgaaaaaaaacatttccaaaaattatgataatgataagaaggccatatgatagtgcacatacggattgtacaggaaatacctgatcaaataagtcttccctgaggtacctcccaagtggcttatcaaagctaccataaaacttgatgcggaagagctgagaacgctcgcatagcatgcttttggggatacaagtgcttgaaagggaaactaagatgctctgatggttgtcagtagcaggaaaatattcaccagaaagctcattcgggccatctgcatctcccatcaaataatcatcatgtggtttgggaccatagtggtctacctcttgaaatttctttcctgaaaccatgccttgacggtcatcatttatgggaagttgtgtcgagtcattcaaatactgatattgcatcaccatatctgaagttctaatgtcatgatccaatgaacatggaaatattttatgacctttgcatgattcagttgcatggaatgaatcatgatcatgacaattcatatgttcaacaggaattttagattccctatgctcagagatgaccccctctccttcctcattcaacgataatgagccaggtgatatagaattttccttaaacataccattgactctagtagcttctgaatgtttgccttgtacaggtttaagtccatgaggaataccaacaccagcagatccagcaaaatagttacttgggtcacttcgaatatcatttaccactaccattggccttgaaggaaccttgggaagagtcgcaccttcatcagcaaagaatgatgtttcaagagagaggtgataagctgcaaacacagcaagttgcacaacacgcttaattttctttagttcctctcgacatgatcctctcagtagaacctgcagaagttgaggtacattgattagaaatatatagtcctttgaaaagaatgcaatggtgatggtgaatctgacaccctccccctacaatgtgtacaagctgattttacaattgattcttagttcccgttgtaacagaattgtgattatgtttcagtgtattcaatggaaaaatcatttcttttgaacaggaatgattcatttttattcgtggcaaaaaacgggcatttaactagtgtaaaaggtaaaatgagatattcaattgaaaactaattacagaaccagtgctactactgcgtatgattgaatatacaagcaaggagttatcaatttatgttagtgaaatgaatctaaatggaatatttagggaacagaaatagattattaccgtgcaacctaaacgcctcggacagccttcaaagaacatcagggtcttcattgacctcctgtttgtctgttttcctgatgagaattctgaaactttatgcaccttgaacaattcacattgacctagtcttgctgaagcaatattgtcaattgacgaggcaatttgtgctcctgagcatcttgatatcctatccaaaagcggtctcttaacattcagaactaaagaaatatcttttgccaagagttcctgggcataagatgagacacttttctcaactagcagcacatttggtcgccgagactcaatctttgcaacaattgccctcaggtgctccttttcctgcatcaatggtatttcattcagcaaaacaagaaacaacaaatatatgcaacacaaccatgaagaaaacacaaacctgttcaagtatagtatcaatggatgctagtttgttcgtgaccttctgatactcaagtgctccccctaaaatgagcaattttgcattcacatgctcagaggccatgcgtttgtgttttacattcttagagcaaaccactcctctaacaagattgctgcataaaaggaacacccatcagtttcatatgatggaaagtacaaacatgtaaaaaccagtcaaacaacaaagctaagaacatacctatcacttggatcccctgatgctaaacatttaactttcacataatcagtaggatccatgctgccacctttcttggtatctggtctcacatagccagcagctagccaagctagggaggatactatttcaagccagcttttggatccattgtcattttccagatcaatacattctcccttaagcaattgagccacaagagcccggaaatgcccaagtacagcattcctcagaccctctttgtgagctatgtctgtgattgtgtcaacaccaactattttgttagtattaaagttaccaagagcaag

SEQ ID NO: 6109 - DNA, 11146 bp, Oryza sativa
tacgagtgctcgctggctccccgggcgggcaccgccagagagaggagggaggcatagagacgcacgagagagagggacagagacgcgagagagagaggtggataaggcacagtcgttgtggccacgagtaaagaacgacgcggtgcgctgcgctcgtagatgggcttggctcgtaggctcggctcaaagttataggtgtcggttttttaaaaaagaaccgatacgtataatatattataggtgccagttgttttaaaaaaccgacacctatagtataagtgtcggcttttttcactagaaccggcacctatagtgttttatataggtgccggttgttttaaaaactgacacctataatataaatgccggttttttcgctagaaccgacagatatagtgtttaaaggcgtcggttttttatttttccatcacagggtggtgggaaaagctctataggtgccggttctaagtgaaccggcacctatagatcgttccctttgagggtttttatagtagtggatctggaagggagggaggggagcgtcgccagctctcctcccactcgccacgtgcctccgcgctgccggtggcctctgccaccgccttcctagcatcctgatctgcgagggagggaggggaggggagagccagtggctagttgcacgctcaccgtcggccgtggccaccgccctccgcgccgctggttaccgccgccgcctccgcgctcagcaccgttggctgtggccgccgcctccgccctacgtgccgtagtgagggagtggatctaggaggaaggagtgaaggagtgaagggaggggaagagagtgcagctgggagggaggagtgaagggaggggaagggagtagatagagataaggggttggtggcggataatacgaggtcggatggtttttttttttttttcctttcaggcggaggatctaaaggttccatctcagacagatatcttaagaggtccgcattaaaaaataaaggtatttttgcaggtaaatctctttaggtctgccttcaaaacataaaggtattttgctgtgaaaatttttcgcaggtagacaataatcttgccccattgttattttcgtaggcgggccaattagatccgagaggcctatccatctaaaaaaaatatgccatcatgtgaaaagatggtttttctagccgtgactcacgaattgtgtatctctcgtgcggccatggttggttcgtcccaagcaatcggactaaacctgtaccaatatacacaggatgaatgacaaggcgggtgaagggtgtgtgcatccatttattcttcggtgttcatgatacaaattaaagagagaagcgaagggtgtgtgcatccattttgctattatgttcactaccaaatccggtgtgtatatcgaatccagcaaaatcagtgtgctaagaagtggatctcgtgttccacgaaattacaagcacaacttgatcaacctttgaatcgatgccaatcggcacaaatgcaagcataagtttttcaatcgataccaacacaagcttatcttttgaactgatacctctcagcataatacaagcacgttgtccaagactactccaggtccactaccctccctccccataaatagccagaaccagactcgccaccactcttgcgccgctccttcctcgccttgttccccgtggctccggccttccacgaggtatgcccgtctcctcctactcctactgtcgtcacgtcggtcgatagttctataagtgttgtaattgcgcttttgatcatattttaaagcctaactaccgtgactatctattatctatcttctattatatactaaaagtccattaaactttctacaaacgctctcatgccgccacatggcgctctaaaaacgctctcaagctgccacatggcgttctaataaaatagagaaaatcctagaaattctgaaaaaaaaatctagccctcaattttcatttaagttggtggacccattagtttacaccattagattagatccattataaatagtaatctatcctatagaggccaaaaggctcgaggcccgatggcccggcccatggcacggtattttggcccagcccaagtacggcacagcccaacggaggtcgtgcctgggaccctccaccggcacgttgggccagcagccaggcccgataaaaaaaataggggagtcaaaatagacatattatatgccatggacgaaagaatagggatgtaaaatagacttattttagcgatacttatgtcagcccaaagaggagggatggaaaatagacttattctagctatacatatgtaacagcccaaagaggagggataaaaaatagacttattttgaaaaaggcccgatgggccacctgtgccttcgggccggcacggcatggctcgacagctgatgggccgtgcctgggcgggaggtgcagcccatggccggcacggcccggcatgaagtgccgatcgggccgtgccggcccgatggctggtgggccgagccgggccaatgagattgaatgtagcctaagtaggagatatattagattatttactataaaattaaaaattaaagaatcaagttaactacattattaaaaaaatcattactttggatcatatatttttaagaaaaaagcaaataagttttgttgtctcctcgctatttcttagctattaaactaaaacaaaaacaatcaacaatattggattttttgtttagaaacacagcacgcgcacctcctgcacctttgagttcctccaaaagactgagtcgacacattttgagattgccgatgtcaccacaggcgtctcgctgtcgattggtacgtcacctaccactgaaagaataattagccgtaaatgcgagcacccgtgtcaagtctaggacttgaaccaggtgggcaagttacaccacaagaaacctaaccaattgagttgcgctcacttcacaatagcgctggatattaaaataaccataatttttaagctatattattgggatacttctatgtcttttaaaccggtgaactattagttataaccgttagatctatcttatatcttatataaaagataagcatgtattcatggtacatgacatttccaaaatattactgcgcaattatatttcgtcattatcgtattcatgttaggttgcatgtagcctatcacccaccctacatgaaatgttcatacatggatcactcaaactacatcactcatattagcctatataaacccatacatttagtggagcttcatatcacattcaattcatcctttaatgaactattataataaatatgcaattaaaaataccttattttactttcattgacatgttttctaaagaaaaataagactaccttattttcgaatgataaagaagactataaataattacttgtagatattacttaaatatgatatactataaaactaataggttagaaacttattaagcaattaatgctgatgaaaataattgatggataaatcatggcagatgttctccatttaatatttcgcttttatacttatctcaaactcacaaatcgtggcagatgttctctatttaatatttcgctcttatacttatcttaaactcagcgtacgacacatgcccgcgcgaatgcgcggactaccttccttgtttttttaaagtttgcttatttgatctttttttttttcaaaattgaatttgatctgactctattacataaaagcagtataatagagctaacttatagaaaaatacaatttatgcccttctcattagaaagagggccgggagagcaaagaggtatagtggaacgaaaatctggactggtatattcaaccaaaattcagagagctttccaatagggaatgcacaagagtcgacctgcaggcatgccagatatcagtacaattgctaagttcaactagaaaatctcagaacatgaactaaatcctaaatccactagcttgaactgctctcttcaccaaaagaattctgaactagagagatagagatcagataaaagaaaactctgaagccggcggccaaaaaacatgtgggattccactggaatgtgagcagctggtcactgtccaaggagatccgggaccgggtgtcctaggagagcacgcttgacaccaacgaggcaggtcacctgcgcctacaacgtcgccgtcgcgtccacctgtcacttcgaccgcgccgggagcagatgacgatgagtggggctgcctcctgcgatgtgagccgcacgacgacgatgacgtccgcaagtggccgtacgatgcatcctgcggccatccacgcgccgccactcgtccccgtctcggcacaggtccgtgcgtggtgcgtggtggcattcttatcattttgacatagatgaaatgaagccctaacggtatggagaaaataaggtgtcccttcgattttgaaaaataaggtcaaaataaataaactaagaaaattaagattaaaatgatagtaaggttttgcaacaggttaaaatgagtaattatccttttatattaaggatttttacggtacaatatactgctagtatatactacaagtatatatgatctaacgttgtagattgatttaattttttatttaattagattgcagtataaagtttgaaagtgtaattttgtcttttcttcgttattctatcatcaaatcgtgctatcgtcacgtgctttgtcatcaaatggcgctcaggatgctcctcccctagtgcacgataagatccaggaccaggtactctcaattaaattcaatttgaaccaaaaattactaaagtgttgtattattttctatcaaattcctaatattcccttttatatactgccagtatatactggtagtatattgtaccgtaaaagttctcttttatcttactatggagctttcccgagttgggaaattcatctgaactggcaaacagcgtgtgtagttgtgtagtctggagatttcagttactcttgacagtttcttgatctccgaagtgatttgtatttgattgaggtcatcaatgattagtcagcgcagagtagtttgaagtattgcatcgcaatgaacaaacggccaggtttgaatcagatcaaaagaagttgtaaataagtgatcgaattgactaaagatatgggaatcttggctcccatcaaaaatcatgtggaatttttagattttttgcttctcaggagatcaatcagacattgggtactgtcagtaacttggttcaattattatcttggttttggtgtttttcaccactgccgcttccatcttatttttggctttgtttgtttctatccgttcatttttgcatattgtaaattttaaaatattgtcttctctttcgatcgcaggtttttcaaacatggccgactcaattcagaatggctctggtgatattacacgggttttattctgtggaccctattggcctgctgctactatctacaccaaggattatttggagagctatccatttattcaggctagttgcactttttacatagcttatgtttgatgagaagtgaattagctgaaacatcaaagttagattagtgtggactaaaaggcttttaactggtttagaacttttcaactcataatgaaaggctattatgatataggtttcttcttccttatattttttttccggcacacacatgcataagagttatatattattacatcctatcttactacaaaattacaacccactaaatcctaaagctcaacatgtaaagattgcacgtcatcatccactaacaattattaaatcttaaacatcatgccaacatattatattatctgtaattctattatttattaaactagaaaggtagcccgcgcacttgcacgagtaccttattgtataatgtgagtgaaattttattatgaatatttaagtgcgggtggatttttattaaaatatcttgtattttgttctaaactaaaattaaacttattttttgtgtgttgaaagctgattatatttttataattgcccttgcaacatataaattctaaagtaaaattacttgagatcatacagttttgaattatatgagaaaatattgtgttgaaacaatggaggtagttcctatgagaaaatttaggatactttaacttgccagaaggatatcttacaacctcaaaagaaatccaataatatcattttttgttgtattttaaaattatatatattttttcattataacagtccttgtaaaatgtttgaatttttctatcaagtattggttttaaatccagcaacatgtgttcaattttcaatttcatgtccatttttattttttttcttttggatagtttcattctctgaatcatctttgaaatgatttaatctttgcaattcgggacggaaatataagaacatgtaacctagcatgaggtaaaggcatacgttctaaattttctttcctgaaatattgaactaatggtcataatgtatttagcgacgaatcatcactaaagtgtattgtcttataacaaatacatgcttctacattgttctacgtcaagactttacaatgtattgtagcaagtttaataaaaaataaaggacatggtcattaattcctatctggaactgacttgatttattgctaaaggcattgcaaggttgttccactattaagatccttaggtacaactcacatgcttatcggtatgatgttttaccaaccacacctttattttcaccctattgtctatattgctagatgaatacctactatgattagtgacttgctagatcatatgtgtaattcggacgctatgatcatctttttaaaaaatatttacttatgtcctaaaaacatcattttaaaagtaccaaggtcaatttgtataggcatatcaagagaaattaattaagttggtagaaagtcgttaaatgtctaacgggatataagtaatagatggaggtacatatatgttttttttacctatatagataattttaattttaattgtcaatgagataaaaaaacagagaaaaaagaatggcacgcgatgtacatgggtagggagagggagagaggattgggatgtttttcaaaatgattaatctaacaacctaaaataatgggtcagatgtttatgttgaaaccgatggtaagatgttttgttttcttgtcagaattttattaggattttatttgatttaagagaacgacgtaacatcttaacaacatttataaaatgtgtaatggacttttaacaccgtatgccgcaaaggagggagggaagaaggtttagggtgttcttttaaaaaaagatataatgacctaaaataatgtgtcaattaattcatcgatttatgtcatatctaatgattgggtgtttttttttccaacatttctaagatttttctctaatttaagaatgtcatagaggtatttatcaaataattagtggattttaacaccgcacgaggatggggagggagggagagagtttgggttttttcttattaaaaaactaacaaattgatagccgaatgttttgttgtttttaagattttctagtattttctttaatttaatagcaccatgttgcagtttagaagtatttgtaggatattttaagatgcatagcgagagctgctagacctaataggtggaggtctctttgtggtttttttaatgtaaaaataattttgattttaatttctcatgaatatacctcgttggtacatacgtgacgggagattccgaatgtgtgctttttttataaaaaaatatctaacctcctaatataaaaataatggatccaccgattttaataaaaatcgatggttggattagaatgccacttggcaacttaggagtgtttgtaaggtaccacttggtggcttaagagtatttgtaggatgtttaatgaatatttagatataattgtctttttttttgaaatttctaagattttctttaatttaattatgttatatagtggattttaacgctgcatgggggtggggagggagggaaagaggtttgggattttttttattaaaaatatctaacaacctaaatccatcaatttaagtagaaatcgatggtctgttgctttgtattttttaagattttctagtaatttctctaatttaataataattggtctatttgtgatttttttacctgtaaaagaaattttgattttattttctcattaaatagaaaataacacataaatgaaaatatggaaggacaaaagggaagtacttacagtacatacgtacattggttccgtatgttggttccggatgttctattttctttacaaaatagatctaaccattcaaaacaatgggtccaccaatttaagtaaaaatagatggttagatttcttttatttattatggttccacttggcgacttgagagtatttatagggtgccacttggcggttcgggagcgtttgtaagaagtttaatggacttttagtatataactaggaaggtagcccgcgcattcgcgcgcgcatgcatgtatcataggctatgtttcaaacaatgtaaggacaaaatataaaatggaggatattttcagaatataaatcggaaagaaaacccgcacatatgcacgggcatcttatttgttgttcaagaaaaagaatgctaaaataaatcatatcttagtatatacattaatacatataccttgtaagggaatgtagattaccctaaataaaaaaacaaatatatttgccgtaaaatagaaggtatagattactaaatgtgatagaatgtctattagatttaagtaaaaatccctttgtcctggtcatatataaactcgtcttttatcaccactacttattatcattgtttttgaaagttaggtgcacttttaataaaagaaactgtatttgtaccactaaaataaatgatacattatttatacacaaaaaatatcatctacactgcataacccggtatgcataacttattttcacatctatgtataaattgtctaaaaatatcatatctactagataatacgataacaccgttaaaaatattcatgaatgattttctaacagatgaagtcgaccgtagcagccaacctaggctttcttacataatgccttgaaacacgggtctcgcatcgatgtaaccgtgcccctaaataccatcttaaagtacaattttaacactcaattcaccattggcacacacaaatgattgcattggtaagtatgtcattttagttacattggttatggtggccttttagacaccaccttaactcaaccatttacatgtctctacaatatttatgatggcatagcaagtaatacacccaacattgaaggacagatatatacagaaaggaagaggtggcgaaaacaatattatttttaagttttgagtcgatttaaagtaatgaattgacaaaattgggttcagaggtgtataacattcgtacatcaattatactcagtatatagaatttatagttttatatgtgttttacggattgttcatgtttgccaatactacttggcaaagaaaaaacatacatggataatcataattctcatgatgaattaaggattgtattgtagcaaaataactgcctaattcttatttgtttatttgtttatttacatctatctatgatgtatgcttctctctcctcaaatagcaatcaaaaaaattcgaaaaatttcagattcttaaaatctcaatgtcacccaaaataaacataaaatgatccacttaaaaaccaaagctaaattgtagttttattatcgcaaaaccactgtctaaaatttaatttaatttttctcatctatctattatttgtgcttctcactcatcaaataagaataaaaaagttttgaacaaatccaaatattttgagaatctgatctccaaaattaaataacccaaaacagatgtacttaaaacacaatgttaggttttgtcagacagttgctttgacattttatctattagagattaagtttaatgtgcatatctgtgtagtgttatttttaataaaataatagtttaaaggatgttgacaacacatcagtgtgaattttcacgattagtatttctttccgattctatgtacgtttgcatgttttcttttatttatttggttttatctgttttatttatcgtatatggtgtaggtatttaagttttatttttttaggatggagacgatcgtacgacgtacgcacattatgtttttttttccagatagagattagcagcatgggatttttaatatatctaaactaatatttaaaataacgggtcctccaatttaagtaaaaattaaaggatcatatgcttttcttttttctctgaatttctaggatttctctaatttattatagcacggcgtgacggcgtaatagtttttgcaggatgtttaatgcatttttagtatataaataaatttctaggatttctctaatttattagagagacacgtagcggcgtaaaagcattcgtcgtatgtttaacatactttagtatatatatagttgatagatagtagatagatttataagatgttttaaagaacattgattggatatttataatagatcttaatttgactaaatatatttatatttgtgaagtaaatatattttatctttatactgtagaaaatcatattttaaataaataccgtaacattgggaaagttttattattttattttcaatacgtacctaatgttctgtatcgtatataaactctatggctgaacagtaccgtttctatgttatataatatatgaggaagttattattttttaataatagatctaatttaatggtataaaataacgggtctaccaatttaagtgaaaatcgacggtaagattagatagtgccacgtggtggcttaagagcgtttgtaggagtgccacgtggcggcttaagagcgtttgtaggaagtttaatggacttttagtatgtaatagatagatgacatattttgtccatttcggtagagctttagaaaattttacaagtcacatattttgccccgccacggtggcaggaggacggcgctagccactttggcgccccaaaaaggaccatttctagaataagtttttctagaggtctatt

SEQ ID NO: 6110 - DNA, 42166 bp, Oryza sativa
ttttgaacaaatccaaatattttgagaatctgatctccaaaattaaataacccaaaacagatgtacttaaaacacaatgttaggttttgtcagacagttgctttgacattttatctattagagattaagtttaatgtgcatatctgtgtagtgttatttttaataaaataatagtttaaaggatgttgacaacacatcagtgtgaattttcacgattagtatttctttccgattctttgtacgtttgcatgttttcttttatttatttggttttatctgttttatttatcgtatatggtgtaggtatttaagttttatttttttaggatggagacgatcgtacgacgtacgcacattatgtttttttttccagatagagattagcagcatgggattttaaatatatctaaactaatatttaaaataacgggtcctccaatttaagtaaaaattaaaggatcatatgcttttttttttctctgaatttctaagatttctctaatttattatagcacggcgtgacggcgtaatagtttttgcaggatgtttaatgcacttttagtatataaataaatttctagaatttctctaatttattagagagacacgtagcagtgtaggagcattcgtcgtatgtttaacgtacttttagtatatatatagttgatagataatagatagatttataagatgttttaaagaacattgattggatatttataatagatcttaatttgactaaatatatttatatttgtgaagtaaatatattttatctttatactgtagaaaatcatattttaaataaataccgtaacattgggaaagttttattgttttattttcaatacgtacgtaacgttctgtatcgtatataaactctatggctgaacagtaccgtttctatgttatataatatatgaggaagttattattttttaataatagatctaatataatggtgaaaaataacgggtctaccaatttaagtaaaaatcgacggtgagattagatagtgccacgtggtggcttaagagtgtttgtaggagtgccacgtggcggcttaagagcgtttgtaggaagtttaatggacttttagtatataatagaagattagacttaaaagattcgatgtcatgttttcgaaaaaaaattttggggaactaaaccagacctaattcttctctgaaatctcttttactctgcttatctaccgtgatgtactcagaacacacaacacgcccggagaagaaattatggaaatatatatacatattttgttttcttttgaaccacaccacttaaaaaaacaatttttcggacataccctctgttttattgcaggcgggctaaaagaatgtccacatgtaaaataatttgaatgttgttctgtaaaggaccgtatgttaaaattgattttcgtaggccggtaacatttttaataactttgatggaaacaaccgttattataaaatgttgttttaaccccgcaaaaaaaaatgttgttctacaatcgtaactgcttgtgttatggaaagtaggcatggcttttctttttagaaaaagtacgaattaccccccgaactatcgcggtcgaccgattaccccctaaaccagaaaaccgacatcgttcaccctcaacttttaataccagacaaactacccctgcagagcggtttttgtcctacgtggtgtacacgtggcaatccagtcaacattttatttattcaaaaaatgtgggacccacctgtcatactcctcttcccctcttcccctctcttctctctctcgctctttctctctctctcagcatgacggcggcggacggcgtggtcggcgcgcaaggcggtgcggccgatggtgggcggggcggtcggcgcggatggcggcgaggcggagaggtgggtcgcggcggagagtcggccggaggagaggcgagatgcaaccgcctctgcgtcccgtgccaccactgctccctcccggaggagttcaccgctgcctgcgttccacgtcgccgctgctccctcccggagttcgccgccaccacctctgcgtcccgcgtgcgccaccacctccgcgtccctctcctccgccgcctgcctctccaccttgcccgcatctccgctaccgcccgcctgaccgcgccgaccgcccccgcccaccgttggctgcactgtcatgcacaccgactgcaccgttcgccaccatccccgcaccgccatgcgcatgccgagagagagaggaagagcaagagagagaggaagaggggaagaaatgtatgataggtgggtcctacattttttaataaataaaatcctgattggattgccacgcgtacgccatgtaggacaaaaccgctctagattgggtcgagggggggtaatttgtgcattattgaaagttgagggtgaacgatgtctggtttctgggatgaggggggtaattcggttgaccacgatagttccgaggggagggtaattcgtactttttcctttctttttcagatgtgcatatgcatatttccatgtacttgctgagtatttcatgtaatcaccacacaattgccccaactccagaaggaaggtttccgctattatctaaggagtttgctactgaaatcgaggactaggccatgtgccacagttgattatctgtgacatgttgaatggagcttccgtgcatttattttcttttccgttgtgctattttattcttgtgttgccctcaagataaataaatgtaagtgagccataagggttatcacaattatttttattaataaatgttagttttttttttttgatgttggctgttatattatcttcgtactgtgtgtgataggttgattctggactagcacgtatacacagtaggttctatttttggatggagttgccgtacgtgcgaactctcagcggtgtatcaattaaaggagcaactctgttctactcccctgttttatattataaatcatttgacttttttttcagtcaaactttgttatgtttgacgaaatttataaaaaaattagcaacatataaaatattaaattagttttgttaaatccaacattgaatatattttaataatatgtttattttgtgttgaaaatactgctatatttttctataagttatttaaaaagttcaactagaaaaaaaaagtcaaacaacttataatataaaatagatggagtattgattaagtagcccaagtttcacccgcaaattcataatctattcatttcacattgtgcaaaaaaaaaaagcatacgaaacaattacaagccataaacatcatcagggaataaatgtgagactcaaaattacagactccatcgaggattatgccagtctaactgcatgatggactttctaatgggacccattgccactagccagaccgagccaacactggtccaaccatccctatagacgatcatcaagaacctaacaacacccggttaaaccacaccacatctggtccgaccgggccttatcttttcgtttatacttataattgtcagctaaaatttaaatttttaaccttaaatttggagctgcctttgaagtttttcatcaaaatttgtttttcagccttcagttctagatcgctaagaacaaatatataaaagttttatttataaattattttttatttataaatataccgtttcgcttattccgcgatggcttcgtaggaggtaccaacaggtctgaccaatcatggaacactagtccaatcatacggctcccgatcgatttgaccgggatcgcaactccactccattcagaccatctattcatggctctttcacccatttaattaaaatgttttaattaaacatcacttcacaacaatatcttaggccctgttcagtttcagagataaaaagttttgacgtatcatatcggatatacggatacatatttgaagtattaaacatagtctaataacaaaataaattatagattagtctataaactgcgagatgaatttattaagcctaattaattcgtcattaacaaatgtttactgtcgcaccacattgtcaactcatgacacgattaggcttaaaagattcgtctagcaatttacacgcaatctgtgtaattagtttgtttctatatttaatactccatacatgtgtccaaatatttaatataacagagtgaaaagttttttttgcgtgggaactaaatcccttataatcattatcataatcaactgttcatcacaaactattattcttcaccatgattttacatattgttcacacaattgagcagtatgtggatcgacgatatgcagaaggcctatgcgtttgcatgtttatatatagtcacaagtacggtagaaaatgtgacataacaagggtacctaacggtgggggccagtagcccagtgaaaaaaaaaagagagaatccttatatgccactgaaaattggtctgattccttatatgtcattgaaaattggctactcccttatatgccattgatctaaattttcacaccctctcatgtcactcccgtcagttgaccgttaattctcaagaaaaaaagacatatttacccttctgattatagggcatgcctaacaactcagagagagcaaatatgtcttttttacttgagagttaacagtcaacacacggtcaattgacggtagtggcatgagagggtgcgcaaatttggaccaatggcatataagggaagagccaattttcagtggcatataagggatcaaaccaattttcagtggcatataagggattatctcaaaaaaaaaaatgcccaaggagctagctgtgggtatgtgttcgggaaccctcgctcccttccctagctcgtgaaacaaagtagtgtttagcgcgtgattaattaaatattagctaaaataaattagaaaatttggattaatatgattttttaaagtaacttttatataaaattttgtttttgcaaaaaaaacgtactatttagtattttgaaaagcgtacgtgtaaaaaacgatagagatgagttgagaaagcatagataaggactcaaggtccgatccctgccacataattgggccacgtggctaaggcctggtttagttactcaaatttttttttcctaaaaacattccatcaaatctttggacacatgcatggagcaataaatatagattaaaaaaactaattgcacagttagggggatatcgcgagacgaatcttttgagcctaattagtcaattagccataagtgctacagtcacccacatgtgctaatgacggattaattagactcaaaagattcgtcttgcggtttccagttatgaaattagttttttcattcgtgtctgaaaacccctttccgacattcggtcacatatccgatgtgacatctaaaaattttcttttctcgaactaaacatgggctaaataacctgaaaggaagtttacatatagtaataacgtgccacgtatccagcagagcaccgtcgttccatttccgtgctaatttggtgtgctgcacacctatatatcggccatccgccccttcccatcccgcactgccatcgactctctttctcaggcacatgcacgagtaatttttatcaggcacagccatgggctagctactgggagcgccaaatggtgcgtcaatatatatatattctagtgtgttgcactattgtctggtactctctgcacctatagcaagagtgtatagcagttgcatttctgacgaactgacgaaagtgtgataccaattaaactcatctatatatagctaagggcacccatgttgattggataatctgtatgctaactttctagtgtgttattttgggtccattgaacaagcagtcgaacactggacaagccaaatgtaataccctatagcccccatccatttttcttcgggaccatgcatccgcgctccctgctctaccaataaattccaagctaacctagctttgagtttatgagcatgtttgtgattgacctaaatcataaattagaaacaaaagtggggttactcattgattatatcgatcgatcggcagatacaagctagtattttggtacagatcatgaaaagagattcgcaccttccaacaatagtaaaaatgtattttgaccaaaaattaacttaaacaataatgcaatctactcgtagtataatactacaagtagaaagcaccagagcgtcccccttatagaaaatatagatgtcgttcgtgtgataggtatttgctaactagaataattccattctccccaaccacctagtgaaaactgtaacctcttgagtgccaggattcagcatgcattatacgatcaaggtgcacaccctaaactagcgcatcaaagatggttaaactcagctatggttaaaaaatgcaagcttgaacaaacctgccttaaaatcacattaatcacgctagttgaagccagttttctccgaggactgatagtgtcacaagcacatcattatgttccccatcaccaaccaacaatttttacatatggcgttgtggagaaggcatgagagctgcattggccatctcaccgcatgtccatcaaccgagttgacaaccagcccataccaagatcacacattagattcctcatgccactcattccaaaaagagtgtaaaatgctcaagtgcatgtacatcgatcttgcacttgttaaaatcgatcgaatgataactagaagtatatatgtgtaaatgtttttgacagtgtgtggttatgaattaaatgatcgatggcatgtataaataatgccttatttcaatttgcaagcaagctggtaaactgatgaccgctgacatgactcacttgaagcatactaaaccagaagaaaaagcaaggttataaatggactgttctgacaaacacgttggctaatgtatttgtactggtccacaaagaattcaaaacaatactatcacttcgatctccttgcaacaaaaataaaaataaaagaacaaagtccattttattcccttgaactattttgctagcgagtagcgagtaaaatggacttcttcagaataaaagaaaaggtgttatatattccagcaattaaccgtatcggaatatattttggtcaaattttctctctctctccatatgtaagcttaatatatctacactaacttttttaccaaattgtagaatgtattgtatcaaatggattacaaactcatttaattaattttaagtcccaatcgtcctccctgtatagacattacgatattattaggaaggtgaaggtagaaaacctaaacatccaagcgaatccttgctcgcacgtgcaacctgtttacaagctagtccttctcgttcccgaccagcaaagctccaatcataacctaaaatcaatttggtgctgccacaatctaaaacggcgttgctccaatcatgttataccagcactctagctaacaaccatcattatttaacttcgactgcggaccttcagctaacttgttttactgacaccgctcattccgatcaaatgttcatgccagtcatgcatatttctcgaacgagcttcagtgacgtggatatcgagtttgtctctgcccacagactgaaactagtgccaaatcaacctggcaatctggacttgagtggatcaaatcggtcgatcaagcaattacaatttgtctttgttttttcttacctagcaaacaaattaactggagcaacccaaaagataaagttgaggatatcatgagcacatgaggcaggtgaagggagtgagcattaagtaaaagcgccagaatgtgctacacctatatttatacaaacgcatatatgggttcaaatatttaatcatctcaagtgcatatggataaatcaactgtaactatggacctatcgtagcgcttagagtttgcgcctttcagtaagtggtaggtagtttggtatccaggacggtttagtataggctaaattgtacattttaggtctgcaacatttttagcacatctgccttatcaacaccaactactagaaaaaccatatccacaaacatcccgttttattttttgaaacgggcttaaaaaacccttgcctataaaaatatattggactcctccagttaagacctgcttgtgtaaattatttttttttcaggtggtcatcttaggtggtgtttgaatctcctaaagatgaagataaagataaagattaaatgtttcacacaaaatgaggtggtaataacgtgtgattaattgagttttaattattacaaacttgaaaaatggattagtctgatattttagagcaactttcatatagaaatttttcgcacgaaatacaccgtttagcagtttgaaaaatgtgccacgagtatccaaaattgaatcttgtgcttgcagaaggtctcttagggagatgcctgaaaaatcccttctatccatttggcccctactattgaacacctgaaaaaaatacccgtatgtgactctccaccatcttcaaaatattttactcgatggatactactgtcctgcattttctcctcctcccacatctttccgtctctcctcatcttgtccctctcctctccagcggatactgcaatagcagcagctaatcgaactacaatggtagcagcaaatcgaactggaacggcggcagcgggaaggggcggtggtggagacgccggatctgagggtggtgtttaaggggagagaaggggccgcggtagcagcagcagagaataagcggctgtggtggaggcaaaggaactagaccaaccggtgcacgcagcttgagcagaggattggtaagtgtcacataaagcctttcacaatgcaagctacacagattgaatggtcatgtgaaaaaaagttaattccacattgaataaaagtattagaagaaactcatcccaccgtgtatgaatccctagcaactacagaataatatcaaactaatacttttcgcttttcagtcatttcctctctcacctagctagtctctgcatcctttgtaaactatgataaggcccgaaggccgccttcgttttcttcatatggacacgaggtgtatcgcgagacgcggtatttgtgcgcatggagaagaacctcctacgtggatagttgaggctaaacgccatatacgtgcactgtgaaagacctaaccggctaaccccagtcacccactaatacatctgacatatggctctgtggcggaggcgtacgtgagcggtagctgcgccgtccatgactccaacccttcacggcctgtcatagactcatagcacgtcaatcaacaattcaacatggacgacaaccagcccataccaaggtcacgcattagtttcccattgccactcattccaacaggtgtaaactgctcaagtacaggtaaaccatgcacttgttagaacggttcgaataatgatatatagctagaaacaagtcaaattgcaagctgattggggagatacatatgcgagaagctggaatgggatctatatatgtgtggtgatggcgtctgtatgataagaagcatgcaggtataagagacaggagtttgtgaagttatgctgcatgtactggccatatatatgcacaaaattcacaattgcattgaaccctgtttgctgcttaaaattgaacatgaatgggtagtttcatatatagctgagtacagttgcacatggtcatcgtgtattagtttccacattaacataataacataatatcatctatcttctattacatattaaaagtccacaaacgctctaaagtcgtcacatgacacttctataaacgctcttaagccgtcatatggtactttttaatcttaccgttgattttcatttaaattggtggacccgttctaatctcactgttgatttattattttacactattagcttagatttattattaaaaaaaataataacttcctcctcctgtatatatgatacaaacacgactgctgttctgatccgtaggaacgtacgtacgtacgactgaaaacacgtaggtagtacgattgaaaacaaagcttaccttctgctggccaacggaaaaaatcgacggtcaatttattttttacaatatgaaaataaaatatattacttcacaactataaatatgtagttaaattaagatcgataataaaaatataaaatatcctatcaacgttctttataccaccttttattttttttaaaaaaaaattatatatccaatttattatcccgttgtattctttaaatcaaatcaaactataaaattgtaatattgaggtccttaatacatcagaacacatggggccgacatataatagtcagttatgtgataatttttcaaaaaattcacatgatatttaaatctacatatgtaaaaaatgaaaacaacacaatttagctgtgtttttcaagtatatctaagatttaattgtaatttatttgagattaagattcataaagttttttaatattttcagaactatttgattggtatttgagaagtgggcagcatacatggtatacagatatgaaaaaaaaagtcatcaataacatttccagccaatgatcttgctataattcttccaaatatttttgacacacatgaacaatgaagtaactggcacaataaactactcatattatattttcttatactacaagtgaactccaacggattagttattgtaaataagcttgaaaaaacaaatatattcttcaaattactaaaagtatctcatgtggttatgaacaataggtgttgaaaacaaactaggctttaaactatagatatctttcaaaatataaacaataatatggtgttctgaatattatcatggtgatatgtctctataactataatttttataactataatttttttaagtatcataatgattaacctcactcattttcaaaatagagtattctatctatatcatcaaaatttgagtagtaataattgacatcataaatgtcgacgtttgagatcgcgactagggtatttgcatagtatggggatcgttggtaccagggtatatgcaagattgaagtaaaagagacggaggcaaggatttttatacaggttcgagcccatcatctgataggtaatagtcctacatcctattggccgaagccgatgttgctcctttattcatctgaatcacacaagtacaataattaggataacccatctagctgtcgtcgacttggcggcatggataaccagctcgtagtcaacgatagggtagtcttcctcttcgaatacgcagtcggtgggatcagagatagtgctagatccctcttgccagcctccgtaggaaccggatgggtatgtctaggctaatctctgatgttgatatccagcggcatgtcttggcttgtattggtctatgttgatcctgtggcttgtcccctctcctcctaggggggcttgtatttatacccatagatgcccccttgtccaagtagaactaaggagaccaataagggtacaatccgggtagtccttgtcatttccatatagaactctactcatccttccttatccggaattccttctatacacgaggtttgtttccgtataatacatggtatatggtgggccctgccgagtttagtcaactactattaggtatgtggtatccataaccatggcagtagcccccaacttcaatgcaaaataacgagtccatgttctcgaccgaagacttttgaaaaactgttgtcgtgctcacttgactgttctcggtgagatcagagatagcgctagattccccttatcggccttcgcaggcactatattgggtttgtctaggtcccgatgtcgaccgagaaggtatggagcatgcgactaagtctcccgtcttgctgtaattgagaatttgaattgaagtcaagtaattccatctcgacgggtacaccatcgcttcattccatattccttgttgagctccatcaaccgttctcgagtaatcgagaaggagcaaagtctgtgacaaagcctcccaacttgactgttgtgatgcctgactttccttaaatcaatactcataactgaatactaaatagaaatagcccccaagtgaacgctcaagggtaacatgatataatatttatggaaaattgaaaataatttgaactgtgtatgacaataaaagagtactctccctagagttgccctcagcaaacgaagtttggtacccttcctagcccccagctgtttttatggaaaaactattttccaccaagacagcttgaatcttataacaaaccatgctgaagctgacaagtcctagcccctagccgtgaagttggaaaagtcaatttccgactacacggcttagttaatacgcatccattgagcactcttacatgaccatgtcttacatggtcgttcggctcttagaatctgataataccttatctgctctgggcgtcctcagccaaaattcccatgggtttcttggaggcttgtcggaacagcgtaaaggaatagtaggaccgacttcaagatgaaggcgatataagaaaagaggatcactagacaaatattgtacacataaacacttatagaagttgacatatagtgatgagacgacttccacactgggtgaagaccaagtgtatagttatacttaacaaatcgcagaggtagtgggagattcgctacattgctgatcaaagaccaattatagtcgtaactcgaccacttcagtttaaggtgcgagagatcgctacatcctactggcaaataaccagaagtgagcacctctcgaccgttttgaaatagaggtgcgaggaccgctacgttgctggtcgaagactagtcgtagtcgtacctcgacctttagaagtcgtggtacaaggaccgctacgttgctggtcaaagactagtcgtagtcatacctcaaccattagaagtcgtggtgcgaggatcgctatgttgctggttgaagatcagtcagtcgtacctcgaccacttgaagggaatccagagaaacaaatggacaacattctcgtgacctacgagaattgcctcctgatgacaacgaagacaatgaggaattatcgtagtcggaggttcggctcctagacctactacctcatcctcgggccctctaaaagtctggggatctcgagttttgtctttgtgtgatgtcgtgatgttgttaaccttgtccattgtcgctctgattctgttaatcctagacgttgtcgtcctggtgactacggcgatcctatcggttttggttgtcattgtcacgatcacattgattgttgtgttcgatgtcgagagattgctgtaaccgactggtcgaggaccaggagtaggcacatctcgattacctgaagatgaatttttaggtggtgagagatcgctacgatctactggtcgaggaccaggtgtatgcgtatctcgatcacctatatgcaattgataggcatacgaaaacaaaccgtattcgcgaaagcatctcttgttatccacgactccccttatcaatatttgccatacacacttggtcgatcccagtgtaagaccgtagagacatggagtctttgacacgatagattgagtccaacagtccacaagtgaatataaattgataggcgtcgagatgtcgctacagcagtctggtcgataaccaggagtaggcatctctcaatcacctataggggcgctagatttggttattacatgtgcatctcatgtggccagcatgactcacatacccaacttatagcatatccggatgtttgttcgcaatcatgtcgggtgatcaagccaacaacgtttgcagaggattatccgttaacaacctattcccaaatagtccagctgtagctgtcgctatacatgagataggtcgtcggttttcgttggtaggttgggtgcgacaactcagctttttttgagaatgttctcgataatggggtgtactcaaccacatcctactcgagtgctcaattgttcctgaaaaatattttcaagaagacaagatatatagcagaaaatatcgagcatgtactaaaaaactgcattaatcttctagtattattaggatataatgagcagattaagtatcaggcattatgtaaaccgtaaatgtcgtaggatctccggaccttccattataattgagagatgaaatgtataattcaagtcatcaaacaagtataatgaaatatccgacgcctcgagagaggaatattggagacattgccgggcctttagcctgccagtcaacttcagcctgagatgtacccgtcaaaccactcgaaggcggtgaccagatgtgttacacattcaggagacttgacaaaaatggctaaagatctacaacatctcaaatattcttaactcatactcatgtgaatctagttcccaggatgtgcactagattcacactttcatctcaagcatgattatacatagcaaacacaaataagatgaaagcgattataaactaaatctactttagatacattggccgactggccaaaaaaaattatatagaacagcggaagcttgtctacccaatccacaagcacaccgactaggggtttaccccattaagttcaagtcctagaagaagcagtcgatcacccgcatcactcaaaggctaagtctaaaacctgcaagcaaaaggttaattccacagcaagagtcagtacattattagaaataatgttctggcaagcaccaagacaagcctaagaccctacttgcaaggcatataatcaaggaaggcataatatggttctttttagcataaagcaagttttatttgcataaaacatttctaaatcaggtttactttcaaataaatttcagcaagctagtatttgacatattgggcatcaaggtaggcattaatcatgtataaatatgcacctcattgccttccatggcagcaaggagatcattctcaaatctcatcacaatttgaagttaaatttcagcatttagaagaattaacacaagtctatactcaatacatatccacacgccgctcatgaccgcgagcacggctaatcgattagttttaactctgcagagtttgtacactttacccacatgatgcgaaataataatcatgcaagagcatggcacgcgatacataagtacccaatttattacccgcaacaaagcttttccaaaattcatgatttagccttacaccagcacgatacgtgttcctccatcctagtcatactggaaatatgacctagaaccgttaagtggcgggcccacgccttgaacttaacgccgtggtggcggacacaacgggaacccacccacgtggcacaataccgttgtattggacagacttagtcacctaaactaccacgtcggggtaaataggaagttcctctgagttatccgaactcatacacaccggcctaccagaatgtaaggctaaaccataaataatttactaagcttgggctatcccatactagcacatgtggttgtactgtatacgaaatgaactgacattgagtgaagtccttaggtcggtttgggcgcactctccccctatcggtacacaactaatcaccatatgtgcaccacttgaggcccaaccctaaaatccatgttttccaccattttatttatcaaatacttcatttattcatatctgtccagaacttaataaaatcatttttcatgttaatatgagcccaagtgataagtaaaactattctaagcatggctaagcaatatagtgaactagtgacaatgtaactcatattccaagtagtactaggatatgattcctaaggttaggaatgagggagatggatatatatggggttaaggtgataatgcaaataataggagtttgtctaacaagtttaacaagattttaatgtattagtgtacaatcgacatgcaagatttgcaaacattttcaataacctccaaaacataggttcaaagtgatcaaagagagggaggtgggacttgccttgaatcaggaaaatgtcagcacctaaatcacttcttcaccgattaagcaatcatctatacaaagtacacgttatgcaattaaacaccgaaatatgcgaaaaatccaaaatgttctaaaatgcatgatttgtgcagagagaataggtactggtataaaatgaatttaggtgaaagaatttctattttatctcattttatttgggagttatgaattttagaagtttcgtcggtatagtgtaggatttacttaggtactattgtgaaatgctgttgtaaggtgattcttattaagtttatgtttgctggggtgaagatatttgttttctaagactaacacatttggtttcataatttttagagttaatatgaattatttatgtattttacaagttttaacgtgttctaggcatatattccctatgtgtacatggctttggagatttaggtccagaacttgctctaacttgctagtgttgtataaaatgagtattttagttaactaatataatcttagtttataaaattttagtgttcagattactttacttcacattttataagctaggggatgttctatgttagaaacttaacatatcaatctagagagtattatatgagttaaggatactaagttttggtggaaggggatggatctatgccttcactggttcaacaagttttatttggatttatttggagctaccatgcatatatatatactttttcatatgtattgttttaaccactactatgtgtttagtacctattctaccaaattaaggttcagagctatggtctctaaagagggtgctataattcactctactaggttgaagtatattacttgctagttctatagaaaatttggttcacttcattttgactatagatgaattttctacaaatgttacaatttaaggtatgctccatgttgcttattccttacttaaatacttaggggttttcgttatactgtaagtatgtctttttattttataacattgaagtgcacaaccctatgattctactgaatttgggtttactcaaaaaggatctaagatgaattttatataaacttctaaagttcagcttatgtaaaactagtcattttaaaggtaatagttttagaggcattcgatgtatagtatgtatactatttcattttgctttataggagaacataagttggttgatctgtagaaactgagtttgctccaaaatgagttcaaatgaattttgtatgcattttataagtttgtgcatgctttatgtgtgatttaacttggataaattttagaggctaaatttgtactgtgagtgcaagtttttattccataacactaaagttcacaatttggtgagttcacagaaatttgtatcatcttaaaatgagctatatttaattttatatggattttacaagttttaggtacttttcttttataatttcagatttttgtttccaaggggtccactgtcagtgaaagatcaatatacaaaatgatccctgaggtttctaagaatcaacccgcagacctagcctcatatgtcagtgagttgaaaagttgcacattaaaccttatagttgtttaaattctcgaaacaaggtccctgacttcttttctcacgcacagaggcagaacagccatggctgagctcgatctcgagctcaccggcgacaaacgatggctcgtttgggggtgcaaccaaaatacaaaatgaagatcatgttattgcgattccattcctctacttttctcggtcagtggacatcggagtaacgccggcggcgagtccgaaaggaggatgttttcgggtggtgatgcatgtgcttctacaatcatgtattggttaattgggtgcatgcatgtatgttctataggctgaagggtgctcaccgagatggtagacatggctggggtagctaggtttatgacggtggctcgtgtaacggctcggcggcggcaagaacctccgggtgaacggcgatggctcaatcagctccaagaactatcatgcatgtgtgtccatgaggttagagaggccccagggatgctactgatgcatggaattgggttggtactcaccggagggggtggattcggcaacggcgacggtgaccggaggtggagaagacggtggacgatctccacactcgtagcaccatccttcgagattcttgaggggaaatggagaggaggtcgaggcgaagacgctggcgtgacagcttggcccgacttggtccagataagcgggaacggcgatgatgtcactgcggcggtgcacagagcgcgctccagagctccggtgtgcacggcagcgtttccgtcgattggctgcaccagagaggatgaaatcaaaaggagaaatattcggcatggtgaggagagtatggaacgcaagagaagaggaaacgaccgcggctcatcaacgattgcggccatcgtcttcttcgcggccggcgatggagaaccagtggagaagagcagcgaggatgctctccctcggatggatcggcactggaatggtgggtgaagagtggcgacgcgtctgggagaggcagaaatggagctcgtcatttttagggtgtcgacacgtcgtggccacgcgtcgcgcggcgtccagagccggtcggcgctcgatctctccctctcagtgtttctcggtcagctagggaagttgcacagaggaagggcaagccagagggactgacaagggggcccaggtcgaagtaaactaggtggaagagagatgtgtaggcagaaacatgggtgagcttggtttttggacgaatttccggaattattttctcctctaattttgtagcttcaatacttaatgtgttgatcagattagctagtgttgattttactggaggtaggtgtatgtacctagtttccattttctttggttgcactcaaaaattatggatagattactcacagaaattagaggaatatgggttctttggaaactagttcgaatttttaggagacctaaacagagaagataaattctggaaaaattatttttattcatgataaatgacctagtatttgaataaattattttacttatacacttttatgcagttaaatgcacttttagacaaagtatggttttagccgattaagaactacagttaatctagtttttattagtttggctgatttatttgaggtaccaaatttagttattaaattataccaaaattacagtgagttgtatgtgttgagtagagcctacatgaattttcccatgattttatcttgcatgaattattttagataattcgcaggacttatgtcttatatgtgtttctctttcctaaatgcatgtaaatgtttataaaagttatatttggactctcattaacctgaggtgatgttgatatgttagaattacagtttaccttacacatgtcataagctcctttcctatttatgcatgagtttactttagtattaaattaagagaatgcttatagagatgattaagatagaatataccctatatgatataatttatttgttcactttcatgttcatgacatgtcttcagatggatgtcaaaattagttttgtgaggcttgacattagccatgttgatattttttttaaggtgtatggtttctatgtattattttccattagttaacactaggccctaatggtttagttgtttatctagatcttagttaatattcatgagacctattatgaaatgcaaatcgaaaatccaaatgcataagaaggactcaagtcaaaatatgatttatgcaagtatgcatgctttcacttgggttgcatccaagtcctaggttaaagatgaaaaagtttttaatttgttctcaaattttattcttgcaagagttggatcaactccacctaggtttaaaatagaaattcttggtttacaaaattgaagaacttccctttcaactagttttgatggaaattccttaatcctagaattcaggtatgttacagtaaaccagcatgatacaaaagaaaatagagcgagcccccagtatttaaccgttgtcggccaaatacagggaacactcacacaatagatgtataaaaaatatgctctaggtaaacatagtagattattgatctgataatattgtagtgatctgaataatgggtacggtaaattgtatattaatagattaatatcaaaaattagtctactaaataccttaatacgtccggccggttctgggaggaggttgagaggggagcgctcactagtacaaaaaccgtcataggtgccggttgggaatcggctataagtgccggttttcgaaccggcacctattggtcggcaccaatacaagaaaccgacaccgatgtagaaaatagaaccggcacctttagctttactcgagccaaaaaaacaaaggagagccggctcaaatcgagccgaactactccccagaaaaaatcgaatccaccgtcattcctctctctcgcccagatctactccccttcttcgccggctctcagatgcgagatcaacttcaacaacaaaccgtattcatcaagaactagcgaacagtacaaaccattaaccacaagtttggaacaaaaactcaacaagtttagaactagaactcaacaagaaatcaaaaagacaaactcaagaacctatgccgccggccgccacctcgccagcaccaccggcgtccctcaccacgctcgccgtcattgccgcatggagagggcgtcgcccaggtgcgccgcacctaccttcgttaggcagctgccggacgtggaagcccgccgcctcccctcccgctggatctggcggatgggagggtgcggccacctccgccaccgccgtctctccaggcaaccgccggtcatgggaacacgctgcctacgactgctcgccgcctccgccaggcagctgcgaccacgggagcccgtcggccgctgcctacgagtgcagccaccgcgagagagagaggagggaggcggagggcggaggggagcccgtcgccgcctacgagttctcgcccccgccgccggctgcagagcccaccgcctcgcctcccgccggatctagcggaggggagggcacagctgcctccaccaccgccgcctctccaggcagccgccggtcgtgggagcccgcctcctacgagtgctcgctggctccgccgggcggccaccgcgagagagaggagggaggcagagagacgcacgagagagagggacagagacgcgagagagagaggtggataaggcacagtcgttgtggccacgagtagagaacgacgcggtgcgctgcgctcgttgatgggcttggctcgtaggctcggctcaaagttataggtgtcggttttttaaaaaagaaccgatacgtataatatattataggtgccagttgttttaaaaaaccgacacctatagtataagtgtcggcttttttcactagaaccggcacctatagtgttttatataggtgccggttgttttaaaaactgacacctataatataaatgccggttttttcgctagaaccgacagatatagtgtttaaaggcgtcggttttttatttttccatcacagggtggtgggaaaagctctataggtgccggttttaagtgaaccggcacctatagatcgttccctttgagggtttttatagtagtggatctggaagggagggaggggagcgtcgccagctctcctcccactcgccacgtgcctccgcgctgccggtggcctctgccaccgccttcctagcatcctgatctgcgagggagggaggggaggggagagccagtggctagttgcacgctcaccgtcggccgtggccaccgccctccgcgccgctggttaccgccgccgcctccgcgctcagcaccgttggctgtggccgccgcctccgccctacgtgccgtagtgagggagtggatctaggaggaaggagtgaaggagtgaagggaggggaagagagtgcagctgggagggaggagtgaagggaggggaagggagtagatagagataaggggttggtggcggataatacgaggtcggatggtttttttttttttttcctttcaggcggaggatctaaaggttccatctcagacagatatcttaagaggtccgcattaaaaaataaaggtatttttgcaggtaaatctctttaggtctgccttcaaaacataaaggtattttgctgtgaaaatttttcgcaggtagacaataatcttgccccattgttattttcgtaggcgggccaattagatccgagaggcctatccatctaaaaaaaatatgccatcatgtgaaaagatggtttttctagccgtgactcacgaattgtgtatctctcgtgcggccatggttggttcgtcccaagcaatcggactaaacctgtaccaatatacacaggatgaatgacaaggcgggtgaagggtgtgtgcatccatttattcttcggtgttcatgatacaaattaaagagagaagcgaagggtgtgtgcatccattttgctattatgttcactaccaaatccggtgtgtatatcgaatccagcaaaatcagtgtgctaagaagtggatctcgtgttccacgaaattacaagcacaacttgatcaacctttgaatcgatgccaatcggcacaaatgcaagcataagtttttcaatcgataccaacacaagcttatcttttgaactgatacctctcagcataatacaagcacgttgtccaagactactccaggtccactaccctccctccccataaatagccagaaccagactcgccaccactcttgcgccgctccttcctcgccttgttccccgtggctccggccttccacgaggtatgcccgtctcctcctactcctactgtcgtcacgtcggtcgatagttctataagtgttgtaattgcgcttttgatcatattttaaagcctaactaccgtgactatctattatctatcttctattatatactaaaagtccattaaactttctacaaacgctctcatgccgccacatggcgctctaaaaacgctctcaagctgccacatggcgttctaataaaatagagaaaatcctagaaattctgaaaaaaaaatctagccctcaattttcatttaagttggtggacccattagtttacaccattagattagatccattataaatagtaatctatcctatagaggccaaaaggctcgaggcccgatggcccggcccatggcacggtattttggcccagcccaagtacggcacagcccaacggaggtcgtgcctgggaccctccaccggcacgttgggccagcagccaggcccgataaaaaaaataggggagtcaaaatagacatattatatgccatggacgaaagaatagggatgtaaaatagacttattttagctatacttatgtcagcccaaagaggagggatggaaaatagacttattctagctatacatatgtaacagcccaaagaggagggataaaaaatagacttattttgaaaaaggcccgatgggccacctgtgccttcgggccggcacggcatggctcgacagctgatgggccgtgcctgggcgggaggtgcagcccatggccggcacggcccggcatgaagtgccgatcgggccgtgccggcccgatggctggtgggccgagccgggcgggccttttggccatctataatctatccctcctaatttaggtgtaatacttacctaaacaatattggccggaataataagccaacaaggcttacgtacggacgagttaacaaccacaaacgagaaaggaataaatgatatacagcaaaaaaaaaaagaaaaacatactgcatatatactaagtactactggaaaaaaattgctttttaaactggattttcactttctttgtattattttatgacggccaatgttaaatatatagtgaaactaccgaaagaaaacaacgatttaaactagattttatattatactttctcttgatttttttattttatttatgatgatcaacgccaaatatttagtgaaggtggtagtttaagaaaaatatattacttcataaaacgcacacctaaaattagatctataatataatataaaatatcaaataaacatatcatttcacactacaattattgggtatagataacttttagttgcatcaatgggcctacattgatagtttaagatgaaataatgagtaattaaaatattactcgggacatattgtcagaaacacaaataaaaaatgtattgtttaaaaatatatcgtaatttttctcgtaaaacacagtcaggattttaaccgttaatgactcaatctacgcttttgatttgtacatatattttttaagtacataagtaataaatttaatgttgagttctaaagtacttattagattggctctccctcatttatcttgaggatgttctctaaactattaaactgtacatgttttgcaaatactttctatacatttttttttaaaaaaaaatctatttttatgtttgtaatatttaatacttaattaatcttgtgttgatgacctacatcgttttttatgccatgcataagctcaaccaatgagattgaatgtagcctaagtaggagatatattagattatttactataaaattaaaaattaaagaatcaagttaactacattattaaaaaaatcattactttggatcatatatttttaagaaaaaagcaaataagttttgttgtctcctcgctatttcttagctattaaactaaaacaaaaacaatcaacaatattggattttttgtttagaaacacagcacgcgcacctcctgcacctttgagttcctccaaaagactgagtcgacacattttgagattgccgatgtcaccacaggcgtctcgctgtcgattggtacgtcacctaccactgaaagaataattagccgtaaatgcgagcacccgtgtcaagtctaggacttgaaccaggtgggcaagttacaccacaagaaacctaaccaattgagttgcgctcacttcacaatagcgctggatattaaaataaccataatttttaagctatattattgggatacttctatgtcttttaaaccggtgaactattagttataaccgttagatctatcttatatcttatataaaagataagcatgtattcatggtacatgacatttccaaaatattactgcgcaattatatttcgtcattatcgtattcatgttaggttgcatgtagcctatcacccaccctacatgaaatgttcatacatggatcactcaaactacatcactcatattagcctatataaacccatacatttagtggagcttcatatcacattcaattcatcctttaatgaactattataataaatatgcaattaaaaataccttattttactttcattgacatgttttctaaagaaaaataagactaccttattttcgaatgataaagaagactataaataattacttgtagatattacttaaatatgatatactataaaactaataggttagaaacttattaagcaattaatgctgatgaaaataattgatggataaatcatggcagatgttctccatttaatatttcgcttttatacttatctcaaactcacaaatcgtggcagatgttctctatttaatatttcgctcttatacttatcttaaactcagcgtacgacacatgcccgcgcgaatgcgcggactaccttccttgtttttttaaagtttgcttatttgatctttttttttttcaaaattgaatttgatctgactctattacataaaagcagtataatagagctaacttatagaaaaatacaatttatgcccttctcattagaaagagggccgggagagcaaagaggtatagtggaacgaaaatctggactggtatattcaaccaaaattcagagagctttccaatagaatgtacaagaatcatctcttttcagatatcagtacaattgctaagttcaactagaaaatctcagaacatgaactaaatcctaaatccactagcttgaactgctctcttcaccaaaagaattctgaactagagagatagagatcagataaaagaaaactctgaagccggcggccaaaaaacatgtgggattccactggaatgtgagcagctggtcactgtccaaggagatccgggaccgggtgtcctaggagagcacgcttgacaccaacgaggcaggtcacctgcgcctacaacgtcgccgtcgcgtccacctgtcacttcgaccgcgccgggagcagatgacgatgagtggggctgcctcctgcgatgtgagccgcacgacgacgatgacgtccgcaagtggccgtacgatgcatcctgcggccatccacgcgccgccactcgtccccgtctcggcacaggtccgtgcgtggtgcgtggtggcattcttatcattttgacatagatgaaatgaagccctaacggtatggagaaaataaggtgtcccttcgattttgaaaaataaggtcaaaataaataaactaagaaaattaagattaaaatgatagtaaggttttgcaacaggttaaaatgagtaattatccttttatattaaggatttttacggtacaatatactgctagtatatactacaagtatatatgatctaacgttgtagattgatttaattttttatttaattagattgcagtataaagtttgaaagtgtaattttgtcttttcttcgttattctatcatcaaatcgtgctatcgtcacgtgctttgtcatcaaatggcgctcaggatgctcctcccctagtgcacgataagatccaggaccaggtactctcaattaaattcaatttgaaccaaaaattactaaagtgttgtattattttctatcaaattcctaatattcccttttatatactgccagtatatactggtagtatattgtaccgtaaaagttctcttttatcttactatggagctttcccgagttgggaaattcatctgaactggcaaacagcgtgtgtagttgtgtagtctggagatttcagttactcttgacagtttcttgatctccgaagtgatttgtatttgattgaggtcatcaatgattagtcagcgcagagtagtttgaagtattgcatcgcaatgaacaaacggccaggtttgaatcagatcaaaagaagttgtaaataagtgatcgaattgactaaagatatgggaatcttggctcccatcaaaaatcatgtggaatttttagattttttgcttctcaggagatcaatcagacattgggtactgtcagtaacttggttcaattattatcttggttttggtgtttttcaccactgccgcttccatcttatttttggctttgtttgtttctatccgttcatttttgcatattgtaaattttaaaatattgtcttctctttcgatcgcaggtttttcaaacatggccgactcaattcagaatggctctggtgatattacacgggttttattctgtggaccctattggcctgctgctactatctacaccaaggattatttggagagctatccatttattcaggctagttgcactttttacatagcttatgtttgatgagaagtgaattagctgaaacatcaaagttagattagtgtggactaaaaggcttttaactggtttagaacttttcaactcataatgaaaggctattatgatataggtttcttcttccttatattttttttccggcacacacatgcataagagttatatattattacatcctatcttactacaaaattacaacccactaaatcctaaagctcaacatgtaaagattgcacgtcatcatccactaacaattattaaatcttaaacatcatgccaacatattatattatctgtaattctattatttattaaactagaaaggtagcccgcgcacttgcacgagtaccttattgtataatgtgagtgaaattttattatgaatatttaagtgcgggtggatttttattaaaatatcttgtattttgttctaaactaaaattaaacttattttttgtgtgttgaaagctgattatatttttataattgcccttgcaacatataaattctaaagtaaaattacttgagatcatacagttttgaattatatgagaaaatattgtgttgaaacaatggaggtagttcctatgagaaaatttaggatactttaacttgccagaaggatatcttacaacctcaaaagaaatccaataatatcattttttgttgtattttaaaattatatatattttttcattataacagtccttgtaaaatgtttgaatttttctatcaagtattggttttaaatccagcaacatgtgttcaattttcaatttcatgtccatttttattttttttcttttggatagtttcattctctgaatcatctttgaaatgatttaatctttgcaattcgggacggaaatataagaacatgtaacctagcatgaggtaaaggcatacgttctaaattttctttcctgaaatattgaactaatggtcataatgtatttagcgacgaatcatcactaaagtgtattgtcttataacaaatacatgcttctacattgttctacgtcaagactttacaatgtattgtagcaagtttaataaaaaataaaggacatggtcattaattcctatctggaactgacttgatttattgctaaaggcattgcaaggttgttccactattaagatccttaggtacaactcacatgcttatcggtatgatgttttaccaaccacacctttattttcaccctattgtctatattgctagatgaatacctactatgattagtgacttgctagatcatatgtgtaattcggacgctatgatcatctttttaaaaaatatttacttatgtcctaaaaacatcattttaaaagtaccaaggtcaatttgtataggcatatcaagagaaattaattaagttggtagaaagtcgttaaatgtctaacgggatataagtaatagatggaggtacatatatgttttttttacctatatagataattttaattttaattgtcaatgagataaaaaaacagagaaaaaagaatggcacgcgatgtacatgggtagggagagggagagaggattgggatgtttttcaaaatgattaatctaacaacctaaaataatgggtcagatgtttatgttgaaaccgatggtaagatgttttgttttcttgtcagaattttattaggattttatttgatttaagagaacgacgtaacatcttaacaacatttataaaatgtgtaatggacttttaacaccgtatgccgcaaaggagggagggaagaaggtttagggtgttcttttaaaaaaagatataatgacctaaaataatgtgtcaattaattcatcgatttatgtcatatctaatgattgggtgtttttttttccaacatttctaagatttttctctaatttaagaatgtcatagaggtatttatcaaataattagtggattttaacaccgcacgaggatggggagggagggagagagtttgggttttttcttattaaaaaactaacaaattgatagccgaatgttttgttgtttttaagattttctagtattttctttaatttaatagcaccatgttgcagtttagaagtatttgtaggatattttaagatgcatagcgagagctgctagacctaataggtggaggtctctttgtggtttttttaatgtaaaaataattttgattttaatttctcatgaatatacctcgttggtacatacgtgacgggagattccgaatgtgtgctttttttataaaaaaatatctaacctcctaatataaaaataatggatccaccgattttaataaaaatcgatggttggattagaatgccacttggcaacttaggagtgtttgtaaggtaccacttggtggcttaagagtatttgtaggatgtttaatgaatatttagatataattgtctttttttttgaaatttctaagattttctttaatttaattatgttatatagtggattttaacgctgcatgggggtggggagggagggaaagaggtttgggattttttttattaaaaatatctaacaacctaaatccatcaatttaagtagaaatcgatggtctgttgctttgtattttttaagattttctagtaatttctctaatttaataataattggtctatttgtgatttttttacctgtaaaagaaattttgattttattttctcattaaatagaaaataacacataaatgaaaatatggaaggacaaaagggaagtacttacagtacatacgtacattggttccgtatgttggttccggatgttctattttctttacaaaatagatctaaccattcaaaacaatgggtccaccaatttaagtaaaaatagatggttagatttcttttatttattatggttccacttggcgacttgagagtatttatagggtgccacttggcggttcgggagcgtttgtaagaagtttaatggacttttagtatataactaggaaggtagcccgcgcattcgcgcgcgcatgcatgtatcataggctatgtttcaaacaatgtaaggacaaaatataaaatggaggatattttcagaatataaatcggaaagaaaacccgcacatatgcacgggcatcttatttgttgttcaagaaaaagaatgctaaaataaatcatatcttagtatatacattaatacatataccctgtaagggaatgtagattaccctaaataaaaaaacaaatatatttgccgtaaaatagaaggtatagattactaaatgtgatagaatgtctattagatttaagtaaaaatccctttgtcctggtcatatataaactcgtcttttatcaccactacttattatcattgtttttgaaagttaggtgcacttttaataaaagaaactgtatttgtaccactaaaataaatgatacattatttatacacaaaaaatatcatctacactgcataacccgatatgcataacttattttcacatctatgtataaattgtctaaaaatatcatatctactagataatacgataacaccgttaaaaatattcatgaatgattttctaacagatgaagtcgaccgtagcagccaacctaggctttcttacataatgccttgcaacacgggtctcgcatcgatgtaaccgtgcccctaaagaccatcttaaagtacaattttaacactcaattcaccattggcacacacaaatgattgcattggtaagtatgttattttagttacattgtttatggtggccttttaggacaccacttaactcaaccatttacatgtctctacaatatttatgatggcatagcaagtaatacacccaacattgaaggacagatatatacagaaaggaagaggtggcgaaaacagtattatttttaagttttgagtcgatttaaggtaatgaattgacaaaattgggttcagaggtgtataacattcgtacatcaattatactcagtatatagaatttatagttttatacgtgttttacggattgttcatgtttgccaatactacttggcaaagaaaaaacatacatggataatcataattctcatgatgaattaaggattgtattgtagcaaaataactgcctaattcttatttgtttatttgtttatttacatctatctatgatgtatgcttctctctcctcaaatagcaatcaaaaaaatttgaaaaatttcagattcttaaaatctcaatgtcacccaaaataaacataaaatgatccacttaaaaaccaaagctaaattgtagttttattatcgcaaaaccactgtctaaaatttaatttaatttttctcatctatctattatttgtgcttctcactcatcaaataagaataaaaaagttttgaacaaatccaaatattttgagaatctgatctccaaaattaaataacccaaaacagatgtacttaaaacacaatgttaggttttgtcagacagttgctttgacattttatctattagagattaagtttaatgtgcatatctgtgtagtgttatttttaataaaataatagtttaaaggatgttgacaacacatcagtgtgaattttcacgattagtatttctttccgattctatgtacgtttgcatgttttcttttatttatttggttttatctgttttatttatggtatatggtgtaggtatttaagttttatttttttaggatggagacgatcgtacgacgtacgcacattatgtttttttttccagatagagattagcagcatgtgatttttaatatatctaaactaatatttaaaataacgggtcctccaatttaagtaaaaattaaaggatcatatgcttttcttttttctctgaatttctaggatttctctactttattatagcacggcgtgacggcgtaatagtttttgcaggatgtttaatgcatttttagtatataaataaatttctagaatttctctaatttattagaaagacacgtagcagtgtaagagcattcgtcgtatgtttaacgtacttttagtatatatatagttgatagataatagatagatttataagatgttttaaagaacattgattggatatttataatagatcttaatttgactaaatatatttatatttgtgaagtaaatatattttatctttatactgtagaaaatcatattttaaataaataccgtaacattgggaaagttttattgttttattttcaatacgtacgtaacgttctgtatcgtatataaactctatggctgaacagtaccgtttctatgttatataatatatgaggaagttattactttttaataatagatctaatctaatggtgaaaaataacgggtctaccaatttaagtgaaaatcgacggtgagattagatagtgccacgtggtggctttagagtgtttgtaggagtgccacgtggcggcttaagagcgtttgtaggaagtttaatggacttttagtatataatagatagatagatagattttagagttttaaaatgcaagcatggtcaatcatcatcctacgtaattcaaataatatttaaatatatatttccaccattttttataatatgctatataccgatatagttcatcctcacttaattaatgttatatcacatcaattgtttttagctcatagatgattaatctaggtccaaattatctttctcgctttcttctctcgttaagccataccacctcaattgttttttgcccttagataattcatctatggtccaaattatcttcctcatcttcttctcttataaaaacacatcaccttacttttacatttggatcatcattctatatactatttaaattaccataaaccatatcaacttatgtaagcttatatcttctaactatcttatacattatttctacttattgctgtcacactaaaactcccacggcaacgcgcgggttttcacctaattaatagaagaagagagacgtccgagatgcaattacgaagaaacaacaattgaacaaagcatacaaaacagaacaaaagatagcaaacaagtcactccatcaagatcctcacaacatcctaactcttaagccttcttagccccactggtagcgagttaggggtgtagcaacttactccatttccattttccttagcatgcttctcaaactgataaatggtgcggattttacaaaatctttttacatagaagttttttttttcaaaaatcaaattaacatatttgctaaatttataataattagtactccattaatcacttgcttacagcttatctcgtttcgagagccacggaaaatcccactccaaaatcactttcaaattcagccttagctaggatcaaaatcagcggtagccccttatctcaagaatgatcagactatttaagcctttcctgatgacccattgcactaaactattagcccgactccaccaatcatcaaagatctcctacgttggtcaaaccggtagacggatccgctgcctccaccattgggagcgacagcgaaaacgtggatccgccacctttgccctcaggagccgtggcaacaggatcaggtggtgggggcaggtggccggtgggcggatctgccgcccccttccgcgagaacggtaatggcaggctcagtcggcgggggcggttggccggctggtggatccgctacccccgccctcaggagcaacggatcggcggtggtgaggcgatgatggtgacggtggcggttgcaacgttgacacaacggtggtgacagtgacggcaacgacggcggcggtggcggctgctctagcgacgacagcggtaatggctagggcttcgggagaatcaagatgctcgcgtttcgggccattttttcgctgaaactattttcacgtgcggtcagcatatgtgactgcatgcaaaaatcccgttttcacatgcggttgcgctatctgcatggaaaaatggtgatttttgtagacacctggcctgggtgcagacgagacggccaaccgcatacgaaattctgtttcaatcggctggaagaaaacatttttttagtactgttcagctccacttttataatttacatgcggatgattacattcaactgcggaagcaaactgatgaaataattattggggctctaaaattccaacttttttccttaccattacaacattcaaaatctccagtttttgacattcttagtaccaaaacttttgtctattgtgcagtgtatctacaaagacatgttttttacttatccaataaatttgtacgagctcaatatattactcaaaattctggtatatatgttgttcactcaattagcaggttcgtgttacaacttccatttgaattattgtgaacaaaatttagatactgatatgctaagttgtttgatgacaattagtttgtacatattttcttaggcatatgaactcaatcgaagtcacatgcatgtgacaatgtgcatctatgggtttatatctcatcacattggaatgcacttttcaggttgatgaagtaggtctagaggaggtacctgatgttattcaaaattaccacttatgtatagtgaaaaatcgacttatagactcagatatcattgccaaggcaagtcagatgaaggtcattatgcaatatggtgttggaatagaaggtgattatgagtctaggtttatcttgccattttgaaaatgtagtggcataactagctactcttatactgagcatacaatggtttgcaggtgtcgatgtaaatgctgctacagaacacaaaattaaagttgcacggataaatggcagtacaacaggaaatgcggtgtcttgtgcagaaatggctatctatcttactctgggtatcctacggaagcaagtatgttttaataaatagatcaacttttgaccatttggaagtgatctttatgttttatcttttttctaaagcatgtgtactagtttgtacaaacacaatatttagacatctcaaactaggaagcatggttatctatatatcttgatttctttatgaacgatggacgatccagtggcatccatcgtacaccaacgatgactcttttaaaccttgctttcttgtttatcagttcgtatgtatgcaggacatttattttgttctttatgatataggtcaccttcctatctttaaccatttggcagctaacttgcttgttttagttgtatatatataatctatggctgtcatttttaatgagctgcacatattttggatgtgttatacaaagcagaagatgatggatactgctgtgaaacgtaaggacctgggcagtccagttggagatacaatatttggaaaaagagtatgccttttgtgtatgagttacttgtttctttcactttacatggagagcatttcatttgtattgtaatttgtatttattgtactataaaggtccttatcttgggatttggagctattggagtagaaattgccaagaggataagaccgtttggagtaaaaattcttgccaccaaacgaaattggtcagctgaaacattgccatgtggtgagctgcagtatttgagttacttttcccagttttttttcttattttcctcctcttccaacgtattgcctgcgcagatatagatgaattggtcgataagaaaggtggaccagaagatatgtatgaatttactggagaagctgacatagttataacatgcttgctattgtcaaacgaaacagttagttcttctattggtgtatttctttatttctgttagaaagcctctacttcaatttcattactaaataatgaaatttataggttgggattgtggaccataagttcctctccacaatgaaaaaggtgtatgcattttgttcatgtcatttttgtgcatgtaacaatacttttaggttttatctcgttctccataatgagtaattgatcctacaaaagtagtgttattgttctataatttattctagcgtaaatttgctctatcatatatatattgttcttacaagataatctgcaacagtatactacgacgatgttggataataatgttataatatattcgatcaaaaagataatgttatattattgtagggatcatatctggtcaatattgcaagaggacacatactggactacgatgctgtgtttgatcacctgaaatcgggccatttaggtgggttaggcattgatgttgcttggacagaaccatatgatccagaggatccaattctgaagttctcaaatgttattataacaccacataccgctggagtcacagaatattcttttagggcggcagctaaggtttgcactaattcttcgaaatgcccatagccacttgactcatgtaattctctacttctatggttaagattgttttgacctacagctaagaatatattaacattgttttgacttagttaagaatatcacaacacgatttgcactaatatcaactttccattcttctgcaaagtatatatccctaaaagcgctgcctccatagtttaagctttgtaatatcctggtccaattagaatttggcctgtgtgacccatgagagttgtgtgtgcatgtttagtaacacattgagagctagtttagtaatagtggaaccaacttataagtgtttgtccctccaaccttatcactcacgggcaaaaccttttatacgaagcgaggatgaaagtattagtgggatgatatgtgtaagtgggcctgtccgtaggatgggttggctacatggttttggagggagggagcatggcacatgtgaactttgtgtgaggcacatggcatggcatatggcgatggcactaaacacacggatgtgtactaagaaggagtgtgttcctagacatttgcctatatgcatgtgtggctatgtgcgtaagttggatcgacggagacgtcaggtcctttgaggaggggtgacatcctggcctaattagaatttagcatgtatgacccatgagagctgtgtgcacatgtttaataacacaatgctagtttagtaagagtgggaccaacttataagtgcttgtccctccaatcatatcattcctgagttaacccttttacacgaagcgagaaacgaaagtgtaagtggggtgatatatgtaagtgggtccatcagtcggatagactggttacgcacactacatcaaatatactttggagagacattctcctaatactatagagatatttttaaaatgcctttacagtgttatagagacattttgaagagtgtctcgtaagtgccttttggtgcattgtctctacaaactaagaggcattttataatatgtctctatgcaaataggggcactttgtagaggcattaatatgttgcggcaactatagcaaatcactatgaaaaaaaaacaaaaaataaattattccttaccaatccttgaactcatgacctcttgagttgaccatctttatttatcccttagcaatccttgaactcatgacatcttgagttgaccatctttatcttcaatgcactaaccatctcaacctcatataattgcatgtaaatatgtaatttgtgttacttatatctaattacttgatgtatattaatatttggaaaaatgtctttacatcattttaaatgcctttacatttgaggcaagtttttaagtgccgaaaagatgtctctacaagataaatttaacaaagtatgataaaaatgtctctaaagtgtgtctagagtaaaaatattttaggcgattttgaaagtgtctctaaactatagagcttcaaaacttagaggcattttgaaaattgtctctacaaaagagcctctatataaggtttttgttatagtggtggttttagaggaagggttgttacaagcttgagaaaattccttatatacccctgaaaatttactcaatcccttcaatacccctgaatttgacatcatcccttatatacccctgagttttcattttgatctcctctatacccatctccgttagttgaccattagttgaccgttaaatattttaaaatgactatattacccatcctatacatatgtggtacctacccaataaattttcatatgaaaaaattaacttatacaaaatacaggcaatataatcatttaattcccaacttaaaaaataaaacttactatttttttattttttaaaaattattattaaatccatacattagtttcaccggaaaattaagagcaaaaactaaatgttatttaggtttaaatttttgggaagatatatgaaattcatcaaatttgatctaaaacttatttaaaaattttaaatttgttttctaatttgtgataaactagttacatccctttattttttcacaacgaatcttttttcactaaatatttgttgaaaagtaattttcaaattttatgcagaactttttttacaataaatcttttttattttaatgaaataatgttttatttttaaaaattcataacaaatatttagtaatttatttcttattggttttcacaattcaaataatttacacaaaacatttctagcttttaaaaatataccaaggacaataaagtaatttctacaataactaactatcaaactaatggtcaactaatggaatgggtatgtaagggatcaaaataaaaactcaggggtatataagagatcaaacaaatttcaggggcgtagaagtgattgggtgaaattacatgggcatgtagggaattggccctacaagcttatacctttgtaatcctattggtagtaccttgagccaaaggtggagcgcccgcgacgcgacggcagagttggtcacttgccctagctcgacccactcttccagccagagcaacccaatgccttccaaaaagacctttaaattttatgattatgttaaaattaaatgctttcttaacatgttttgagatattttttccatttctaaaagtttttatatttctccttcacttattcaactagaacgagtttgtgtttcttggctataataagcgttcaatgataattataaccacctcaaataattggtatccagaatgattagttattttaagggggtggaatgtttgacgcgatatggataatagaccaaaccgagtgagaaaaacgacaatcagagactataaatccataatagatgtttaactgtttcattttttatgaaaaaaaacaatatttcttactaccttgccagttttgttaggacaactccaggtcgcacatacagtgatacagaagaaatatcttgaccttaagtggcacttttagcctccagagcagtttgttaatagcagaacgtacgactgacatgttatactttctcattagaccttaatttgtccgcagccagagttctctctttggatcagattattggctttctatttggatcaaattatttgctttgaccaatggcatctttggaaccatccctgagtaagaattctctgctaataaattcatcacactgaaaaaagggaacgtggacataagagaagcagaatactaatgcggcacaaatacattcatctttcagatgatagaacagcaacgaacaactgtccatgtcttaaatactatctctatttggtagcaggtaattggattcaaaacaagattagaaattgaaagttaatggccggggtatatgagatgaaatgttaggtaggcaaacattattgtgtttttttttgcggggagacatctatctattatctatctatctatctatctattatatactaaaagtccattaatctccctacaaacgctcctaagctgccatgtggcgttcctacaaacgctcctaaatcgccacatggcaattttcaatctaactgttgagtttcacttaaattgatgggcccattattttacaccattagattagatctacttgaaaagttattgctacacccataacatataagctttatacatgagaaagttttacgagaaaaattaaagtatattccgatcggatataaacccatacgtactgctcgcttaaaaaaaacaaacaaacataagtgcagctataaagccaaaaaaaagttctacattgtacattgaagccgtatataccggaaaatcatgtccatacgagtgaaaccgcttataccgaaaaatctacgtacgtacacacaattgaaaaaaaacagaaactttaggtactgtttatttaaaaaaaaacgaacgtacatatgcgaagacaaaaccaagaaaaaaatgtacttatgcgtagacaaaaaaacagatggttttttaaaatagtattttctatagtagaaaaacaaaacttattacttcacaaatatggtaaaaaaacgtacaataaaaaatatatgatttgaaaatatatgttttcagctacgcgggcattctttaaaaagttgatctaacaatatatacagtgactgactttatttatacatgcaagtgaaatggtaccggaagaaataatatatagtcacttttcttttataatttttcatatacgtttgaatgacatgcataggatagtaaatggaacatggaagaatatacatgcataggatagtaaatagaacatggaagaatatacattttatgagtgaagtagataacttacgtatgaattctaattgtttttttatcataaataacacaatggtccaaatagataaaaaaatgaaggtatgatttaaaagttaaaaattataatgagttaaaatatatttttacaaataaatatataattcagaaggttctggttatttaaaaattattgttgcaaatattttcataaagagaaaaagggagaaaatgtaatcaagaggataaacttcctacaaacgcttctaatccggacatagtaccctataaatgctcatagaccaccatgtggcactctaataaatcataaaaattgtataaaataagaaaaaatcccgaccaatcggttttcatttaatttggtggacccattattttcaactattagatctatcttaaaactacaaaataaatttatttgtaaaaaggcccatgtcgtattggcacgaccggcaaaaatacatgcatgtaggtatgtaggtattccttcttaagaaaagtacgtacctacgtagagtatgtacacaactatttctatgaacagtgcgtatacacaccgcgtcccacatccttatttttttttcttctcatcatttggattagatggaaaactaaactaataatttaaactaatatcaactatgctttgagttgtaaaaatatatgctatttcgagttgtattcaaattaggtgcatgtcatcaaaacacccataaaaaatataaataaattgaaagtatagattatgtgatagttaaattagacttacattttccaaaataaaaacaacttcaagtgtgtgtagaatttcaaaaattactcactctctcttgtaaaaaatactgatatggaaaaatgatgttataaatttatcagaaatattttttatgtattatgtgtttactctattcatatattattagaaaattgaacatcaaatatattcatttcacaccacgtcaatatcttttttctcctacttagccttcgttcgatctagctcattgact

SEQ ID NO: 6111 - DNA, 53883 bp, Oryza sativa
ccatatacgataaataaaacagataaagccaaataaataaaagaaaacatgcacacgtacctagaatcggaaagaaatactaatcgtgaaaaatcacactgatgtgttgtcaacatcctttaaactattattttattaaaaataacactacacagatatgcacattaaacttaatctctgatagataaaatgtcaaatcaaacgttttgttgttttaagtacatctgttttgggttatttaattttggagatcagattctcaaaatatttggatttgttcaaaacttttttattcttatttgatgagtgagaagcacaaataatagatagatgagaaaaattaaattaaattttagacagtggttttgcgataataaaactacagaatttagctttggtttttaagtggatcattttatgtttattttgggtgacattgagattttaagtatctgaaaatttttttattgctatttgaggagagagaagcatacatcatagatatatgtaaataaacaaataaacaaataagaattaggcagttattttgctacaatacaatccttaattcatcatgagaattatgattatccatgtatgttttttctttgccaagtagtattggcaaacaatcatgtaaaacacgtataaaactataaattctatatactgagtataattgatgtacgaatgttatacacctctgaacccaattttgtcaattcattactttaaatcgactcaaaacttaaaaataatactgttttcgccacctcttcctttctgtatatatctgtccttcaatgttgggtgtattacttgctatgccatcataaatattgtagagacatgtaaatggttgagttaaggtggtgtcctaaaaggccaccataaccaatgtaactaaaatgacatacttactaatgcaatcatttgtagtgtgccaatggtgaattgagtgttaaaattgtaatttaagatggtatttaggggcacggttacatcgatgcgagacccgtgtttcaaggcattatgtaagaaagcctaggttggctgctacggtcgacttcatctgttagaaaatcattcatgaatatttttaacagtgttatcgtattatctagtagatatgatatttttagacaatttatacatagaagtgaaaataagttatgcataccgggttatgcagtgtagatgatattttttgtgtataaataatgtatcatttattttagtggtacaaatacagtttcttttattaaaagtgtacctaactttcaaaaacaatgataataagtagtggtgataaaagacgagtttatatatgaccaggacaaagggatttttacttaaatctaatagacattctatcacatttagtaatctataccgtctattttacggcaaatatatttgtttttttatttagggtaatctacattcccttacagggtatatgtattaatgtatatactaagatatgatttattttagcattctttttcttgaacaacaaataagatgcccgtgcatatgtgcgggtttcctttccgatttatattatgaaaatatcctccattttatattttgtccttacattgtttgaaacatagcctatgatacatgcatgcgcgcgcgaatgcgcgggctaccttcctagttagttcataattagtgatacagtaacccatatgtgctaataacggattaattaggctcaaaagattcatctcgcggtttctaggctaagctagttataaaattagtttatttactcatatccgaaaatctcttccaatatccggtcaaacatcagatgtgacacctaattaataattttcttttggctagctaaacgggcccttgcatacttggacatcgtatctgttcttttgaatatcacacagccttcctcacagaccagacgacagagcgtatggctagagggcacgaaccgagagttactaccattaccatgaagcatctacctttcctcgtacacctgttcttcctcctctgccttggcctgagcctcaccacgaggtgcgccggcgatgtccagttcatctactctggcttcaccggcgccaacctcaccctcgacggcgtggcagcggtgacggcaggaggcatgctcgagctgaccaacggcacgctgcagcgcaaaggccacgccttctacccggcgccggtgcccctccgtggagccgccggccccaacgcgacgacgacgacggcggaggagtccttctctccacttccttcgtgttcggcgtcatgtccgaccatgtcggcctgagcgcccatggcatggcgttcgtcgtggccgccagccgggacttctccagcgcgctgcccagcgggtacctgggcctcctcaacgtcaccagcgacggcgacacgggcaatcgcctgctcgccgtcgagctcgacaccatgcagaacgacgagttccgcgacattaacgacagccatgttggaatcgacatcaacagcctccagtctctgcgctcctactctgccggatactacaacgacgacgacaacaacaatggcttccgcaacttgaccttgatcagtggaaaggccatgcaggtgtgggtggactacgacagagagacaacgcggatcgacgtgaccatggcccccctcgccgtcgccaaacccaagaggccattggtctcagcgaggtacaacctctcaaagctgctcaaggatgtcgcgtacatcggtttctctgccgcgacaggaggcacgctgagatcacggcactatgtgctcggctggagcttcgggttgggccgtcccgctcccgccattgacatcaccaagcttccgaagctgccgcgaactgtcagcaaggaccggtctaggattttgcagatcaccctaccgttatcaactgctgctttcctactccctgtgggtgcagccgttttcatgctcgtccggaggcatcggaggtactccgagttgctggaagattgggagattgagtttggcccgcacagggtcttgtacaaggatttgtttcatgccacggaaggattcaaaaacagctgcatactaggcataggggggttcggaagggtatacagaggggtacttcccacgtctaaatcggaaattgctgtgaagagggtgtcacacggatcaaggcagggtatgaagcaatttatcaccgagatagtcagccttggttgcctccaacaccgcaacctagcttgtgcaactacttggctattgtcgacgcagtggtgaacttctcctggtgtacgattacatgtccaatggaagcctcgacaggtatttgcatgatgaagaggggcaatgcagtttggattgggttaaaaggatccacatcatcaaaggtgttgcatcaggcttactttaccttcatgaggagtgggaaaaagtggtcatccaccgagatattaaggcgagcaatgtccttcttgacagtgaaatgaatggacgttttggagactttggcctcgcaagactatacgaccacggatctgatccaaaaactacccacgtggtcggtacaataggttatatagctccagagctcggccggtctggtaaggcaacacctcttactgatatatttgcctttggtatattcattctagaagtcatttgtggccaaagacccatcaagcaaagcagagaaggtcatcaaatcctacttgttgactgggttattcaccattggaaaaatggaacgctcatcgaaacggtggacaaaagactcgagggaaaccatgacactgatgaagcaatcctagtgctgaagctaggactgttgtgtgcacatccatttagcaatgcaaggccaagcatgcgtcaaatcgtacaatacctcgacggtgacatggcattacctgagcagatgccaacagaccaaatctccaatcagacggagggcttagaccagtatattcaaacagggcctcaatcaacaattccagtcaatgcaagctatggcacaatgtctaacctttcaggtggaagataatttaacaagtgggcattaacacctttaagtgttgcaagacgatgcatatgttattgcaagcagatgatcttgtgataggggaggtgatttgtggttagctgcttcaactaattaaatcgttaagctttaaaatggtgaattgtattcaataaaaatcaggtgatagaaaaagacagtcatgtgtactcctatttctgtgctagctagtgctaccatattttcattagttcaagattttacatgttgtggacttggcaatcccatccctcaagaatggcatttaatttgcatcgcactaatgatgtacgtatgtacatatatcatcctagtttgcaagaaaggtacgttttggtcttgaatgaatcatggtcatcattttgtaaatgttgaaagagatgggtcgagactttttctgcaagtttcttgtactaattagcatcacttttgacggacatgtatcatatcaagcgccccggtcatcacggcatgagatttacgagtacatacctgctctgtgacgcatgatcgctacagtagccgtactatacctcggtgcgtgggatcagcttgttgatctgttgatctggtaacccgttcctacatgcatttgctaagtctccgagcatatagaaataggctatttccaaaggtgtatgtgcaaaacaatttaaagaacctcctgtgtaaatagctaggatttctacgggcggagtttttcaccggttgctctttaagtaatggtaaaaattacttttacacatgccatctactacatcattacccgtctgattcaagtcatatatgataggcgggtgacaatatttcagcaaatagcgaaataatgtttcaattcactgtaatatttgatccataatagcaaaagattatgagtatacactaggtgaaacatttttttggaaaaaaaatgaaatggattcgcttaatagagggtttctataatatttaggtgatttgttgcgaaagaatatttcaattcactgcaacatttcatctattcataatgaagcatcataagtacactaggtgaaacattgttggtggaacaaaaaattgaaacggattctcttaatagggtttttccgtaatatgtggggatttgttgcaacagggtgagagtgactagtggggacgcatgggagacaggcggagatgccggggggggggggggggttgggggtgcccgatttttctaacgagcgttgggcgcctgatccaggcgttttcccaatggcggccaagcaacgcactcgtagctgtatggatagctagatttttcacattttggtccttttaaaaaacttatttcgtaaatagacctctagaaaaacttattctagaaatggtcctttttggggcgccaaagtggctagcgccgtcctcctgccaccgtggcggggcaaaatatgtgacttgtaaaattttctaaagctctaccgaaatggacaaaatatgtcatctatctattacatactaaaagtccattaaacttcctacaaacgctcttaagccgccacgtggcactcctacaaacgctcttaagccaccacgtggcactatctaatcttaccgtcgattttcacttaaattggtagacccgttattttataccattaaattagatctattattaaaaaataataacttcctcatatattatataacatagaaacggtactgttcagccatagagtttatatacgatacagaacattaggtacgtattgaaaataaaataataaaactttcccaatgttacggtatttatttaaaatatgattttctacagtataaagataaaatatatttacttcacaaatataaatatatttagtcaaattaagatctattataaatatccaatcaatgttctttaaaacatcttataaatctatctactatctatcaactatatatatactaaagtatgttaaacatacgacgaatgcttttacgccgctacgtgtctctctaataaattagagaaatcctagaaatttatttatatactaaaaatgcattaaacatcctgcaaaaactattacgccgtcacgccgtgctataataaattagagaaatcctagaaattcagagaaaaaagaaaagcatatgatcctttaatttttacttaaattggaggacccgttattttaaatattagtttagatctattaaaaatcccatgctgctaatctctatctggaaaaaaaaaacataatgtgcgtacgtcgtacgatcgtctccatcctaaaaaaataaaacttaaatacctacaccatatacgataaataaaacagataaagccaaataaataaaagaaaacatgcacacgtacctagaatcggaaagaaatactaatcgtgaaaaatcacactgatgtgttgtcaacatcctttaaactattattttattaaaaataacactacacagatatgcacattaaacttaatctctgatagataaaatgtcaaatcaaacgttttgttgttttaagtacatctgttttgggttatttaattttggagatcagattctcaaaatatttggatttgttcaaaacttttttattcttatttgatgagtgagaagcacaaataatagatagatgagaaaaattaaattaaattttagacagtggttttgcgataataaaactacagaatttagctttggtttttaagtggatcattttatgtttattttgggtgacattgagattttaagtatctgaaaatttttttattgctatttgaggagagagaagcatacatcatagatatatgtaaataaacaaataaacaaataagaattaggcagttattttgctacaatacaatccttaattcatcatgagaattatgattatccatgtatgttttttctttgccaagtagtattggcaaacaatcatgtaaaacacgtataaaactataaattctatatactgagtataattgatggacgaatgttatacacctctgaacccaattttgtcaattctttacctcaaatcgactcaaaacataaaaataatactgttttcgccacctcttcctttctgtatatatctgtccttcaatgttgggtgtattacttgctatgccatcataaatattgtagagacatgtaaatggttgagttaaggtggtgtcctaaaaggccaccataaccaatgtaactaaaatgacatacttaccaatacaatcatttgtgagtgtgccaatagtgaattgagtgttaaaattgtactttaagatggtctttaggggcacggttacatcgatgcgagacccgtgtttcaaggcattatgtaagaaagccttggttggctgctacggtcgacttcatctgttagaaaatcattcatgaatatttttaacggtgttatcgtattatctggtagatatgatatttttagacaatttatacatagatgtgaaaataagttatgcacactgggttatgcagtgtacatgatatttttagtgtataaataatgtatgatttattttagtggtacaaatacagtttcttttattaaaagtgcacctaactttcaaaaacaatgataataaatagtggtgacaaaagacgagtttatatatgaccaggacaaagggatttttacttaaatctaatagatattctatcacatttagtaatctataccatctattttacggcaaatatatttgtttttttatttagggtaatctacattcccttacaagatatatgtattaatgtatatactaagatatgatttattttagcattctttttcttgaacaacaaataagatgcccatgtatatgtgggggtttcctttccgatttatattctgaaaatatccttcattttatattttgtccttacattgtttgaaacatagcctatgatacatgcatgcgtgcgcgaatgcgcgggctaccttcctggtttattaaaataggcgtaactttctcatacggactcggaatcaggcaaataatatattcacggatatctacagaaaaagttacatccgattctcggcatcgccccaccacgtcggcagggggacggcgccagagaggctggcgccgtcccattggacaacggcgccaacctctttgacgcccaaaaagaaccatttctaggataagttttttcaggggtctatttacgaaataagtttaaaagaaccaaaatgcgaaaaatccaggtgcggatagtgttacccgagttccattttcttgcccgatgaccaatgccaacggcagtaataattaacattgacattaattggcctggtctggtgtacaccttttctgcagcatcaaaatatcttctgcaattattgtacggtttctactattacatgatggggatgttatgcttgacaaaggaaaacaagaggaacctccttacactagtaaaacaaaaaacattttttcaaatggttaaaaaaaatttcgtgtgtgattaagtcgcccgtctagtgtgaaaatcactatttttctacacggttagcaaacacgcacgcaaaattacatatcccactatagtactccctccgtcacataatataacgaaattttgaatggatgcgacacatcatatctagattcgtagtactattatgtgtcacatccacccaaaatatcttatattatgggacggagggagtatcatactcaaactacatagcgctcgcgatctgacgacccacctatatatactttcttttttcaaactgcaaaagctagctttaaacatccgttatactccctcggtcccaaaataagcgcagccatgagtttccatgtccaactttaatcgtccatcttatttaatttttttttagaaaaagctaaaaaacttaagtcacatataaagtattattcatgttttaaatctaatagcaataaaaataataattataaataaaattcaaataacacggacgatcaaagttggatacagaaactcatggctaatctcattttgggagggaggaagtatgtcttaatacaaatgtgacccgccaagcgaaaatctgtcaaacaaagagcacaatgatggaaatatattatattaaaccctgagggtttctttcttcaataattcaaggcgtggttaggctgaacttcacgagtctacgagctttcacatacctatcaagctatctcctattacaaaaaccatttgatttaatacaggaccccagaaaatatcttgttggcacatgttacctgaaatattaactcatgttttgtattttgaaacatataatgctttggagtcgtttaattatttgaaatatatgattatttttcagatagattatttgaaaaagttttctgcttcccatgagtgatttattggaaacttctaattccacaaaaatatttaaatctctaaaacgtctgaagtcatgtcttgagtatcaaatttgttggagcggtgcatccatatacaaaatttatattgatttactgatcatgtcaattgtttctaataaacaacgatacagtaagcttattctgaatttcacaagctagatgcacatttgcaatgtgaacataattataagtaaattatgctacactaaaacacaataatgtatttctcggaagttgttcttatagtagaactataaatgatatttttagaataaggatgtgttccttccggttcaataattctgtgacattttgaactcttataactttaactatcaataactctaaaattattttgcttaaaacgtactagaacaacatattagatttgtcttactaaatattatattaaaagtaaaaaaatatttatttattatatatattataatagaaaacatagtgaatgatacatttaggaaaccatgttattgttcaaaacatcaagatctatggaacaggacgcagtacaatcatgttttttgcactgcatatattctggagtggtccagtctattcatataatcatggaaactaagtgtaaactcaccccttatttattttgcatttgacagacatatatgcacttgcagtaataactagctaattaacaccatttcttatactacctccatcccaaaatgtttgacgccgttgacttttttaaatatgtttgaccgttcgtcttattcaaaaaaaatttaagtaattgttaattctttttctatcatttgatttattgttaaatatacttttatgtatacatatagttttacacatatcacaaaagtttttgaataaaacgaacggtcaaacatgttacaaaaggtcaacggtgtcaaatatttagggaaggagggagtagttaccttccacctaagaggaaggatacggtgccaatggttgctgcagacgatggatatgacattggatatgagtcgaacccttcattctgcattagagccattgtgctaaagctcatatttgttgatgttaagtctgggagtggagtgtcaccatcaaggtattgcatgacttgtctcatgcccggtctcaagttggcagatgggtgtgaacacagcagtcctagctttagcacccggcatgcctcatctgtattacagtcaccttgcaacctcaggtccactgtctcattaagagagccttttttgaaatggtcaagaacccagtcaactaacatttcttggttgtatcgtccactatcgtcgttgaccggtctttgcccacaagttatttcaagaagaaacgcaccaaatgtgaaaacatctgttagtttggatgccttaccggtccatattagttctggggccaagtatcccattgtacccaccacatgtgtggtttggggatcggtgccatggtcatacaaccttgagagtccaaaatcacctaagcacccattcatttgatggtcaagaagcacattgcttgcttttatgtcacggtggatgacaactttctcccacttctcatggatatagagcaagccagacgcaacacccctaatgatatgaaacctttggctccaatcccgtaaaggcttatcctcctaacaatacagatatttatcaagactaccatttggcatatattcatacactagaaggagttcaccttttcttctacaatagccatgtaattgcacgaggttgcggttccgtaagcggccaatggtgacaaattcagagatgaactccttcataccctgccttgactcgtgagaaaccttcttcacggctacctccaatctagacttccgaaaaactcctttatacacctggccgtaaagtcctgtacccaggagatgtttgctcttaaatccattagtagcatgatatagatccttatatgagaatcgatgggggccaaattcaagctcccaatcttcaagcaactgagcatacctcagatgccttaacacgagtagggtggcaatggtaccaagactgagcatgactgttgctgtagctattggtaggacgattactaagaccttggatggaggcttgggtccgaaacacggcagcttaggaagattggcaatgttaatcggcggagcagggccattcatggcaaagctctagccgagcaggtagtgccgataattgatctcgctagtcacagatgagaaaccgatgtatgcccactccgtgagtacagttgagaggtcatacttagcggaaacaagcggcttccttggtttagccactttgattggtgccaaagccacatcaatctgtcctgtgttgccatcatagtccacccacacctgcatcgcttctcggctaaagagggttaggttcttgaagacgccattgttgccgtcatcgtagtagctagttggggaggattgcaaagagtgaagattgttgacgttgatgccaacgtggttggcgttgacgtcttgaaaatcggtgttctggacggtgtcgagctcaaccgcgaagaggtggttggtcgtgttgccgttgttctggacgttgaggagggccaggtacccaaccggcagtgcggtggtgaagttcttggtcggggacacgatgaaggccataccgtgggcacagaaatcggtgtagtcggagatgatggcgaacacgaaggcggccgagaaggaccgagctgtgccatcaggcgatgtgcggaactgcagaggcgcggggaagaacgcatggccttttaggttggtcttgcggctggtcagcacaaggatcccatctggcatgacggtggcgttgccgtcgagcgtgaggttggtgccggtgaagccatgataggcgaactggaagtctccgctgccggaacacaaggcaagtgctaggtgaagaaggctgatgaggcgcaagaggaagaacgcaggcttcatggtcgtatgtggtgggggattgtgcgagagggcatatcgttggccacactctctaataaagcacctttcactagtcaatccttaattaagaggtgggatatgatagtcttggcagccaaacgtacgtgtcgagatgtctatgtggatatatagctgtagtgatagtgtattacagtatcacaagaaggagaatgccaattctaatctcttgtcatggcatatagtatttttctgttacataaaaaaatggttttcatttaacgcccttaaaatatttgttggctgtgaagtgtgcatagcttaattgattaggcttgctctggtggaacctacccactcaggtttaagttctagatttgatttggttctcgcatttaggtctaatattcttttagtgatgtacctttcaatagtgttcatgtgggtgtcgtgtgcgtttataaatatagtgagtgtttccatttgtactatatttttttaaaaaaataatcgttggctccctgcaccagtttagtccatgaattactgagatgagtcactttacccctaataatatttcttttttttccctctctttgaactttaaaatacaattaggaagatagtccgcgcattcgcacggacatgtatcataggctgtgtttaaaaactataaatacataatataaattggagaatatttccggcatataaaggaaacccgcacatatgtacgggcatcttatttattgttcaaggaaaagaatgttaaagaaatcatacatcactatatatacattgtaaggaaatgtagattattctaggataaaaatagacacatatttgccgtaaaattgacagtagattctaatataccactaaatctaataagaatgtccctcagatttaaataaaaatcccttcgttctaggcatatataaattcgcattttgtcaccactacttattatcattgttctgaaaattaggtgtacttttaataaatgaaactgtattagtaccacaaaataaatgatacattattaatacactaaaagaattcatctacatcgcataacccggtgctcgtcacttaatttcatatctgtatataaatagtctaaaaataccatatgtaccggataatacaataacactgttaaaaataaacatgaatggctctctaacggatgaagtcaactttagctgccaaccaaggctttcttatgtaatgccttgaaacataggtcccgcattgatgtagctatgcccctaaagaccatcttagagtgtaattttaacacttagttcactttaggttaatttcgaactcagtgacaatggagagacctaaagtgaacttattcgctaggagctagcctccgtatcaaccgccacgcactctgggctttgcctgggccagaaagaaatgtgtaaccagcattgctagctatttgagctaacggtacttgtaagcagtaattggcttgcaactcctgtacgtgctcataactggcttacatgaagagaatttggagcagaattactatccctgcgatgatgtatgtgttgatccatgttcagcaaatactctcgaatgcacaatgacacgaatgttatatatcttgatctgattggcatagctctaactcctaacttcaacttacctttaactaaagttatgccaaacggtcaaaatcctatgtttttttggagtggggtttgtagagttactcctagaaaatgaactaagagggtggagccgggtttttactgttccatagccccactccacccaaaaaacccactgctctttaattattagcaaatttttctaccggacatcacaattttgtggttttaaccgtaggacaccacacaaaatcatttttgggaaacacactctgaaaatatggttatttgctaggggacactctatccattaaattaatgttttcgtgttgactagacgagagtgggctcacatttttacgtgtcttgaccaaattacccattctttctttctcttccttatctgaaatctctccctctctcttttttatctcttctcccggcggatggcgtggttggcagcgtcgacatcgacgtcagcacccggagcgcgtgtggcctattcagcggcggcggtggcggcagcctgctcggcggtggtggcctgttcagcggcggcagcacgcacggcggtggcctgctcactggcggtagtctgctcgacagcagcagcagcctgctcggtggcagtgcccggagcgcgcgcggcctgctcggcggcggtggcggagcccgaagcacatgcggcctgttccgtggacggtggcgcgcgcggcctgctcggcagcggcggtggccacggaccacgccagtgcgtggatctctgccaccagtccaccacggctcgctcggtgtggacaacggcgacaatgacgacttcaagtgcccactgtacagggaagtgacggagggaggtgtcggacgtatgtgcctgccacagtacggttcggcaacggcctcgccattgcgagagcggcagcggcaccggcggatgaccacgacacatcatgggcacgtggtgctcatcgtggtgatgttgctgctgttggtttggtggtgttgctctccatggttatgctgctactagctgctggttggtgatggggaagaagaagacgcactccaggcagtagatgtccaaccactcctcattcgccgatagacagagaagagagatgggagaactaacatgtgggtccagggatatttttgatattttatacaatttttctctcctctctatctgaaaattattattttaatgggtgcagtgtccgctggcgacttaccacgtatatggagtgtctttccccaaaagtcatttcgtgtggtgttctacaactaaaacagtaaagtcacgatgtagtgtagcaaaattttctttaattatttgacgtatttacgcgaaaatgccactgacctaccccaacctcctcacctccctacccgacgaccgggcgagcagaaggccacggcattccggcggcggctcggcgatgcgcgtgcgggcagcagggtgacgacggtgctccggcagcggtgcgcggacgggcagcagggcgacggcggcacttcggcagcggctctgagcgcacaggcagtaggccagcgacggcgcagcttggcgacgcgtgggcgggcagcagccgcagcgctccggcggcgtcgcgcggccgggtagcagggcgacggcggtgctccaacggcggttcggtgcgcgcggccagcaggctgacggcggcgcggctctgagctaatcccctagaccctttttccttttttttttcaatttcaaatctgcacaaaaagaacaatagggtgattttgcatgtatgttgtgggggatttcttttttatatgaactatatagatgtgaaaaattatcatgtgtttatacaaattgaagtgagaacaaaatggtagactatacaaatttcaaatctaaaccaagaaaacactaggatgctttcactaattatgtcaattattttggtgattaagttttaaccttataattatgttgctgaaattctaaataaaaataaacatttatcagtcatacatcacggaaatagaaaaaaaccacaagggtactattgtcaacctccccctatgctctgtttctgaagttctgaagcagagtaagcttgtcaaacacttttcacatgacatccaactcccacaggagcgagtgagagttaggagctaggagttggaatttggagccctcccaaacaggccttcctgcataactagctttgtcctgtttttgtacgttgctagcacattgtgatttaaactatacaagacaaaggtgagaaaaataagtgaaaattcctttataataattaataggacgttcccgtcattaacttaaccctacaaacattgcttcattgcttgaaacatctaactaaataattttaaattctatcaaaattttatataataaatcatacgaacatcttatataaacagtaccgtggacgtgttctcagccatacttaaaatgtgttcttgctggctttcccaaactcaccctccttgttttttgcaaaaatattctatacacaagttgttttagaaaatcatattaatcaattttttttaaaaaaataatgcttaattaatcatatcactactagaaaaacgattttttatggcgttggcctaatattttctctggcgataaaatgtgaaaaccgccaacaaggttgtaacgaggggtgggaggcaacgaccgccagcaaaaaaagattttcgttggcggccgagtaatacaggccgccagcgaagatttttttattttcgctggcggtaccttctaagtgccgccagcgaaaataggttcatcttcgctagcggtatgatgatatggaccgccattgaagatgaacctattttctctggtggctctctttagccaccgccacctctatcattttatatggcggtgcattaagtagtccaccagtgaaaattggttctcctatataaggccgtgcccaagctaccatgccatttgagcacgattttctctctcttatgaactcaaacatagggggagaagtttttgaactcgaatggtttgatagatattttgtaccaaaaggttagttatactttatagttctccatttctcaattttttttttcatttttatccgttctatgttgagattttgcaaggtcaagtttccaaggcatgttcgttttgatttgttttgtggtgttgaaaacggtcaaaattgttatgatatattgtacatgatcaatgtatatagatttcacaatgttttgatatgtttatttatagaagatctatatggcacggttgttttgtgcactttaaatctatatatctggttatgaaagagaattgagagaaagaaagagggtagtttggtaattttatctagttttttctagttgtatgtctagttgtcatgtattgggaatatatgagtggtagtttttttttaaaaaatgaagtcataatatagttttaatttttccgtgtttatactaattgtaatatttttcacaatgtttaatttatttgtttacatattagcataattattttaatgtgacatattattaaaactatttaaactaagttagtttttttttctcaatgcatagacgatggcagacagatcatgaatgttcatgaatgtatagagagatatcgtgcgtcatatattgtaggagtcaatatatttatgaaagctgcgaagaaaaatgctgtagctaagaagacaaaggaaattaaatgtccatgcaaacactgcaaaaatcagaaattttggaatgattcatctgtaatcgagcaacacttggtgacacatggatttgttgaaggctacacaaactggtcacaccatggagaaatccctgcaagcttccaagttcccaaccaagagatagtacaggatgaagtgttcaatgattggaatttcatggtagtagaagaagaatcggttgatgatgatggttatgacacagctaatgatgttgatgatggtcatgtcacagtagatgatgctaatggtagtgatggaactgcttttgatttggaggagatgttgcgccatgctgaacctgagacaattttcactggcggctcccttgagaaagccgctagcgaaaatagatcttctctagtggttggactccgccagagaaaactctacatcttcactggcctttactctctggcggcgcctagtaccgccagcgaaaacctgttttagctgccaaaaaaacgtatttcgtagtagtgtatggtaacgagttgtttcgttttgcgtcgaagggattagttctcaacgaacgcaccctgtatgggcagtgatatataggcaagtacgcatgcagccttatatgggtagtcaaatgtagtcacgaattaaactctcccttaggtacaacatatgcatatgccactttcttcatgagcaaacatcgctatggatgctagcaatgttgcgccgattgatcgaaatataggtggcactaggaagcatgccaaatggatttgcagccaaactattactggtgtaagcatgcaatagcctccatctacacactcccagaacaccactcaactcacactacttgaaaaacgatttttcatgacgttatcctattttttcgctgtcggttatataagaaatccgcttgtaaaattctgatgagggatagtgtgtttagaaccgccattttcgctggcggtgagtttagaaccaccagtgaaaatccgttttcgctggtggtaggttaagaagtccgcttgcaaaaatatcccaatttttgctgacggacctcagcgaaaatcctagtggaggaccgcgccgctctggccctttaaaaaatcgcggcattaaaagtcgctccacctacccatccttatctcctccttccactccctctctccctccaactatctctccctccatccacaggcatgagcggtgagctcgggcacggccagcggtgtgcttcggcgcgggtagaggagagggctggcgcgggcggcagcgagctcgattgtgggcaacagggagggcggcggcggagcttgggcgaaagggagggcggaggagagggctggcgcggtcggcggtgagctcggttgcgggcggcggttgtgaaaagaccttaatgtcgcttagagggggtgtgaataggcgttcctaaaaattatcacaacttcatagcatattagaattatgagaactttcggttcaaacaggaacttccgatatgagattggaagttccggtctcaaccgaaaagttcggcggataatggaataaaacactagctatgaacttgtagctcaaataaacaaaatgtatatgaatcaaaaagtgacaaataaggtatctaaacaagatataaggtcaccaactaaatcaattaagcatgcaagtagatcgggtaaaaacaagctcaagcactatgagagaatacacaaatggacaaaccaagagaggagacgcatgatttgtttcccaaagttcggatccacggatcctatgtctccgttgagtagacacaagggccgggcctatttcaaccctttcctcacgaggttgcacaaatgcactcctcggtttcactcttgatttcttcccttgcggaggcgaaatcgaagttttcacaaactttccgtggcacaccacaaccttgggtgctcaccggcgacgcctagccgtctaggagaccttagtccccaagagtaacaaacataatcgaagatttgcttgctatgaactcgagtgctcaaagtatggagtgaagctcattagctctcaacttctcaatcactcaatccaactctttcctcttctcaaatccctctcacaaagaggcaccacaaaggatggagtgaaactcactagctctcaactcctcactctctcaatccaactttctctctccccttctcaaatcctcctcacaaagaggcaccacaaaggtagggaaatggggatggctatttggctttggatgtgtctaatactccccaagagcagcagccactcaaaggtggggtggaggagtttatatacccgagcctcttaaaaactagccgttggaggccaagactgtaatttttggatttttcgaaaagcattttcggacaattccgaaaatctacagaagcaaatcttggattctgtagatttatccgaaaacttttcagagttttcgataatttttcggactttccgaaaagcacagagtaaaacaactataacttttcgctcgggagtccgtttttgatgatcttggactctatggaaagctcactcagaggactacccaactcaaccaaaaacaaggtctaaaaccactcaaaggataggttaaagcttaggtttctctcaagatagcactatgataggtcactttgagcaccgagacatacacaaacacctcgaagttgcatccctcttaatagtatggcattcctaaactcaaatgtaaataagaagataattataccattaggaatacctttttttcatctttcttttattgtcttaagggatgccaatgccgataccgtttcaccatatattcttcaaatgattgatgcggttacttgtagcttcaaatggtctcgcacggtccattatgacaaagccatcactcgacctttaccaccggatttggttcttcggcgccaagccccttgcttgcccttcaccgccgcatggtccatcgcgatcgagcatcgcttgcccttcaccgtcttgccataatagctacttcgtatcacacatcttcaatatcttcactttgtcattcttggtattgttaggtgtaattgtatcacttgaacatcaacatctttgtaatccttgggacctatttctttcattcaactcaataaaattattagtcccaatgatccggttgtcaacctccactgttgaccaaccgatcgcatgtataaaaggatatgaataaatgatgagtattaatcaacaccacaagtgtcatatactcaaacatatgttcaaatgtaaagatcccaattaaatgaaggtgaataacttggatcgattacatgcataactaaagtataggatttgctccccctaaatgtatgcatacaaaatatttgtgtgaagtaagagtatgcataacaagatattaaacattgagagcttatcctatacaagaatagaaggcatttatcaaatatagacaataaaataaaaacataccttcatcatctccatgttctcaatgtaaagagactaaacaagatatggctcaaacaaaacattagtctcacatgctgtagcgcccgttccgtcgtggcgcctagcgggaaaaattaaattctaaaaaccctaattgcgaaatctgtttcgttgcttgttgtcagtctccatgccaatccctgatctcgaatccccaatctatcgtcaaattcaaatcccgaatccaaatctctccaaattcaaatccctctgtaaaagtctagtttgccttcctcaggttcggtgggccgatttccctctcggcccatatctctctctctctccgtcagctctcccctcgctctgctcgtgcgccgcaagcgcgtgcgcgtgagccgacgccgagccgagctctttctctctctctctctctctctttctcgttctcttgctctcgctctccccggtccatccccggcaagctcacggcgcgccattgcgtcgcgcgcgcgcccccgcgcggtcgccgccgtcgtcagctgcttgttgcccgtgcctgtgccgtccggccccgcgccctgccgcgctgcgccgcctgcgctgcgccctgccccacgagccagcacgcctgcccgaggcacgccgcccgcatccgtccaaaacctgaggcagcgcctcccgctcccatctctctccctccccaaattggcatagcgcgagctccctttccccccctccgtttctccctttcccctttcggcctggcccctgcttcccccattctgttcccgcgccatggacgcagaggagcagccgcgccagccgtcgcccatgccgtttgaccccacgcccgtgagcccatcccttctcctcgaagctccctcgccccagcactgctccgaggtcggtttccgaaccgacattgccaccccttaaaagccgcccctcccctctctctctcgatccccctgtttcgctcgccgttcgttgtcgcgcgtgtcggaggagccggcacgagcgaggacacgtgacgtggactccgggcacaccctctccttcctcttccccggcccgaggctggagcgatcacgccccgcgccgtcggccatcgtcaccgcgccccttcaccccgtcacggtagtgctttcctccgttctgcctcctcgctccatctcctccccttagactcgggtagtagcacgagtagaccccccgtagctatctggcgccgccccaagccttgccgccgcctattgtgtgctcaccgccgtcgccgcccgagctccgtagcgcctctcgtcgctggcctccctcggtgcatttcctcctaatccagcgcaaggaatggattcgcggagtcgcgtagatgctctagtgcgaaggaatcgaactcccgtcacgccgtcgccgtttcccccttctctcgccgccggttgccgccgccacaatccgccgccgtcgcactccctccggcgaatccgagccgttagctcgtctcctctagtcccgcgctacctcccggtgtgttcgccctcgcccgcatccccgtatatcgccccgccgctcgccgccgccatccgccgtccgttcgcggccgcgtcgtcgtcttcctctcgccggtccgcgtggcagccacgtcggcgccagctcggccaagaccgggtcaagcagaccacggccccccgctccccttcgccacgctcgcgcgcgcggtccaccgcgagccgtgaggctgcgcgtgggcccgccgcatccgcatcccaccgcgagccgcgcgcgtgcaccgcgccccctccgaaccctagcgccgcgtcgcgtgctcctcgctcactgtgagccgagccgccgacaagcgggtctcactcgggaccacgcgaggtggacccagcccaccggttccccctccctctctccccgcgcgtgccctttggccgccttctcgggccggccggcccatttagctcggccaagccgcccttttctctcgggccgcgccctagccgcccgagggaagtctatttcccctccctctctcttttctttttccaaaagggtttaattaaatcctttgtcctttagaccaaaaatccaataattttagaaattcaataacttctcaaccgtacatccgtttgactccgttcaacttccaaaaatcctcaaatctcgagatctatctaatggcacgcctataggtcaataatagggttttattttcgccatttgttgagttgtcccgtttcacgtgtagttttggagcccgaagacccgcagtgcgaggatttcgaggatcaagctcaagatctcgagcaaggtaagtcacctttgatcatcttgcacctataatttaaatctaagtatttcttttccgcaaatattgcatgaataggtttaacacaagtaattcggccgcggcttgcaagatagcctacagaccccaatcctaattgctgcaattaccctccttgaattattgaacaattaaaactcctttgtcgacttttgtgcttcgatgcacgggctttcgggcacgcgcattgaaacacctcccctcaaatataaaatatccaacaatgggtaaaacttggggttttacaaaagacttagaaaaacctgacacctgggtcggtgtttgcgaactaaatgaatttccaaaaccgcagaccgggggacgtaccgggagtacggtttcccgctcttgcacttaaggaccgtttccttggaatttcatccgaacataagacaagtgcgaccacatgggtgtaatggaacgcccctggctgagtaattagctaatcgggggagccatgatgccaagagacatgtggattcaacggggtggtgccggggagaacccccgggtttcctggcacagtatggtctgggacctaacctggtgttggtctgggacccctctcgttggcatatggtgaacctgtgtcggctttcaaaatgccttgtcatgaaagcctcaaggtctccagacgtggccgttctgcacgggctgggtgattcgggttagtaatgtcatgtgggtaaagtgtaccccctctgcagaggttattaaactgttcgaatagccgtgcccacggtcatgggccaatgtgaggtgattcctagcgtagttttgtttgactacagcttgtgaacttactgttgtggaatgggttcgatgtttggaaaatctgcggctgatgggatcagccaggcccgggtggccgtttgaaagctgttggccgggtgccaaccttgaaccaattcaaagactgatacattgcacatactccgaccggacaagacgcactgtctcatccgtgtcgtttgagaagcactcacttagttgtttcaaaaaggagtttaaataaaatcaattgtaaaaacaacagcctttcctttgaatcctgcattaaacacttaattcccatggcttgctgagtactcctgtactcagccttgctctatataaataatccccccagttgctgaagaagatgaagtggatcccgctgatgaggagttcttccaggagcaagtcggctacgatgagttttagggtttcggcctagttcccaagtcgcgcctatgatgattggtccaagtcttggcttccgctttcccttttgtaatgcatttttttttgagctcgggatctgtccgcagcccaacatgactgtactcctactctgtaataaagagatctctgttgctgtgatattctgtcttcctgtgataccaacactgtttcctgggactggtatcgattaacaggttaatttggagcgtcacgggctagttccgtttggggctagttcggggcgtgacacatgcttatgtaatcacatgaaaatattatatataaatatatcaatatgtgcacggataaaaagagtggtacatatagcttgatctccatacatttcatccttgtgatttaggtacaccatcaatgaacgtttttctcttaactcatatgaagtccagaaatcacctctcacatattccactttcatatccatatgagactagtagacaaagaaatgcttataacaatgttagtctcatgtaattggatttgtcattaatcatcaaaaccaaaataatggcacttgaactttcaggttagcggcggcggagctcgggcgtggcggttggcggtgctcgggcgtgggcggggaggtcggatctgccgccgccgcgccgctgggaggccggatccactgtggggacaaggccgtcgccgctgcaggggacaaggccgctgccggtggagctactcctcatccaggtctatcacctcatcacctcccaatgtcagcacccatccgttcttgcgcttcgattcgccatttttgttgacacggtaatctgaaatccgtgtgtggtggtggtggtggatgcgcagaggtgacgaaggcgctgtgggcgaggaagaacgagaagatgcggtggtgcgagcctaggcagtagcatgaccagctccagcgaggcgacccgctcgccgatgtagccaaggagagatgcagcggcagtggcgaggggacttcaaattttttttattgtgttgatttttgtgatgctattgtgttgatttttgtgatgcttgaatgtttgagtgaatgaaaattctttaatgtaaatttctgtggaattttgaatgcttgggtaaatttctgtgaaatttttgaatggtgaagcgttgacggaggcggacggagcagtgttgctccatccgtcgttttttttaaacttggcaagcattaacactggcggctggttcctataacccaccagtgataattcatttacgccggcggctggcttaagacgaccgccagcgaaaatgaattatcgctggcggtcgataaccactagcgaagatctacattttcactggcctttgctttgtggcagctgcgatttccaccagcgaaaacccaaaatggccgccacgaaagatggtttttgtagtagtgtcaagagtaagacatctgagttttcatgccgcacagcccatggacagatgatggttgatggcttcaaaccgtctattgccatgtcatatgtgcaagcaaggtccctgctcttatctcgtgggtcatacgtcatgcatataattatgcacaagcttgagaaaaagaactgtaagactgctgtgatatgttagttgataaaaggaagatgagttgtgggagatatgacaccagagataatggtgagactactatcttagatgcaagcactggtagagaactcatattcagtcccggttagaaacccccattaattccggctataacaaccgtgactagcaaatagagaaccggttgaaataatcgatactaaagatgcataccaagtcaaaaaaaaatgtgagcttggtaaggtcacagtgatgacagcacagtggctcgatgaggctacaacaatgacggagcgacggcataaggtactggcagctagcgatatcgctggcacgcgaggcaagtggtcatggtttgcgcctatagtgtgggcagcgaccactagtatcaattagcgcctcttcggataagaggcaactaaggaggaggctgttgcaaggatgctggcctatttgagaggaaagcttgtgaggaggtggacaagcatggtggtggtcataaggaggctaaccatctgttgaagaggaggtagccatgaggtggtcgatcgatgagctagcgactcttcaagaggctagccgacatggacgaccagtggatttgaggtggagctccccccagaggatgttaactggaggtgtggtggtaattacatgttagtgattgttggttggtggttgatttggaggatgatggagctagggcgtcttggcaaaggtaaggccgatgctaggcgaaagcctcatccagtgaccacaatctcctttggggtgttctcgtggtggctacaatctctttcccggtgagatgctctaggtaataatcattcccaatagttctttgggtgggcaacgatggctctttggtgtcacggctttattggaggcctagtccttggagaactgtctccgccttttcatttttagacagttggtcctcaccttctttggtgttcattgtatgtcatgatagcgatggatctgtctgagagacgagagaatctttcttcactctcaccctttacccccgcaaccctaatctgttgtgactatcaggagtccccgctcgaatttggtaactagttggctggtgaggtcaacactaggtaggcagttttgtggcactcctggctgatttgattgataatgggcctattagagagaagagtggatccttcttctttctcatcctctccctctgcatctccaagccgggatgggaattgggagcccatatgtgtttttttgagcggtttggctttgttggggttgtgggcttgtgggcttgttagaggcctagcagcggccacctagtggcgcacggtttggtgctaggttcttccttaagggtgtgtactggtgtcgtctgcacacatggttgtcttgtgggcatggttgctcagcaagcggacctctgttagactttttctgctataaaatatagaaactccacgtgctattcgttagaaaaatgatgctagcgcagtgcgctaccagtgacacctttctttccaaaagaagaggagtgttcttttcctcacatgaatgtgtcttgctaaaaaaagatgcgcacatacactttcattaggccatcaccaatgcgtagcctcgggtcatcccctcgccgacggacgtccggctccgtttgccgtccccccacgagagagcgcgtccctcagctgggagacgcgtcccttggtcacttttggcttagggatgacatggagcgatgcgttgggggtgacgggctcctgtggacaccgtagctccaccaccaaattctcctttcacccctctcccctctctctctctccggttcccctcgaggtcgagccggaggaggcggcggctgccgcggtggaggcgtggcggtgacgccggaggcggagaggacgaggatggaggtggggcgaagagggagagagaggcggtggcgcaccagatctggcgacgatccgcaacatcaacgggcggagggagccacgccgtcctccccagcctcctccgctggtcggagtcggagcgtcgtgccgtcctcctccgccggcgccgtgcccgacaccgccggcccctcgcccgcatccgccggtgccgcgatgagggagagacgccttgagccggagacgggagagagagagagggtgagaggcatggagccggcgacgggaggccggagtcgtcgagccgacggaggcatcgtgttagtgatatgccctagaggcaattatagagatgattgtatcacatactatgtttacatatttatccgacattgttccttgaaatagataactccttattggttaatgaatatgtgattctttcatgagactctttatgttgtttattactatttctaaaggatccctgatcaaatatcatatgtggaacaaatatgtttatatgatcagcacatgtattaattgatgatcatgtctcatggatcatggtatagagataccaaattaataatgtggacacatgttggtgaacatgttgttggatagacccaacatgagacactgcaagagccatatgtgttgtgtcatcagtgatctcatttagtgttggtgttgaatccttagacctgagattatcatggttctcaacatatgtagtagcttacttagggactgctaaatgctactccgtaaatgggtagctataaaagtagtttttgggtatgctatgaaacatgtagtgggatatgaataatcaagatgggatttgcccctcctatggagagatatctctgggcccccacgatgttgtagattatggaagtgcttggccatgccaaaggtgattgaggagtcaatcacaagttactatcaacaggttcgagtgaatgattgaactattagaggatggcacatatctagccttgagcttaatcgatattgtgaagcaaaggggttcatacaagtatacactagaggttcagccgatatgatctttatgtatgcccggtgggtcaatacgttctgctaagggccgctgttgacgcattgaccgaaaaggagttttcgtgttacagccgagtatatatgaacctacagggtcgcacgcttaatgggccggaacatggggattggatagagatccaatatgagcttaattcggatatggatccgaataggagtcctacgggccttggaggcaagagtgatagatcctatatattcgtgaggggcgtgaccagcggaggcattgtatcacgtgagaaaccctagctaccacttccctccccgagcaaaaccatagccgcgcgcgggtgctagcacatctgcgcgtggcgttcagtccttgtatgtgtggataccggtggaggtgccgttggtttgcggtgctgatcggcgtgggagtacggcgaggagaacgcatgaggaggagaaggtcgagccggtgcgatcgactacttcctctacatcgacgcgcgctactttgcgagagttccttcgacttctcagcgtcttcttttgctgcacagcgcgtcgagtggtaacgatctatgatctaatacttgcatggttcctagtttacgcaatagaaaattttgatttatgctatcgtagcctacgcgtatcccaaaagtggtatcagagccgccttgtatagtttatgatctagatcattgcatatagttagtatgcgggtgtagtagatgagatctattatgttgtatataagtttttaggtgatcggaacatgagatgaaccgatagacgcaagggttgatgagatcaatcggtatgtgtgttggtgacttcactgaaatgtttagtactcaccaaggccgagcgcgattgtgttcatcggatagtccgatgtccactggaaccgcacgccaatgagaaaaaacgaggcaataagattgactcagtttcggcataattcgattacgccgttaaagttttcacatagcgggactgccgtgtgcgttgtcccttagatttcgcttggggtttttatatctatcttactttattgctgttatatatttgatatgacataataggatagattccctcagaaaaattaagtgtaatgtatgctcttccaataattgcacctattacggttgtgatcataagtgataggtttgccatagcaaagtgtcactttttatcatgataaaataggatagatgtcggatatctatatgcggagattattggtttacttgacaaggttatcaaaacagttttggaccttggggcataggttgggttggacatggagatgtcaccccaacagcacaagagtcacgtatgatgtgattagcaaggtgttgcttacctattttgatagttgtctagctgtgataccaaagctcactagacactaataaaatgaggatcttggctcactatgttattagagggaattttgtttcacaatacatagtgggagtatcttttgttaaattgtttaatgaaaggttaaatgtaaacatggtgctgattttgcatacatatatttctattgtagatcatggcagctcctgcaccatccaattttaacttgcggtctattcttgagaaagagaagttcactggaacaaacttcatggattggtatcgcaacctgagaattgttctcaggcaagagcacaaagagtttgtgcttacagagtcttttccagctaacttgcccaacaatgctcctgctgctcaacgtagggagcatgaaaagcgatgcaatgattatcttgatataagccgtctcattcttgctactatgtcccctgagcttcaaaggcaatatgaggcattggatgctcatacgataatcacgggactacgtaacatgtttgagggccaagcaagagctgagaggtttaatatctcaaagtccttgtttgcgtgcaggctagtagaaggtaatccagtgagcccacatgtgatcaaaatgattggttacaccgagagtctggataagcttggctttccccttagccgagagttggctactgatttgattctccaatcgctccctcctagctttgagccgttcataatgaatttcaacatgaacaacctgaatagggccttggtagaattgcctgggatgctaaagactgccgaggaaagcattaagaaaaactccaaccatgtgatggttatgcataagcgcaagcccaacaacaagaaaagtggtcaaaagagaaagctaaactctgatgagatcacgagtactagcaattctaagaccaaggttcaaaagacagggcccgctaaggatgcagagtgcttcttttgcaaggagacaggtcattggaagagaaactgtaagaaatacgtagagcagctcaagcagaagcagcaagatggaaagaattccacctcaggtattaatgttctagaaattaatcttgctacttcctctactgattcttgggtatttgataccgggttagttgctcacatatgcaaatcgttgtaggggctgaaaagaagtaggagcttagcaagaggcgaagtggacattcgtgtgggcaatggagcaagagttgctgctgttgcggtcggcactatgccattatctttaccgttaggattagttttggagttaaataattgttattgcattccagctttgtgtaagaacgttatctctgtttcttgtttgcaagcagagggttatggttttagatctgtggacaatggttgtccagtctattataatgacattttctacttccatgcacccatgatgaatggcttatacattgtgaatcttgatggatattcagtctatgacattaatgcaaaaaggcaacgtcctaatgatttgaatcccacttttatttggcattgttgcttgggtcatataaatgagaaacgcatggagaagcttcatagagatggacttctacactcttttgattttgaatcatttgagacatgcgaatcttgtttacttggcaaaatgacaaaggcacctttcacgggtcaaagtgaaagggcaagtgaactattgggactaatacatactgatgtatgtggaccaatgagctcaactgacagaggtggttttgggtactttattacctttatcgatgactttagtagatatggttatgtctacttaatgaggcataagtctgagtcttttgaaaagttcaaggaatttcagaatgaggtacaaaatcatttgggcaagacaatcaagtatctacgatctgatcgtggtggagagtacttgagcctagaatttggcaatcatctaaaggaatgtggaattgttccacaactcactccgccaggaatgcctcagtggaatggggtgtctgaacggaggaatcgtacattgttggacatggtgcgatcaatgatgagccaaactgatctgccgctaagcttttggggttacgctctagagacagctgcattcacactaagcagggttccatcaaaatcagtggataagacaccatatgagatatggactgggaagcgtcccagtttgtctttcctaaagatttggggctgtgaggtctatgtaaaacgtttgcaatcggacaaactcacacctaaatcagataaatgcttctttgtggggtatcctaaggaaacgaaaggatattatttttataatcaggaagagggcaaagtgtttgtcgcccgacacggtgttttcttggaaaaagagtttatttcaagaaaggatagtgggagcatggtgcgacttgaagaaattcaggaaacaccgaaaaacgcttcaacgtccacataaccataagctgagcaagatgttgttcaacaggttgaacaagttgttgttgaaccagttgtggaagcaccggcttcatgaaggtccgataggatacggcgtacacctgcgaggtatgcgttgttaactacaggacaacgtgatatattgttgttagacaatgatgaacctactacctttgaggaagcaatggtgggaccagactctgagaaatggtttggagccatgaaatccgaaatagaatccatgcatgtcaatcaagtttggaacttggttgatccacctgatggtgtaaaagccattgagtgcaaatgggtctttaagaaaaagacagatgtagatggaaatgttcacatctacaaggcacggttggtggcgaaaggtttcatctacaaggcacggttggtggcgaaaggtttcagacaaattcaaggtgttgattatgatgaaactttctcgccagtcgccatgctaaaatctattcggattgttttagcgattgctgcctatttcgattatgagatatggcaaatggatgtcaaaacagctttccttaatggaaatcccgatgaggatgtgtacatgacacaacccaagggttttgttgatccacaatcagctaaaaagatatgcaaattgcagaaatccatttatgggttgaagcaagcatctcggagttggaatattcgttttgacgaagtactcaaggcgttgggctttgtcaaaaacgaagaagagccttgtgtatacaagaagattagtgggagcgcactggtatttctaatcctatatgtagatgacatattattgattgggaacgatattcctatgcttgaatccgttaagacatcattgaaaaacagtttttcaatgaaggacttaggggaagcagcatatattctgggcataaggatctatagagatagatcaaagaggctaattggattaagccagagtacatacattgacaaggtgttgaagaggttcaacatgcaagattctaagaaaggtttcttaccgatgtcacatggcattaatcttggcaagaatcagtgtcctcaaacgactgatgagcgaaacaagatgagtgtgattccatatgcctcggcaatcggatccatcatgtatgctatgctatgtacacgtccagatgtttcatatgcacttagtgcaacaagccaataccaattagatccaggtgagagtcactggatagttgtaaagaatatcctgaagtacttgagaagaactaaggatatgttcctagtctatggaggactggaagagctcgttgtaaatggttacactgacgcacgcttccaaaccgacaaagatgattttagatcgcagtctggatttatgttctgcctgaatggaggcgctgtgagttggaagagttccaaacaagatacagtggctgattctacaacagaagcctaatacattgccgcttctgaagcagcaaaggaggctgtttggataaagaaatttgtttctcaactaggtgtgatgactagtgcttctagccctatggacctttattgcgataatagtggtgccattgcgcaagccaaggagcctagatcgcatcaaaagtccaaacacattttacggcggtatcacctcattcgcgagatagtgggtagaggagatgtgaagatatgcaaaatacatacggatttgaatgttgcagatctgttaacaaagccactccctcagcctaagcatgaggcacacactagggcaatgggtataagatacgtttatgattgactctagtgcaagtgggagactattagtgatatgccctagagacaatcatagatgattgtatcacatactatgtttacatatttatctgacattgttccttgaaatagataactccttattggttaatgaatatgtgattctttcatgagactctttatgttgtttgttactatttctaaaggatccctgatcaaatatcatatgtggaacaaatatgtttatatgatcagcacatgtattaattgataatcatgtctcatggatcatggtatagagataccaaattaataatgtggacacatgttggtgaacatgttgttggatagacccaacatgagacactgcaagagccatatgtgttgtgtcatcagtgatctcatttagtgttggtgttgaatacttagacctgagattatcatggttctcaacatgtgtagcagcttacttagggactgctaaacgctactccgtaaatggatagctataaaagtagttttcaggtatgctatgaaacatgtagtgggatatgaataatcaagatgggatttgctcctcctatggagagatatctctaggcccctcgatgttgtagattatgaaagtgcatggccatgccaaaggtgattgaggagtcaatcacaagttatataatctatcaacaggttcgagtgaatgattgagctattaaaggatggcacatatctagccttgagcttaatcgatatcgtgaggcaaaggggttcatacaagtatacactagaggttcagccgatatgatctttatgtatgcccggtgggtcaatacgttctgctaagggccgctattgacgcgtggactgaaaaggagttttcgggttacagccgagtatatatgaacctacagggtcgcacgcttaataggtcggaataaggggattggatagagatccaatatgagcttaattcggatagtgatccgaataggagtcctacgggtcttggaggcccgagtgatggatcctatatattcgtgaggggcgtgaccggcagaggcattgtatcacgtgagaaaccctagccgccacttccctccccgagcaaaaccctagccacgcgcgggtgctagcacatctgcgcgtggcgttccgtccctgtacgtgtggataccggtagaggcgccgttggtttgcggtgctgatcggcatgggagtacggcgaggagaacgcatgaggaggagaaggtcgagcaggtgcgatcgactacttcctctacatcgacgcgcgctatttcgcgagagttccttcgacttctcagcgttttcttccgctgcacagcgcgtcgagtggtaacgatctatgatctaataattgcatggttcttggtttacgcgatagataattttgatttatgctatcgtagcctacgcgtatcccaacacgtcggtccagctcctcgcctcctcggtggatgccacacgcggtagatgggagggagtaaatgaggggaagagagagaggggggagaagagaggggtagtatagtaaaatgtgcttttttggtagggatactcattgggctactaggggtatcctacattgtgacttgtgaggggagtttcctagagagtactctcagttagtgagggcacccatagagtatccctgattggtgatgcccttagtactaagcagagcccatgttatttaaaaaacaagtaccgtatccccactctcccatgtatataagtaccgcatcctctctctcatatgtactccatccgtttcacaatgtaaatcattctagcatttcccacattcatattgatgttaagggtatccataatgtagtaaagaagtgggtattagggattaaaatattcttactactaggtaagatacattgtggaaatagtaaatagctactaccaagccataagcttactattaggttatagcactttgtggtgggtcctacctattttttaattgtggcatggctcatgtttggggttatttttcagatgggtcccaccttattacccactctacacatatatacattgtggtgcatcttcaatctactattaccatcttacataggcccaccttactacctacttttgcaacatacattgaggatgccctaatgaatctagatagatgctaaaatgacttatattgtgaaacagaggaagtatatcattttcaaaagaaggcaccatgcagttcataccccattgcactggtatttttttaataaaaccacttatattttttaaatcgtatgttattttaaagatttgtttaaaccattttactccactcaaaacatgtaaaaaaacaagtctaatattaaatatattttgaatagcaatatagttactttaaataccatcaagagttagtaccgtgaagagtacgatggctcaaacggaatctaaaaataatacatggtttaaaatatgttatatttggtacatctagatttattaatattaatattaatgtgggaaattttagaatgacttaaagtataaaagggagggagtattataaaagaacatgtctacttcaccgagagaaaaaaacaacacgagaaaaacctggcgagcacaccaccaccgcatcaccggtccaccgctcttgccttcccctttcttgcagtgcaggaaagaaccccacgccctcatccaatcccagccgtccatccaccatccaacgtctctcaccgcgccgctcacctcctcaagaccaccacccaccactcccctcctctctcctctccattcctcctcgcttcgacaaacaaaaccccccaaaaccctagcctccgccgcccgccgccgccgccgccgcgcaacccccgagctcgagcggcgcgatgaacatcaagggcggaggccgggtcccggtgcccccggccggcgcgggcacgctcgtcaagctggtggtgctcggcggcacggccgtgtacgccgccgtcaacagcctctacaacgtcgagggtggccaccgcgccatcgtcttcaaccgcatccagggaatcaaggacaaggtaaccggacacgcccatccccccgccccttccctgttccatttcgttacttggatgtgccgcgtggtttggttgcggcgttaacgattcggtcgtttaggggagagattggttggaaataaatatttggtctcgcgcgctatcttatgttaggttgcagggtaaattgtgttttgaagcaaatctatttgggtttataggtgctatctggtaaatctgaactaaccaggtggtcttcatgatgtgtgagatacctgcctatctttagataacttgtttagctgcagcgatttatcaggctgaaaacatgacaagtgttccctttcttgtgggtgatatcatttgttgaggtttgaggattaaaaaggtcaaccattgcgtgtgctggaactgattccaagttcttggtaaaaaatccaatttgtagtatgattgactgctgattccagtaccttatgccttgaaaagagaattacctctgaaacaacacgatcgctctgtaccaatgtgtgtggtttccagtctggcttgcactgaggttatgaaattttcctgcgctagatacctgtaattggttctagaaagcagctgctttgtcttatttattggcctgcggcaggtccacgagtaccatgccgtggtgtagttcagaacagatagtcacatgatgtttctaccttcattttttatgttgtttgttgaaatgatctgaatgtggtaaacacttattgaaattaaattgtaaatgaacacgactacttttgttttatcattccttaaaaaccatttgaaaatatggtaacattcatcacagtccagtcgatttaatgcacacgagaccactgctggttggaagatggtgccaagatcaactgaaaaccattgacttctttcagtgtttgccgcattgtggtttttttataccaaatttaccatggacaagtgcaatcgcattatttgattttagtctggaagtctggctgtgaccattatatatggctcgccatcagtacaatcagggcatattgaagttgtttgtgttcacaaaaacacacattcttttctgtactcacaatgaactgcacatttagttctgtcacacatgcacctttttcttgtaatttctttaaatgtggttcatgggagtaacgcatttccttttaaaatatgtatctttattttatcactatgtggtttcttatgctctttctttctctcttttttccttttcaaaaagtaataaaatgtattgttattaatggcattcaattgtggttctctgtttcataatgcaacttaaatagcattaaatttgttagatttgttgaaaatatctgttatcatatatcttctgctctaactatcttaatcgaccttagatggccggttcctagcaatctactcaggaacagcctagataacgacagaggctgctttcaccttcttgcccataggttacttcgcccaaaccgacgacacttctccccacctttttgagcagctttgatacaggatatggcgactctttattgcgagtatagcatgactatgaacctgacatgcacacacaggtgcaaacaaatcataacaaggagtagtgtcttttacattctggctccttgcattattttggactaaaagtaaatttagggttgttttgtttgctgtgccatccttccgtcgccagctgtagatggaccccagacatctaatgccccctttgatatcttcctcgcccaaatgtgtcatgcctgagttagtctcctagattccttcttgacatatgatctcctgttcctttaaaaataacatgtccatatttcttgcctagaaaagtaggtttcaaatggaaacggagttacgtatgtatatagcatgcatgacttggtttcctttatatccccatagcttgatctttgtagttaccaaggcaggtgttgatgccgagaatagctctaatgtagtgtctgtccgctccgtgaagcgggaccaaatttgcagccccacacgaccagatcgtcattgggtgcaaactctgtcacttttggtaccaccaagcggcaccatctatcaggtgttctgttgctgccagtcctgtttttcaattttggctgcttgctgaagaatcgctcaaagcaattgaactaaggttgtgggtcttccttgctgttttaaatgtcataaaccctagatgataaaattgtgaagctaaagcttgcttgcaaacagaattaccgaaccctgcagcaaaccatagatggcagagcagctattagctcagatagcaagttgtcatgaaccgaaatcatgatgaggccaatgtcagctgggaggattgctgaatggtgcaggctgctactgatgagttgagggcttagactgggatcatgaacattaggggaaagattaacagtttaattttcttcattgaatcctctccggtagaccagctcattgcctcttatagggccagctcctaacagtgtaatctaactaatttaaattgattttatcagctaattaaaaggaacaacctagataactatggctgctgctgctgatcttcttggtccatgcccatggtaaccaatattatgtttttatcttttaagatataatttgtgattgtgagttatttccttgctgttcttgattttcgaatgagatttgttgtgtgcatgctatttattaaaaaagaggcatggaatcagattttacttcaaaaaaagagaccacatgtttgcatgttacgtccacctctcactgtttactgtgtttggttagtcattccaaagtgagctttagaatttccttattttatttcctaaataggatggtagtatttatctaaagttgtgttaacaatgcttgtatagctagatgctctattctttcattgttagtgctggagcattaaatgttttatgcttgtttaaagtgtattatgaaatatgcaagaagcttgcctatgtcttcatcattataattattgatcttatttagtataaaaaagagctgttgtgagtcctccctttcctgtgcatcagagctttgcgtggatctttcgcactaggtaaacctgtattcttattgtgtaaagtagttctcaaggttttgttgctatcatgtgaactaagttttggtgccctttccttgtgctgcgcttaatacttcagttcaatccaccttaacatagctggatgactaatatatatttaacatgtactacctacaggtataccctgaggggactcactttatgattccatggtttgagaggccaatcatttatgatgtccgtgctcgtcccaatcttgtggagagtacttctggaagcagggatctccagatggtacgtttgcatctttttaattctatattttcatcgttggaatgtgtgtatacttctcatctaatgatagatatacttgatttgatttgcatgctctattttcattgtcattgcacaatcaagttaaattgaatttaaagccaaaatatgtgctgcttagtgcttacatggtttcattgttgatgatgatgaatcatcacatcctacattgaatctttgcatacattaaagtattgtgtcattcataatcattaacatctttgactgttagtttgtttcagaagctattaccacattttgcaactaaccaaccttttgctgatggttactagggttctatagccttttgctatatttttttgtctgtttttttgcatgtttgttttcatagctatttaggttatgatattaagtttggagcatacctaaagtggtgtgattactcagagttcattttggctcatggattttagtaaattaattattggaggcaaatgttaattggtcattctgttattgtttatagataggtacgtttaggggtaaaccttttttgtgggctaacaaccagacagtccttttttacttatggctatattccaaattctttcctactttatgatagcatgttactccttgtaaagatatttgattgtggacttatttggtgattaaaactgttctactaaacatgccaggcatatgtggtcaggttttagaaaaaaaattgaactagtgagtagtgagccaattagaagggatgtgccaaattttggaaataaacacagtcgaagaaaatatgcaatttcggaaataaacgcagtcgatgttttagtttatggttgtgccatgtgcttttatgcttggagttccatttgctgaacataaaacccttcttcatattttttatgcatctattgtactctatttttggcaggtaccctttatattttttatgcatgtattgtactctattttgggcaggtgaaaattggtctccgtgtccttacaaggcccatgccagagaagctaccaactatctacaggactctgggggagaacttcaatgagagagttttgccttcaattatccatgaaacacttaaagctgttgtcgcacaatacaatgcgagtcagctaatcacacagagagaggttaagacctgaacatatgctttttatagtctttttttcttatatttgatgggggtcaacattacttgggggcgctaactgtttgtttcactctccaaatccagaccgtgagtagggagataagaaagatactgactgagagggccaggaattttaatattgcccttgatgatgtgtccatcacaagcctgagcttcggaaaggagttcactcatgctattgaagccaaacaggttgctgcacaagaagctgagcgtgctaagttcattgttgagaaagctgagcaagacaagaggagtgcgattatcagggcacaggtaagaaatctgttttatagccattgcctgatgtcatgtgccggagatacagtttgacagtacatattatataatggttttgccattgcatgtctagttaacattgtctcttaaacatggcctttctcttctttcaacagggtgaagctaaaagtgctgagctgattggtcaagccattgcaaacaaccctgctttccttgccctcaggcagatcgaagctgccagggagatctctcatacgatgtcatcttcagctaacaaggtgttcctggactccaatgatctcttgctcaatctccagcagctcaccgtggcaaacaagtcgaagaaatgaagtcattctcgcaccatgttctaggttattagcagatgtcagtctaccagacaatgtgaggaacacttggtcctctctgtagttgcactagtgatcatctgtgatacagaactcgacgagtgactcaacttttggcaaccggcaatctttttgcaaattgcagctaaactttgcaggctacattttgactctgctagtccttgaggaagttcaataaggaataccattctgttttaaggttctcaatctgtgattgcgatgatggattaagaaactgttagatctattgatcaatctggtaggtcccctactggtatgtttatctgatatcatgctgaatgtgtaattttcagcaacattacaggaaatatgccgttgaagaatctaaattagtacactgattaacagatcgtcgatatgtccgagtggagacagactcgaaatctgttgggatttgcctgcgcaggttcgaatcctgctgtcgacgttttttgcttaagttcttttttggctacgacttgacagatgatactccatattcgtttattggaaaaaccagaaagaagttgaaccagaaacattttttaagagaaaatattaataattttggctctttgagccttacattcgatcaaaactatcacgccacaggaaaatgaaggatctacaagatgtggtagttttaattttgtgaaaaaaaaagtaacttctatgctaacgcatatattgagtctccttactattactccctccgtcccaaaatagaaatatttttagcacatgttaagtcaaatagttttaattttgactattaataaaaaaataataaaaaagatcaatcatgttttgtgatgattttggggataattttgtgatgcaaatttgtgggtgatttttagatgtttttgtgaatatgtggatgattttggtgatgtaaatttgtggatgatttttagatgtttctatgaagttgcagatgagtatgtgatatcaatttgttgatgattttatctgtgtggatgattttgttgttgagttcggtgtgaaatcaatatgaaagtagcaaaaaaaaaagagaaaagaaaagagaaagcatcacgtggcgcttttatttttactcccgcttggtgactcaaaccaaatatcgctacctttagtcctggattctctctctcgatttgcaacctgggactaaaaagggttgcgaacggagagatgtggggtactctggtagtgatcctatataattggtacccactaaggggcatttatactcctataaagtaaaacatgcaagaagccacatcatcaataattttaagccatcagatcatattagtacaaagataacaaccgttggatcaaaaagctacttattcatccaattcaatcatttattagcaatccattcacctcaatttgctccacctcatagtcacacatagcattgttacatattttgtgtataacaccatgttttccgaatataattcaaattattgtttaacacgtgattattatttaatatgtgtgttttattttattatgcatgataagatggcatataattattaggtatcgttaactgaatacattttcagaaaaagacgagtgaagtagaggtatgcaaactgtctaactacaacgatacacatattgcgcatgaaagtaatattcatatattataacaatacacaatgacacttggaaaaataaagcatgaatttattgtaataatataaggcatatataaatccatattatcgtatattttgtatataaatagagttgcacctaaccatttaaaactatgattttgtttgatcataaaattacaaaacccgcgacaaagatgtggggtgccaactagtaagttcaatgacagactcctagcagaaagatccgctcatcctcgcgcgaacctagaacagaaaccgagagaacgccgaaggccaaactaggaagaaggaagggaaggcgagggaacatgacctcctaggtgacgcctccaagaaggttgcaacgtcaaaggtgccaccgtcgcctgctcatattggactaggttttcacctaaaaagtcatgtcggggagggaggatggcagctcaacaatgcccacaagagggagcacggcatcaagaggcgttgtcattctcggcccaaaaatcgagctaggcttttgccaactgtatcatctccctccgaaccatcgacatcccaaagctctgccacccgaacgacctcctccatcacgtgggctcgtcgcaccagagcccctccgctggccaacacccctgtcacagccccagctcgtgccacacactacctcgctccgctagcgcctccacactgggctcacctcacacaccgcaacagtctcctgctgtcactgaccgcattttcgcacgctgcatcagattccgcactacaagccgcgcctccacgcgtcacaccagtctatcgctgtcgccgaccaccggatctggccagagggtaccagatttggcgcccactgctgccgctaccgcctcgacattgccgccgtcactgcaatcccaccgcatgacatcgctgccccgccgcctatcaccacctccgctcggctctagatacagcgatgtccatcgtggatccggtcgggtttggcgcgtgggtggctctccgtcgccgccgttgtcgcctcccgtgccccacctttgtactctgcctcccgtaccccgccaccgccggcccgaccacgcttgcaccaccttttcctgcatgccaacctcaacgtcggcatccctccggccatcctcaacctttgagtctgccacgccggatctgtggaggccgccgccaacctcacaagtcgccggctttggtggccacttgctctggcggctgcgtctagggtttccacccgagtcgcccgacgcgggcagtgacgcggacgtgggagtatagtgttcttggtctattttcacgatgatacctaggagaggccggatggagaggacaaaaggtgggtgaggtaggatgcttgtagtccggggatggggtccttgacctggaccacgttatccacacgatttccagtgtgccaatgtatcggcccatttggtacgtgatatacatcggcttttacaattaatatataaataataaagcattagatgctgccaaatactcacgaactaatattaaacatgcatggttacacagaattatggagccccgttgattatcctaataaaccaaagctgttgacggtcgttatacaccaaattcgactgtcaatataactaaaataaagaaaaactagctatgcttgcaatgcatatttatttaagaataatatagttccacttgtacctagagtattatttgtctgcagagattaatacataaatggagaagaaatgagaacacttcactcctaagcaagcttaaggataagatgggcccacatgtcaggtgtaaccatgccggaaaccgccataactgccacaactgtcatagggacccacctgacagtgacctgaccgaagctggaggcctgctgggccggcccaggttcggccgaactctgacagcggtagctcagctcggctctccagtgtacgctccagatgactccccaatgacggttgcggggcatttctgacaattccaaccgttttaaccatcattgcaaggctatataaagaggtcacttcattcattctccaacacactcaagcaagctcaagatctttccctatactttagttttgtgctctagtgctaagtggagtagaatagaatagctcttggagtcctcagagtcttcggaagagttcgagtatggctgtagtagcttttctttcttcttttgtatgactttcagaattactagtatattattctttatatactctcggtactttatttgtccgagtatcggctttattttatatctatgtcattatagttgtgtagctagcctaccagagaggtgcaatggtgtgggtttaatgtccgattattcggttgctctgtgtcattccaggggacatagagtagtagaggtggtgtgtagattattaagtatcattatctgagcatatatgctgcgggacagtagaggtggcccgttgatggtgacaactcagtatgggtattcctccacgtcagtatatattcctaagacatttttctggggagggtactcctccgtatttagccccgattggatggccatgacaggttgtcataagaaactcggtaacctagggtggtctctcgaaacaccaggagggcactgttaggggtagtggccacacaattgtatactagcagatgtaaactaaaatggagtgtatactagaagtatatgaattgattgcttttctatttcttcttccacatagcttaggattaattaataagaagatctgagttctttttgctttgtgtcactctacccttatgaatgtattaatccctgcttagactctaatcgtaccagtggtgtaaataaattattagcatagttctatattataaatctttctttgggattaaataaatatgataccttggaatacttctgggtaaaatgctacaatagtatatccgtgcgcttgcggatcccttatgtaatcatatatataccaggactatttctggcgtcattactgggaatttatatttctagtaacatcgttaagaaataccatcaagcatttctagcgccgttgccgggaaagattaataaagagattactataagctaataattttatatgcattacctctgtatagatcactgtcctttgttggctaaccttgattgttttcacccttaaggagttgcctccatgaattcaaaggaggaggtttatgatcaaagatgaaaccattcatttgcctccaaatattcctagtcccacaaagattttttttccatgaaacaatggctttgataacagtttcttgattgtaccatcatgttatccaagctcagagatgtgtcccaggagatacctagaacatcatagcaagactttgcaaaggtacactgaaaaaaatagacgcaatagattctcaagatggtgaattggacaaagaacacaactaagatcacaatcaggtgggggcacaatgcttatggtccaacacatattttgtgttcaacctgtccatcaaaagtaaccaacaaaaaactttaacctttgaggtagccttactcttccatagccaaatttggccaaagaattgatgaagctgtccatgttctgtaatccaattcggccacctgttacagtgttgacttcaaacaaccgccaaatgtgcatacgagctctgttttcaactgatctatccccgtcgccaaattccatcttagtcatccgcagttgaagaaacaaggtgttgcatcatttgtaatgggcctatgagcttgtaattttgtctgggacctcggtccaactttcgccaatgtggggtgtgccccaatctgggggagcacgaacccaatggccctcttggttgtcctcccacctctttcaatagctagatacccctttagggtttcgcgggttttatttagattaaagtttagccattgcaacttttcctcgtgcttacgcgtgtcggttagaccgcctaattactcgtcttcggaagcccatcttatcgtgcattttaattcctatttgcaattcaaattgatttatcttgttcttgcttgtttctccgatttgcttgccggaataagattgatctgcaccggcaagatcaataacccacagagaggtgtatcgatcgctaagacacaacacaacaatatcttgtacgattatagttgggtcatcaacgtttctcccaaatgattgttatcatcaactcatcgaaagatcgggtcaatcgaagctgtgagcgtatcgagtggagctcaaggtttatcagagggtgtagttattttggttagtgctttagtcggcaaaaattccacaaacaaagcagaggagcaaccgtacattaggagatatggtctaccatgagcagcatgtctgtccagccaattacatatctcttttcctgccgtctagttggtggtgtgtgcttcactcatacattttgcacagtatttgcagccaaacaatactatctacagagcttaattgttcctttaaagtaatatgaactaatagttgatatagaaagtaagataaatataaatccataatgccgactgaaagatcttccgttggttcttttcaaaagaaagcaaaagaactttggttgatagatggttttcattgcacatgatcaaggccatatagatagttccacacttccacatacacttaccgacttctttttagaaagggttaagttgatttatgtcatttcagataaataccactactattcgtgtgttcgtaaccatgtcattgcaataactgcaaaattagatcataccattttatacgcataggattatcttttgaataatttttgctactgtatttttatatggaaaaaaaatacctaatctacatatgggatccagccgtaagtttcaccttcttcctccaatcctccacccaatccggcgccgaagctttctttgtgctgcacgaccccgtcgccgtcaacgccactgcacatgagggagccatggccacatttgagcggcatccctggtgatgagcctgtctagaccatggcggcggcctctccatgctcttcgacaagctagcagtgtcgcagccggcatccaaactcatggcaccgctgctacttgactcctgggttcatccaaactcatggcacagtgctgccaagccgtccaccgtgtccatcgcccagacgtccttgttcgccacgtggactataccatcccgaggccccatccctccagtgccgttgcctccacatctcggcttcctctcgttgccgatccaacccaagccggggcaaagctgctacacggacagtcagtccttgcacagcagtggcgacgggaggctagggttgatgcgtggtaatacgggtcagcccaaagttcgtcctccaggaacacatcggcgccagcagtggcaatggcatggagtgcacccgtggagcccgcgaccatgggcggtggggagccactgcggatcgaagaggtccatctccagttcacactccctatttcgtccatcgagcatccgaaaggggatgagtcaaatctttaatatgcaagggtaattttgaccatatgaaaataaagtacaaacaaaataagtcaaaccgggcttgtgatgtacagcatggcatggaaccaaattttttgtgtagtcaggtaacatggttatgaatagatgaatagtaatgtcatttatctgtaggatcgtaaatggtctttcccaccccaaaagctagccattgaggtgaggggatcgtaaatggccttttccaccccaaaaactagccattgaggtgaggggctccacggaacaggcccacggtccatcaggtatacggttcccgcaggcacccacggtccatcaggcaacctagcctggctctgataccaattgtaagatcgtaaagggcctttatcaccctaaaagctagccattgaggtgagggactcccctacttataacttaggtcctttacccttccacaactaatatggaactattcaacattatcaaaaatgacactattgtaatagcatggatcaaattaacccttttagaaatcactacacctaccattttgataacgcattgaacatttacctgtttcaccattaaataacaagaaattaaaccgtgattgatagactgcaccaaactagctttatatataccaatcttatcatattacacaaaccaaataacctttacatgaaccagctagaagggagaaaaaaaatcgttggagtaggagacatcaggaaaacatggaagacgtaattgtcaatgtaagcatcatccatggaccatgaaaccttgtgaacctataaattgatgaaaagaacccagattgggtgatgtccgctcgaattagagccccaatttatatactctgcttctagtagttccttgcataagcgtgttcaacatgataatccatcttttgtatcggtttacaaatcataggcttttgttctggccgttatattgagttggatgagaagttcatcatgtgaatgtagtattcatcagagatctggtttactgaacattgataaatgttttgtcaagtactaagatgacatatcaaataatatctcaattgaatattgcccaaatcataagagaaccaccaccttttatttgcaaatttacagtggcccccaacttcacgatcaccgttctgagacgtcatatgagatttaaaccacatttaatttaatttttggggtgcataattaaaggatcgctatgtaggaaacaattttttttataggtaacacaaaactttagtcatgacctcatccacattaatagctcttagctttgtcatccatgacctcatccacacaaagcatcattatcatacatagaacacaatagcattgcgactaacagaaacattaaaaactgaaataacagtagagggttataccctgtgaaagtccctccgctggattatgaggcagaactgcctccgttggtgttgtcgatcagtgcaccagctcccggtgcactagcttcggctccaactcccggcgcgctatctccaggtgcggcagacatgggtgatgcaaacgaccggtcaaagacaaacagaggacgaggagcagtcgtgcggaagcactccccaaaaacctaatcacccacctacccggtgcagatctcaggcgaaggtgtggttccgaaggccctgctcgttccgatctcttgtgcgcgcaagcgatcagaaccggggaagcagcagcagcacaggcagcgcgaggaggaggaagaaccagtgtttggaaagcaatgcaggagatctgatcgaggttctctctttccttatagcgcaggagagaaatccgcccgttgccgtagtaacgacacgatcaatggatattgaatcgcctgcccgttacagaggcaatcatgtggttggattccgatccgttgcaaaaggatagagagagagagtgagtcgcaatgcacgcatgcccgccacgcccacggcctcggcccgacctagcgtgcacgcgcgcgcgtgtggctttccgatccccacctcaaccggtcaacagggagcctccaataactctctatttaagttgagatactcctcttttaattcccatggtggtattattatccttaacatttattatgggcccttgagatttaatagaaaaatcgggcctcgcctatttattctaacaatccccaccaaatttcatggctcataagaaatgttgtcaaagttgtgcctgtttgatataccagtgttttggtggagactgttaagttgaaattccacctaggaaatgaactacgtcagaccacaactgaacaatggactatgccttaaattgtcagtcttgtgtgattaggttttactcaaacccttgactggtactaggctgccgtttgcaccccctctgtttggagcatataagtcaaactccaggccctttcatgagtatctagagatcgcccaaatctcatatactatgactagcagtcgaactcatataggtgtgttccttctgagatgttcttcaggtcaacatctctgcttagaaaagccacttggatcacattaaggtataagccatcctaccatgcagagtagaagagaagtacatcatgaaaatgagcccttttcaagggtctcttctctcagccacacaatagtttgtttcgccatccaaatttacgggatctccgatcacaatggacaggtttccactattatgcaaccttaagtgggtatcaagcacatttccctcgatgcactgtctatcacattacgtggtagccccttggtaaactgatctgccagatttttagccgtctggacatagtccaatgctatcactccggagtttttctactttctgacagatttcagtcttcttttgatatgcctagatgacttcatgttgtcctttgaactgttcactttaataatcactgtttgattatcacagttcattaggatagctggcactggtttttcaaccaccggcaaatccatcaggagttcacgaagccactcggcctcaactgtcgcagtatctagtgctgtaagttctgcttccattgttgacctcgttaagatggtctacttgcaagacttccaggaaacagcgccacctccaagtgtgtacacatatccacttgtggcttctatctcatcagcatcagatatccagtttgagtcactatacccctccagtacttttgggtacccggtatagtgaattccatagctcatagtgccctttagatagcgcattactctttccagagcctgccaatgatcatctcccgtattttgagacaaaccgactcagcttgcttacagcaaatgagatgtcaggcctcgttgtactagccaagtacatcaatgaaccaatgatttgggagtatctcagttgatcccttgctattcttcggtttttccttaatagcacgctgggatcataagaagtaggatctggcatgcagtcgctgtatccaaagcgactcagaaccttgtccacatagtgggattgcacaagtgtaatcccaccctcatctcctcttagtagcttaatgttaagaataacatcagcctctcccaaatctttcatttcaaaactcttagacagaaagtccttgaccccctcaatcacattgaggctggtcccaacgatcaatatgtcatcgacatataaacacaagatcacttcttctcccccaccatagcaatagtacacacatttgtc

SEQ ID NO: 6112 - DNA, 2923 bp, Oryza sativa
agttggggtagactgatcaatactaaaatgtgacttgagtaaggggcattatgaatcatttattcttctactgtgtcagggtcaacttgttacttatatttattaggcagctgccaagcttatcacaacaatctcctttactgtggtttctgaaacatagtatgatgataaaacctatctatttcaggagagaaagagtataagaccaccattttctgcagagcgtatatttggtggagtattgctggctatgtgtacaaatgattttatttgcttccatgactgggcagagggcaggatgatacgcagaattgatgtcaatgtgaaagtgagtaattttgttcctggatttaaatttttttttgcgtgtcatttggaatattatgatgctaaataggatctgctttcttatttgtagaatctctattgggccgatagtggtgatttagtgacaattgcaagtgacacctcattctacattttgaagtacaatgtaagtttttctgcattttgttggctctgtagttcaatgatgtaacatctacttgatgtaactataacacaacaattataccttccagagggatgtagtttcttctcatttggatggagggggttcagttggcgaggaaggtgtggaagatgcctttgaactacttcatgagatcaatgaacgcatccgaactggcctatgggttggtgattgttttatctacaacaattcttcgtcacggcttaattactgtgtaggaggagaggtaagtattttcattatatcaaaaatacattgtcacatatgatttggttagacccttaattttcaggggtagtataactattcgatgtattacaggtcacaaccttatttcacttggatcggcaaatgtatttactgggatatcttgctaaccaaagccgtgtctatcttattgacaagcaatttaagtgagtcttggttgtctggtattgtatcatattctgaagccacaatgaacttctgaggttaacttgttttcttactgcagtgttgtggggtatactttactccttaccatgattgagtataaaacacttgtaatgcgtggagacttcgatcgtgcaaacgctcttttaccatctataccaaaagaacaacatgacaggtgccccctgttctgctaattattgtactctgcaactcaggcctcagaatctgaagataacccttttattttcagtgtggcacgtttcttggaatcacggggcatgttggaagaagcccttgagatagcaacagactctaattacagatttgacttggccgtgcagcttggtcggcttgaagttgcaaaggcacagatgattaatttatttatcacatttccaagaatgtttttgtctttgttcaaatgttgttaactatttgcttttcaggcaattgccattgaggcacaaagtgagtccaagtggaggcagttaggagagttagctatgtcaaccggaaaggtacagctgttggatgtattagttactatcttctatgagtagtcaatatatattgtgctaatgaagtgggactgttctgccatggcattttagtttcttgattattagtaccagtataccgtgtaacttaataattatgagcacacaaataaatccctccgtccaacaatataagcacttgaagcatttgaattttgtccatgaatataagcatttctacaatacatatgtaaaatcaatcgcctcatttaaatttcttcccatcttacgcccaactactcttcaaccccaaccttctcattaaatgagggcactaaagtactttctcctcaactttaatctttgctcaacagtctagaaatgtttatattgttggacagaagaagtatataattcaacaatggcatttgtgaagagataatattgcagttttgatgggaagtagctttggtcgttgctatgatgcttgaattatgaacctaagaagttattttgccttcgcttttgctctttccatcttttgtactacctctatttcattttataagtcgttttgacttttttctaagtcagacttctttagctttgacgaaatctatagaaaaatatagcaatatttttaacacaaaagaaaaaaactattcaaatatattcaatgttagatgtaatgaaaccaacttggtgctataagtgttgctatattttttctataaacttggttaaacattcaagaagtttgatttttttaaagaaagtcaaaacgacttattatatgaaacggaaggagtagttgtttttaaaagtagaattatgcgtgcaaaacaatagttttgcctgatggcagagttctgtgtgtaaaaaaataacttatcatcttagttttaagtagaattcttgcaatttaataactttgccatgttatgtttcagcgccttgccagatacaaaactggctaaaagagtgcactcatattctaacatgtcaagtgtcaattacaattctgcagcttgatatggcagaggagtgtcttctacatgctatggatctcagtggtttattacttctgtattcatcccttggtgatgctgaagggctaacaaaattaacatctatggctaaagaacaagggaagaacaatgttgctttcctttgtttcttcatgcttggaaaactggaagaatgtcttcaattgttaatcgaaaggtattgccatttgccaagactatcctatttaatagtacaatgcttattcagaaaatgtattttttattttatggtgatcacgttatattctctatacagtaatcgtataccagaagcagcattgatgtcgagatcttatcttccgagcaaagtccctgagattgtaacattatggaaaaaggatctccaaaaggtaccatctgtctcttttttccccctccaaaaggtacccagt

SEQ ID NO: 6113 - DNA, 16965 bp, Oryza sativa
tgagtggtggtggagcatcggtacatcatccgtggattcgcaggtggcgagcgacgggtgaaaacctagcccggccttggccagaccgacaacgatggttatttccccctcctgagggcgttgtcgtgctgtctcacccctcaagggcagttgccgggcgaaagtccagtcttggctcctttgagctctaacggacggtggcgtcgcttcttgaagacgtcgttttggcacccccttgctgtagggcgatctcgtctgtgttcctttgttggtctagcggcggccggtcacgcttagcgacggccggtccggtgctaaccttctcctgtcatgtgtgttggcgctgctggtgtgtgggtggtggtatattttttctttttcctggttatgaccctccaggattgtaatcttgtaattttttcctactctgtcaatagaactcgttcaaaaaaaaacataatgactgtgaatacatgcatactagccatgtttaatttgtttttttttacaacttgtacaagttaaaaacataatttctatttttgtgaggtgatatatcacatattaattttatcttcacggttttttatatatctatttaaattatatggaaaaaacgaagtgacatccatacgagagtttagtgatcattcccctttctctccacgaagagtttagtgatcattcccctttctctccacgttcttcgtgtattgttcaattagtgcgttataaatgcttgggagtttgttaatatctttgtgtggtgatgggaggggtgtggaattgattgacgaactgtttgcacgatcgcatcgccttgctcaagttcaggtcatgctggagattgctggtgagctgtcgcctgcaattttctgcaggaattgcatcattaaactgaacagcgttcagacttttgtaaaacattacaaccgcgcacgtcgcctgcatagattacatgcagagatcataccattttatgaatcgtgaggaagactagtgatgttgagtgattaagcatttcgtggcagaatgtcacaaatttcagcctgcgggcacaccgggctattctgcaagactgcaaccaagtttatgggccttatgtcctggaccccgtgctcgagtacgaatggtctgtgtatttaaaggaaatatgaaaatacatataatacattatttccatttatttgcaacaataaggcaccagtggtctagtggtagaatagtaccctgccacggtacagacccgggttcgattcccggctggtgcattttgttcctcccttcatttttatcactggcttaatcgttttctgaagatgttcacctagtcagccatatttctgtgctcatttctgaagatgatcacctattcacctctgtcccgctgtgactatctttttttttctctcactggcttaatcgttttctgaagatgttgagatgttcaccctctcaaccctttttgtgctcatttatgtccctgtgactatccactgccaatcaaaagtcaagacaaaaaagactcgccgaggaacgcctcaacttagtaccactccataacactatcatatcctatgttttatgatagaatacagcctccaatatcagaccttcaaaacatgtagaagcaggaccgtttgaactgatcaaaacaggcagcaataaacaacccaaatcagaaatcacccccctactgttcttgcatccgtttaactataaattctgacgagatttcttacactggtatcagcaacagcttatagctcagctcggttcagttcagttcattcttgcaaagttacatagaacaagaagaaattgagcagcaaatatatatatcttctcttcaccgtccgttcttggacagattgagctagctagccagccagccatggccatgggttccatcaaggtgcaggccgtgatcctcacatacgtcctcctcgccgtcctcctccacccgctgctctgccagggctcgccggcggcgtctctcctcgaggcccagaccagcgacggtaacaagagagctagctatagccagctagctgctcgatttcttcttctccattgtttttctgaacttggtgaacctgaatgtgctctgttttttcttttttgttgttgttgttgtttttttcaggtaaaacgatcgaccagggcatcgcgtacattctgatgatcgtggctctcgtcgtcacctaccttgtcggatgagtgattcagtggcccgatgatgcaatgctgcctgctgcttttttttttgtttcttttgcacacgtttaattgtaatgttctttaagttgtacaaattcattttgatctgtcaatgagacacggcaagacatgagtaagcattagtactgaaagtttatgcggtgatgacaagttcttgatttcgtgtcatacaactggaatgacagaggatgatcgatcgacttacttaacgggcgattagttgcgcaaaagttttattcgtgtcatacaatggaaggacagagcaaatgccgataggctgcatgtcttcgccatctcttgaggtttcctgccaccacaacacacaaacacaaacgatcaaaaatcgtgaaatggttctatggttgatcttgaggagaattcgaatgtttttggtaaattcaaatttagacccataaattcgattaaactttgttgaaatttcccggttcttgacatctgattggaccctgcgacgtcctaattatttggttttattatcccattttttaaaatatagcgatgtgagcttttcgacattaagttcgacgattagtcttaacaaaaaaagtataagtgaaatgaggatatggaagaggtttatagaaattcaataaatatggatatagattcatatagtatggtgtggatgtggtatcctaaaatctagcagatgcggattatacaatattttcatctgaatatccggtaggttatttatcgggtaatctgaaatcgtcaacccatgtaaccattttatttgttccatataacatgagttgactcattcaatggcctaattcatgagttaactcaggctcctcaatctgatattctcaccatctcatctcatgaccacttgtaaccaccgctactatagcctttgctatgtattgttgttttatatttgtaacttattagtatatatggacatcatatttagacgtgctatgtgtcctaggatgtgtgtgctatcctgtgttgattgattgggtgcttgtcttgaacgtgttaatgccagctttgactttcaaatcttactaatctattatgtataaacattatggattcatattaagtacttaagaaaatactacctctatcccaaaatatcaaatttttggctgtgtctggacaaacgtatatccatatacataaccaaaaagttgtcatatttaggacggaataagtctacataacccccaacctattgtcaggagattacttaaccccctcaccttacaagccaggtatttaacccccaatcttactaaaatcatttaattaaccccttatggtggttttgctccctagttttgccttgctggcatgccacgttagacagatggattgacaggcatgctgtgactgtcacctgattttctcaggcaaggccttctactctacccggtcctctatttacattgaaaatctataccatttttatggttcataacattgccattgaagtcggaattgcatacatgtgcaagaattcagtagcacgagcaaaacaagagtgcaaaaccaccgcaaggtgttaattaaacggttttagtaaaggttagggagttaaatacctggtttgttaggtgagggggttaagtaatcacctggtaataggtcgggggttatatagacttattcatatttaggagagagataatagttgttatgttggtccgttgattgattattgttttttgtccattgtatcgctaacttaatgttgcatcgattgtatatatacgcaataccagcaattttgattcgtttctgagtggagtctgctttgactctgcaacattactgacataaaaaaacaatctgttatgcattcacatccgcaacatccacattcgctatgaattaatgctcttaaaaaaatatggtatatgatatggtatcatcactatccgaatttgcttaactttcatcctaaaaaaattacaagattcatattttttattgtgacttaatttatcactaaagacagtttaaacatgacttatattttttttagtaaaattttaaataaaacactttaagaatattcaaaaatagctcaaaacttcgtatgtgagggttaacacttaataccaaggtttcatgtttaggaaacttaccgaacggttccaaagtaggatagtctttcgacataatatattagaaattattttatatagctgtaattatagagatggagaaaaaaatttgagctctgcccccttcccgctatttgaagtcatagtaacctagtttttttccttgtcttttgttttcctcctttcttgacataactcggtataactgattgtgttgtgtaacaatattcttttcttttaatatattgacgtgtaattcttttacgtgttcgagaaaaaaattatacagattaagccgaaatttgtttgagtttcagtttcattttctatcattcccctttttatttccttaattaacactcgacgagaaccaccctcagttccatgattggactcctgaaacggttttgctataaataaatcttgcgacagatttcttgttacatatcattcgatttttggaccgtttgattgcgtcaagattcgtgcttacacgggtgggaaaataaaatgtgcgtgttaaacgtttaagcgaggagtcgaccgcacgatctcctgttgccgaacaaaggacttttaccaactgagcaggaaccaatattgtttttgagtccaaagaacaaacttatatactacttacaaattaattacagtgtaattactacataattacactataactactgaaattacaatgtaattatactaaaattacagtgtaactttttaatgcatatgttgatgacatttttatttttttattaaacctccttggacttataactgttagattgagtccgttgttacgattaagctagcccgtttccctctgcaacgtgacgcacatccatatgtggaaaaatccgagtgagatgaatgaaaaaatcattcgaatgattgctaggcactcccattaggcctgacgtttcttctagaagaacaaaagaggcgtgcgacccacagaatctgaacacgcagccaaacaagtgcccactgcttgactggctgacgggacatgacgcccaacgccgcgccgccagcaaacactgaaacacactcccacctctctctctctctctctctccctctctctctctctctccctctcgcaccatctccacgaccaaacccaccgccacgccgatataaggacccgtttcgggtactttaaatcaaaggatttatatagaaatttcatagaatttaagtcctataggaaaattttctatttggccctttgattcaaaggattgaagtttttcaaatcctataaaattcctatggaatagcatattgcatgtgaattttggaggaaatttagcatgagctccaacctcatggaaaatttcctttaagtctatctctctcatccgatttctgcgttttttttgcgctccaatcaaacgaccattcctgtatttttcctatgttttgcaatcatctgttttacacttcaattcctgtcagaatcctatatttttcctattcctccgttttttctaccctgcgattcaaaggggcccttagtttacaactttttcccaaaaacatcatatcaaatctttagacacggagcattaaatatagataaaaataaaaactaattgcacagttagggggaaatcgcgagacgaatcttttgagcctaattagtccatgattaggcataagtgctacagtaaccgacatgtgctaatgacggattaattaggctcaaaagattcgtctcgtggtttctaagcgagttatgaaattaatttttttattcgtgtccgaaaaccccttccgacatctagtcaaactaaataggccctaaaaggtgatcataggctcatagccttataggatacataatataagagattttatacggattgaacactttctaggactaagaatcgggtaaagagtttattcagaatcatagtcttgggaagtatcccatccatccttaatatcttaggtagtactccctccgttttttaatagattacgccgttaactttttctcacatgtttgaccattcgccttattcaaaaattttatgcaaatgtataagatataaatcacacttaaagtactatgagtaataaaacaactcataacaaaataaattataattacataatttttttgaataagatgaatggtcaaacatgtgagaaaaagtcaacggcgtcatctattaaaaaacggaggtagtatattttaggacagaggaagtatgtgaaaagaaaagaaaataacttatttaatcaatttatacttctatatactacgacctatttatatttttctctaattatatttaataaaatatttaaaaatatagtataaattgagtcacccatgtaaaaatcatacgcccccgcctctgagtctctgacctcccgcacggccgcaccccgcgcttgacccgtcgcgcgccacgccacgccacgccagccaccgcagcagcagcagcgcgaacgactaaaccccaccggcgccgtacgtacgtcaaacaccaaccatccatccccgtctcctcctccatataatcgcaagccgccgccaccaacgcgagatcgagttagcccggccggctcctcgtctcccttcccgtgtcgcctcgccgcgcgccgccgcccgtgtgtacgtacgttacgttacttcctcgtgccgtgcgttgctgaatactagtatgacggttcgctcggagacgggcggcgcggccaccaccaccaccgtcgtcgtcgccgccgccgtcgacgcgccgcccccgtggcggctgcggaggcagcgctccgtcccggccgccgtcgtcgccaccttcgccccctgcgtcggcatcggcggtcaccacgcgccaagaagagtccttcgcttgggagggaataaggcggcggcggcggcggcggtgcaccaccgccgcggcgaggcggaggaggagggggagtacttcgattccggcggcggcgtgggtgtcctgcgtgcgctgtggaggaggatcgtgagggggaggaggtggaaggtgatgagccggagcgggtcgtcgacggcgaggaggagggagcagtacgcgcaggacgagtacgagcagaacttcgacgagggcgccgccgcggccggcggggagcccgagccggagtacctctcgcgctccttctccgcccgctacgccgccgccggcggcggccggcgatccgccgggctagcgcgctttggcgtttcgcgcgctaattaattattaatcgatgtcgatggtttaaaactgtcgatggcgggtaattcgaacctcgttttgctttgctctcgatatgtaaattaaatttgtggaatgaattatgctgtcctaatccatcgatcgaaatgaagatgaagatgaacagtatggacactgatgatacttttaatattacttttctgcttgaattatgttttgttttcttttttgcctcattctttgatcaaatctacttcatctgtttgactgtttgctctgagcagcagatagtcgaagatagcaagaataatatctctcaattcaaatatccagaagaaaaaaaaaagatcatccattgcaagttctgttcaggcctgatcatatacactttcagataacccatggctatgatcaagagccgtttttatttttccagtgcaacctctcaattcaagcaacgtgttcaacagtgaaaggcatagcgtagacaggtagactaatgccatttctgcctcgattaatcttatattagtctccaccacaacatcaagaaaatctgtgatattagtattttggatggacgaaagtcgtatgtgcttttgactgctgacaaacagcctcatattattgggtgtagttgttcattcagctgaattttcgtacggtcatatctggagttgtcaaatgctcgccagtactacttatccatagttcccaaaagttttttgcattgtggtgaatatataattagtcccggatttggaagaataaccaccagtgattgtaagatgctttgacgtccttgccttaattacctcagaagttgaaaattttttgtttacctcagggttcaggaacacgtgaatcatccttcaacccaaaaaattcttgtcacgataaacagtactatcatagacttgattggttctcttatagtatgagtctactaccagtctaccaccatgtttaaatcgtgagaccggtttacaattattatcaaaatcttgaggaaatgagagttttccgtttactacccctaacatgctaaaccagccgtacgttaccctacctgttttttttttcgtgttacacgaaacagctcccatgaagtccatgatacaaacctgaaaaacaaaggttccatgaagtaggtaatttacttaagaacacccctaaataaatactaaaagaagtgatccagagagataggagactgggaagagagagaaaccaagattatgaattactccatgctctaaaataaataaatcaagtatgtgagatgacctgtctatatccatagtaacagaatatgtcacatgtcatactaggtttgtttatttagtatagggtgagtaattacaaggaacagtataaaacaaaatcagagatcatgaagaacatcagcagtggcttaggaagaacaggaggaacaaaaggccccggtttctgttcaagtgttcagttggatccctggcctctgctgctgcagcagcctaaagacgggagcatctatccatttatcaggtgatttttaataaaaagtcgggtgattttttagatttattttaccctttatttacatccaacggattacaaaagaaaataacaaatacatattaacttacatactatctttaccaaaattacaatgcacttgcatgtaatatcaactgaatatacacatgtaaatttagttatataggaccgtaattttatattttaaaaaaataataaatacatatttacttacacattatttttgtcaaaattacagtgcacttacatattaaatcaactaaatttacaaatgtaattttagttatataggactgtaattttatattttaagtacatatttacttacacattatttttatcaaaattacagtgcacttacatatcaaatcaactaaatttacaaatataattttagttatatatgactgtaattttatattttatagaaaataataagtatatatttacttacacattatttttatcaaaattatagtgcatttacatatcaaatcaactaaatttataaatgtaattttagttatataggactataattttatatttcacgacgacgagagggacggtgtcgctcaccgatcagtgttggccgtgctgtcgacggttggctcaccggtcagaggccacttgtcaccgtgcttctccaatctctatcatcgtgcgcgcttgggctagctggacacaacggccgatgtgcttgtgtccgatgtgccggtcggcagatgagctgaataaaaggtgaaatgttagcaaaaaaaaaatcacgcgagtgatcgatagcaaaatgctcccaaagacaatccgtacaccacggcgtgggccaccaaacagcccggcccatacatggtgtccgttgggctgccagcccatctatgacagctgggcccggctggccggccaacgcggcgtcacccccggacgggccggctagtggtcaaagccggcaactaaccgcgcgtcttcctcgcatcagccgcgtcatttctcacgtttttcccacgtcaaccgacctcgcgtccgcgtcgcacgcacggacacgggctacgcaagctacagtttacactagtagctttcgcctctctagaaggaaaatgacctcacagaattaaattaacttattaactaatggcctcttcttcttcttcttcttctaggttctctgacccctccgaatcaaacgtggcggctgacgaccttccttgtgcaagtcttcctcctcctcttcttctttttccttctcatcggtccttatatatacatcagcacgagctcgccatggcatcatcagcaattcccagttcattcctgcctccgtctccagtagcttgctttgctcgcagattgttccttttttctttttctccggcgactcgagatcgtggctagctagagcctagatggcctcttccatggcgggcgcggcgggggaggagaaggcggcggcgggggcggggcggcgggggatgatcgtgatcgaccggcaggccgtcgaccgggggatcgcctacgcgctcatggtcgtcgcgctcgtcgccacctacgcgctccactagctcgatcaatcggctcagggaggaggaggaggagaagaagaagtcgttccccttcccctaccaacctgcacttcgatcgatcgatgccaaaagtctataactatagaacctgattctttcttattcaattcttctttttagagaaggttaattaattgtgtgtgtgtgtgtgtgagagagagagagagagagagagatcgatggataatttggatatgtacactataccaagtgggttaattaactggatgtactcttctgcatattttggtgttcattggtaacagtttggcattggaatgtctggtaaatcgatgatttacccctttcgcctccaaatacagatttaaatattattttgtactagagaagtagaaatgtagtgatattttcgggagcagttgataatctgaatgctctgccacatcttcacaggttgaacaatcaaattacgtattggctggttatacttgtatcttttcttgagtcgtcgtcattcgtcaacacgctgaatattctttggagtcctctatagatagtagagccgtagaggggcgatgagagatggaaactttcttttgaacgggcaaaaagtctgccatttcatttataggagagagaaaaacacggaccgttcttacaagagggccagagtaaaaagcgaaaacatgatacaataattattaggtaaccgatggcaacaagtatttgcaaacggtggaggatcatctaattaccctcccaaactatcgcagtcatctgaattaccccataaaccattaaaccggacattcttcacccctaattatgcaaaccggacgaattacccccctcgacccaatccacggtagttttggtctacgtggcgtacacgtggcagtccagtcagcgttttttaaattaaaaaattatgagacccacatgccatacacttcttactctctccctattctctctctcactcttttctctcgcacagcgaggacgagcgcggggatgggcggtcggcgaggtgaggcgagcacggtggcgttgacgtcggcgcggaggcagaggcggcgcggacggcggaggagcatggcggcggagctgtgtggcggcggaggagcgaaggtggaggaggagcgtggcggcggagaagcggaggcggcggaggagcggaggcagcggaggaggtggaggcggagtcagttgtggcggaggcagaggcaaggtttgtggtgagagcgtgcagcggcgtggttagcgctttggcacagcaacagggaggaaggcgcgcgcaggtgcatgcatgagcaagaagaggagagaaggaggtggcggaggaaacagcggctgcgacccgccggtgatcgatgcgctgtccatggacggcggcctccgcgaggtgtccctctctgtcgtcttctccgtctggtgcctcctcctcctcctcctcctcctttgctcccagttcctccacagccagaccgacccttcaggtacccacgaacgatccacctcctctcatggatcgatcaatgtcatgtcaccctggcgtttgattgatcgcttctttgtagatttctatgatgacgtcgaggacggaatgcgtgaaaactactgcaaggtaatgccgctggaggcctacattttcccaactgagtataacgcctctgcggccgcgccgacatgccagccatcgttgcaccccccggagccacagcaggaaaccgaccaccggagcctggagccgttcaacaacacaaccggcggcaaatcgtccgcggaggcggcgctcgattagctcgacgagttccagaaccggatcctgcagggcaaggccgagaacggctgcgtccccgacggcgcggcggcccaccggctcgagccaagcggcggggagtacaactacgcggcggcgtccaagggctccaaggtgctcgcccacaaccgggaggccaagggcgccgccaacatcctcggcgccacgctcctccgctaccacacagcttcgctgccacgctcctccaccacctccgctcctcggccgccacacagatccgccaccacgctcctttgccgtccgcgcctcctccacctccgcgccgacgtctgtgccgccgcgctcgcctcaccttgccgaccgcccgtccccgcgctcgtcctcgccgtgcgagagagaaaagagtgagagacataatagggagagagagtaagaagtgtatgacatacggtttctataattttttaattaaaaaaacgctgactggactgccacgtgtacgccacgtagaccaaaaccaccgtggattgggtcgaggggggtaattcatccggtttgtatagttaggggtgaagaatgtccggttttgtggttcagggggtaattcagacgatcaggcggtaattcgcactttttccttaagataaagataaagataaagattaagtgtttcacataaaacgatgtgttaataatgtgtgattaattgagttttaattattacaaacttaaaaaatggattaatctgatattttagaacaactttcatatataaagttttcacacgaaacgcaccatttagccgtttaaaaagcgtgccattttaatccaaagtttatcctccattttcattagaaacgaacggggccactggacctcctccctgccttgcacattgccatgatggaatggaatccgccacctgattcgccgtgctgtatgctccattgaaaattttatcagtccgctgtaaccaaatgcctcaggtcgtgtatatgattattccgtcgaaaatctttttttttttctcctttgccatctcctttcggcaagttcacaaccatgaaggctggaaacatttatctgtctcacattttcaaaaccatgaaggataatggacatgaagtcacttgatgcataaacttagacaataatgttccttcattagaagagtctcacatttttacgcggatagatacaatgatgatctttaggcaatgatgaatccagaaaattgatttgttggtgttataacgtgtttattggtgtcatagtatgttaattatgcttagatcatggtggtataatatatggataaacagttttcctataaattttgcaaaaagtcatcggtgccgtttgacactggtcattacactacactgtagatccgcccttgtctttaggccacgtttgtttcccattaagatacaaagtttgcattagtttccgttaacactttcggaatcttgctatttaagagtattaaacataaattactgacaaaatccatttcataacccctaggctattttgcgagacgaatctaacgagatatattaatccatgatttgctacagtgatgctacagtaatcagccgctaattatggattaatatacatcattagatttatctcgcaaaatagcctaggggttatggaatcggttttgtcggtaatctacgtttaataatcctaaatagcaagatttcagagggcgatttaatagcccggaggatcaaacaaggccaatgtattttgtacaaaattttttttgtgtagaagttgttttaaaatatattagataaacccacattttagtttaaaataattaaaatttaattacatgacttctttcgctttacatgcccgtatttaatcctcatcttcatcactaccaaaagaagcctctcccttcgttctcaaatactgacacgctgttaacaacatatctgtaactttgcgttgttttttccagattatttactggattatcggcacatgtttatttgctctatactttgaaaatatgctttttgaaaaaaaaaactttcttctactacattttttagatcagcagttctaagatatttaaagtcttttctttaaaaaaatatttgatttaaccatctaactaattaagtagataacatgcaacgataatttatttaataatctaaatcaaacatggccctgaaatttgtacgattatactatgaccctacacatttcctttaaaaaaagagcacccataatgactaatcatagactaattagacttgaaagattcgtctcatgatttttatgcaaaccgcataattagagcaggtacaatagcaggctataagccagctgcaaacttattttaaggagataaataagaagagagaagagcagcgggctacagatttgtagccagctgtagcacggactccaagatgcagtgtgtgtatgataagtggtactaggtattaataatgtagtatgtacttattgtatgaatgagctattagattggttatagatgaattgtagctactagttggctatactattaaacttgttggtattttttttatctatatttaatattctattccaaaatttttccggaaccacagggccgaagtcaacagacccccaaatccccaatccacatgccatcttacatccgggacccgttaacccgtttgcccaccaccgtcctcctcctccgacccttctcccccatctcgcgccctcctccttcccggcgccgcgtcctactccccctccccgcaggcgacaccgcgagagccgagaaaacgaggcctcgcgccgccgcctctctccactccggcgcccctccacccacgacggcctcacagcccacctctaccgccgcgtccccgccgtagccggccgtcgcgggcgccacaatggtacgtgcccccccccaacccccccgcggctctctctcgctctcgccttcccccaggctcgcgctgtttaggtttcgccgcgaatgggggatcggtgtggcgaggcgaaccgttcgacggccgcgcctcgccgcgccgtgccgagatccggtggctggagcgtcgaattccgcgtggatctggggttttttgtttgttgcgtactgacgtgattgcattctcgctcgtgttctcctgtgattttttttctctggcggcgaactggcgatggctgtgaatgttggcagccgctcaggttggatatcaaggtaaccaccgcgcgtctccctcggatccgcttagcttagtttggtttgtttagctgatagtgatcgtctgtttgatggttggatcagaggaagctcgcgcagaggtcggagagggtcaagtccgtggatctgcatccgaccgagccatggtgagtgggcaagtttgtgtgggtgacatggttttgggttttgggggtgctagggatgtaatgattgtgttgttcaaagtcacatgaataacttcctccggtgtaatgccaggattttgtcgagtctgtattcagggagcgtctgcatctggaactaccagacgcaggtacgtgactgttcacagtagcttaattcgtcattttctgtctagtttcatgaattttatgagatgatgattatctactaccagcacgatgagcttttgtactgcaaaatggatattcccatccatatgtaaaattcaagttacatttggatttagtgtgcttgtagtagtgaactttgatggtatgcagtgatagtaagttgttccggagaaaaaagggggggggggtaagcatagtgatgaatgaatgaattcttaaaacctagcgaggaattcttcaatgcattgtagaaaggatatggtcaaaacagaagtaacaaggagtcaatgaacttctagatgattgtttcagatgttcgagtgttagctacataattgtgacttctaaaaaggtttgcaaactgtatagagtaataaaacaggaggaggaggtaaaacataaaagtaaaatctagtattttcagtatagtgaaatcgatagaaggaaaaagaaacatacatattttcagtatagttactcttactgttaaactgattataatatattcatctatccccagacgatggtgaaatcatttgaagtcacagagttaccaggtatgctttcccacgtcatcgcttacttctgttccttgatataccatcttgctaatataatcatccccatttcagttcggtcatctaaatttatcgcacggaaacaatggatagttgctggtgccgatgatatgttcatacgtgtgtacaattacaatacgatggataaggtcaaggtttttgaagctcatacggattacatcaggtgtgtggctgttcacccaacccagccttttgtgctgtcatcatctgatgacatgctgatcaagctttgggattgggataagggttggatgtgcactcaaatcttcgaggggcattctcactatgttatgcaagtcacatttaacccgaaagataccaatacttttgctagtgcttcccttgatcgcacagtaaaggtttgtgattttg

SEQ ID NO: 6114 - DNA, 1095 bp, Oryza sativa
taaattttggtcctaccaaaattcgcaccaagataaaaagtgcaaaccctgcaataacttaatttgtatttcacattatgaatagcagagcacatatacgacatcgtcaaaataatagccagcactggtatatggataatggtcagaattattgcaggacattaagaactccatcttctatatgtgcgcttgaaatgaaaaaccttcgacatgaaaaaatagttaacctttaacctagtacagatcaattaccaaaatatttgatttttactatctagacagactcaagttcctcaaaaagctaagatgatgtgctgcttggttgctgactcagtgactctagtagtctagtttcatacaacagtagcagagctcataaaaaacaacacagtaaaacaatatgccaagacactaaaatggattggaaaacaagaagatgtagaggaggggctgcaagaagttaccaatgaaactgatcttgctaatctggcaatccccaagcagacctgctttgtggctgaccatgtcgttaattcacattcactgccttgcaaagcgtgggcaccactatggctgcaacagtcatggtcgtcccttgggagcagggacagctgggccctgccgacggcgccggcaccccttgcagcggccaagcctgcagtaccagccgatgccctcgccagcacaggaagaccatgcgagcagcccatattcgtggagttgaacggtacaaaagctccctgcagtcctgaacctagggacgaacatggagttgagcaagctgactaattatgtttcaattaagcccgagcaaaactataaaacaaaaccacactgcaatatgagaaaaaactacagagttaagcgtagaagtatcaagcggcgtgcctatgttatgtttccagggatcctttgggaccctggctaaattattaaattctagctaaagtacgccatgttaactactataccggtaaatagttacataattcgtatgtattggactcttggtattttttgttctgagttcatcactgaaaatatctattagcacaatgcgagcacgtggaaactgtcggcactacatgacgacca

SEQ ID NO: 6115 - DNA, 667 bp, Oryza sativa
atatcgagtagaaggggcttcgatagccatcatcagtcatgtgcttccaaaatggatatttcataatcttgaattctaaattgaaaattggaagtaccttatcgaaatgttaattggtcatgccatcatagttccacagtgtttcttattatccttcttgtgcctgtgatgagactttgttctgttcattaatgccggtggctgtgcaattgagggttgtgaaccctcttcaaagctttctgacgaatctttcttcgaaggaggggatgcaatattgacatctgaggatatagtttgaagtggtgactatcctttgctttaccactcagttcgatatggaaattccagctagaaaatcgatggtcttgctcctggagactttctttgatctgcatttgctgagatagtgaacacttacgggccaaaaggaattagagcatttgatgtccttgtgcaagaagaaaatgcaaacacagtattcatgagactcttaattttgtatcacaatttattttcaggtttagctaaacaatttgacttttgattgatgcacagattttgtctgaatttgatgtgtatgcagtggttggactggtaacagaccccttcatatgcgtgatattagggtgacagttgagagtaacggcacctttgtcataaacttcaa

SEQ ID NO: 6116 - DNA, 6227 bp, Oryza sativa
agctcgggcacttgggacaaatcagctacctcaacctgagcatcaactctcttgaaggccacattccagatgaactgtctttgtgcagcaaactcaaggtactcagcttatgcaacaactccctccaaggtgagataccaccaagcttaacacaatgcactcacctccagcaagttgtgctttgcaataataagctccaaggcagaattcccaccaaatttgggatgctgcatgaattgaaaactttggatctctccaacaacgccctcacaggtgacataccaccattgttgggcagtagcccatcttttgtatatgttgatcttgggggcaatcagctcacaggaggaatcccggagttcttggcaaatagctcatcccttcaagtgcttagtctcaagcaaaataatcttacaggggggatcccactatccctcttcaacagctccacgttgacaaccatttaccttaaccgtaacaacttagtgggttccataccacctattacagcagttgctgcacctattcaataccttagtctagcacagaataaactaacaggagggataccagcttcactgggaaacctttcttccatggttcttttatctctaggagcaaatagcttggtggggagcattcctgagagcctaagtaaaatccaaaccctagagaggctagttcttacatataacaagttgtctggtaatgtgccacagaacattttcaacatgacatctttgaaatatcttggaatggccaataactcactcatcggccgactaccaccagatataggcaacaggcttccaaaccttgaaaccttgatcctatcaacaacacagttaaatgggccgatcccagcttctcttgccaatatgtccaaactagaaatgatttatcttactgctactgggctcaccggtgtagtgccgtcttttgggtccttgccaaacttgcaggaccttgatcttgcatacaaccagcttgaagcaggggactggagcttcctctcatcccttgcaaactgcactcaactgaaaaagttggccttggatggcaatattctccgaggaagcttgcctagctcagtcggtaatcttccctcacagctcaactggttgtttctcaagcaaaacaaactttctgggacaattccatcagagattggtaacctaaagagtctcactgttatgtatatggataacaatatgtttagtgggagcatcccacctaccattggaaatcttagcaacttactggttctaagctttgcacaaaataacctctctggccatattccagattctattggcagcctttcccaactaaccgagttttatatagatgggaacaacttgaatgggagtatacctgcaaacatagggcagtggagacaattagaaaagcttgatctctctcacaatttcttcggtggaagccttccaagtgaggtcttcaacatttcttccctatcaaaaagtttagatttgtcacataatttgtttactgggcccataccactagaaattggcaacctcataaatcttggaagtatcagtatttcaaacaatcgcttgaacggcgaaataccgtccactctagggaaatgcgtgcttttggaataccttcacatggaagggaaccttcttactggaagcattccacaatctttcatgaacttaaaaagcatcaaggagctggatctctctcgtaacagcttgtcaggaaaagttccagagttcctcactctcttaagttctttgcagaaactcaacctttcattcaatgattttgaaggggcaataccatcaaatggtgtctttggtaatgctagcagggttatcttgggtgggaactacaggttgtgtgcgaatgctccagggtatggcctgcccttttgccctgaatcaggatcacaaagtaaaagcaagtctactgttttgaaaatagtaattccaatcgtagtgtctgctgttgtaatttcattgttatgtttaacggttgttctcatgaagagaagaaaagaagaaccaaatttgcagcactccagtgtgaacttgaggaaaatatcatatgaagatattgccaaagcgacagatgggttctctgccacaaatttggttggtttgggatcctttggggctgtttacaagggccttctggcatttgaggacaacccagttgctattaagattttcaatctcaacaagtacggagcacccacaagcttcaatgcggagtgcgaggcattaagatatattcgccatcgaaatcttgtcaaaatcattactttatgctctacggttgatccaaatggctatgattttaaagcacttgtctttcagtatatgccaaatggaagtctagaaatgtggctacatccagaggaccatggccttggtaagcagagattcctaactttgggtgaaaggattagcttagccttggacattgcatacgctatagattatcttcacaaccagtgtgtatccccactaatacattgtgacatcaaaccaagcaatgttcttttggatcttgaaatgactgcatatgtcagtgactttgggttggcaagatttatgtgtgctaattcaacagcagagcctagtaactctacaagtttggctgacttaaaaggatccataggatatattgcaccaggtgagagaaattggaaacttatactgatttattgacttgtatgcttcagccatcctattaacttatccaatgttacatggattgtagttttccacaattcacctttcttatgttttcaaatgaaaatgcagagtacggaatgggtgggcaaatatcaacgaagggtgatgtctacagctatggagtactgttgttagagatattaactggaaagcgtccaaccgatgaaaaattcaatgatggtttgagcctccacgatcgcgtggatgctgcattaccccacagggtaaccgaggttttagaccccaatatgctacacaatgatttggatggtggaaactccgaactgatgcaaagttgtgtcctcccactggttaaggtggcgctcatgtgctccatagcatcaccgaaggacaggttagggatggcacaggtttccactgaaataaactccatcaagcaagcatttgttgatctttccagtggaggaaaaatggtttgagtaataattagacctaggcagtacatttgacactccatcaagcaagcatttctagctaagtttgccttttttttcttatttttccttcctgaaattagtgcaaagactgcaaagctgttctgcattgcaactattatgtacagctactttcattaccataattaagtccacacagaatcaacctcttggtcctaaaacttgtttgggtcagcagcaaatgcaatggtcagcaaacaacagacagcaggctggaacacaccaaaatattgttctaacttaaaaaaccaataattctgcagtggttaatcagcagcacaactcacaacatgcaggcataaggatatgcatagagcaaaatgggcacacatgtgcgtgcgtgcgtaagtactgcgtgctactcccacagaggcatttccacaaacatgccacgcgcattcaaaggaaacacaggaaattgagattacagttacaggcacacgcaaggtcagaaaagcagtaccatcctgacctcagaggacggcgccggacctgggaaaccgccatcgcggcgcctgcagtactggcttgctcgccgtcgccgtcgccgtcgcccatcgcgtcttcagcggcggcagcgtgacagactcggcgcagccattagagtcgacgccctcggaggatttggagactgggatagagatcggattaatttgattcatgccattataaatatattgaattagaataataccattactttttttttgctcttttctctttttttgcgatattttttctgttttctgatatcacctttctgcgtttttttcttttttatattatttttcaacagaaacaggccaatgatctcaaatagagacttaaatgtaaatataaatattatagggactgaaatacaaaagtcaataggaaatcctaccaaccgagcaactccaaaaccgctcgatgaaaacttctccaaaccataaaaacggaaacccggcgatggttagttcgattttttaagtcccaacaacaatcgacatgatgcaaaactacatccaaaactgacatacaactcacacgacttaactaatgaaccctaaacccgaattgacgaagagatgaaatactcaaaactaaaaaaaataaatctaaaactaaactagtactcgacacgacatgcaacataaaattcaataaagcaaaatctaatagaacaattcaatggctcaaaatttctaggtaatggatgcaataattttgtgtgaaagttttatagttataggtatatataaaagaaactaataatcttaaagaaggtatacctaacaagcaatttgtgctctgatactaactaaggacctaggtctcgatctttcgataggtgctgataactctcgatttggtggaaactagacacacgatccggcttccaatcaacacaatctgaaccctgcaattgcattaccatgtctcctttggtaatcaaccgtgcgctgctcggttgacctcgctgagaaggctaatcccttcatatgaatcataaaacacaagcaaaaacaaggtagattgcaactcaatttgtagataaatgattaagatctcaaggttggggttccacaaaccgaactagcggcgaaactgtaatggcaaaaatagtctaagcaaaacctaaccctaattcgatgacgctactgaataaatagcttatagggtcatccttgggttgtcctagggtacacaaccccttgggtttagccaacgacacaattacaagggtcaaagccaaatcagactcggactagatgaggtacatggtttattttgcatattcccgatagcccatgaggaattttgaggtgggggtggaggtggaggtggtaggggtaggggaaggggaagaggaagagctggagggagggaaggttcgtggtttggctcaagtgcaagtggtggaggtggcaggggtaggggaagagctagagggaggctagctgatcgtgtgttctttggttgatcatgtaatatgttcctactatttagtgcatgtttgtgtgatgttggacctgatggtgtgcctgtatgtgtgatgttggacctgatggtatgcttccgttggatttggtggtgtggttttgttgggcctattgatgtgtttatgttggactgttttattgttgcatgttgttggacactagtaatcgtgcacgtgcaatgcacgttatgttcaaaatataaattaaacccaatatattgtaaccaaaataatttcacataaaagttttcattttgtggggttacacaagttttaataaaatgatgtgcaactctcctgacaagaaaatatatgtgatttgtagctccttttctacactgcagtaactaataaaatatcccaacaaattaacagagcagaacgacaagatacatgtcattgaccaatagaataaaggggcaggaatgtcaaataccacaaatcttcatgtctcaaaatttttgttgccagccgtgaaccagttaataacttaatatacttgaaattgcagcaaatacttatgtaccactttgaatcttaaatgttccacttcatcatgtttgtaaaaataatttattttaggcccctatagcataaataagcaagatatatgaggctttaagagcgacaaaaaaaaaccaaaaacttcaaaggatcatttcttaatctcaaatgatccttctattgaagcattttcttgaacatgaaaaaaaaaccaagaaaaatactacatgggcaacccagattcaataccagaaagtggttgtattatttacatctcacaagcaatcctttggagtggcttcctgccatgttggcataccttgcccctgaacagatttgatacaccaccatagttcgggggaggggggggaggggggttatcaattggagtgacactctcatctcacttctatcaagtatcaacagtacagatctaactctttagaacatgaaacaactttaaatttaaccagacatacaatgatttttccttattagttcaatccagtacctcaaacaacttccattataatttgc

SEQ ID NO: 6117 - DNA, 5891 bp, Oryza sativa
atcgcaaggtgaaccggtttgacattcacaatggtggcgcaccgtgcgctggatctgcacatgacggagttgaggaagatccgatgacgaagtgcaccaggtgacagacctccacctttggggccgggtggaacagatcggcgaggcggccacaagttgaaaattatagtcagtacaggttgtggtcatgtatttactgagaatcctaaatattaaacatgttgttacaagcatttctccaggtggaacagatcagcgaggcagccacaagttgaaaaatatagtctgtacaggttgtggtcaggtatttactgagaatcctaaatattatacatgttgttacaagcatgtggtcaggtataccaactgtagttcacatccttgttcaattcattatatcaaacaaattctctaggtgcgataacgagatcaactatccactactgtaaataatctatattataatgtaatcatccatcaatttgccaatgatgccggtgacaagtaaaagatttattaatgcagccaaaatttaactgtgtaaattaatttggctagcatcaaatagaacataaaaaattatttatcaaagatttatttatggaattaattaattatgaacataaaaaacaagttagcataaaatagaacaccaacaattttggaatgactaatttgaacaggaaatacccctctttactctgaagtagaatatggattctatttcacagtaaacttggcaataatatatacatggatagaaatattatgaatcaacagtgatataaagtccgctccctttccttcgtaccatgtgcaattaagaatgtggtatcacattatgacaataacccagtgattgcaatttcggttcaaaatttcagaaatttctgaatgctcggttcgaaattttcggcagattttctcaattctttgttgaaatttctcaaagtttattcaaattctaaaaaaaatcaatccaaaaagttctgaaaatcaaaaaatttcataaattttggtcctaccaaaattcgcaccaagataaaaagtgcaaaccctgcaataacttaatttgtatttcaaattatgaatagcagagcacatatacgacatcatcaaaataatagccagcactggtatatggataatggtcagaattattgcaggacattaagaactatatgtgcgcttgaaatgaaaaaccttcgacatgaaaaaatagttaacctttaacctagtacagatcaattaccaaaatatttgatttttacaatctagacagactcgagttcctcaaaaagctaagatgatgtgctgcttggttgctgactcagtgactctagtagtctagtttcatacaacagtagcagagctcataaaaaacaacacagtaaaacaatatgccaagacacttgaatggattggaaaacaagacgatgtagaggaggggctgcaagaagttaccaatgaaactgatcttgctaatctggcaatccccaagcagacctgctttgtggctgaccatgtcgttaattcacattcactgccttgcaaatcgtgggcaccactatggctgcaacagtcatggtcgtcccttgggagcagggacagctgggccctgccaacggcgccggcaccccttgcagcggccaagcctgcagtaccagccgatgccctcgccagcacaggaagaccatgcgagcagcccatattcatggagttggacagtacaacagctccctgcagtcctgcacctagggacatggagttgagcaagctgactaattatgtttcaattaagcccgagcaaaactataaaacaaaaccacactgcaatatgaaaaaaactacggagttaagcgtagaagtatcaagcggcgtgcctatgttatgtttccagggatcctttgggaccctgggtaaattagtaaattctagctaaagtacgccatgttaactactataccggtaaatagttacataattcatatgtattggactcttggtattttttgagttcatcactgaaaatatctattagcacaatgcaagcacgtggaaactgtcggcagtacacgacgaccaacattcatggtactaagtgaaagcatcataatacagagaatatcagaagaggcacctttggtctcctcgacaatattatgaagtttctttctcttgggcatctcttcatagtacttcagtttaagatcttcacactgcacaactgcagcaaaaaaaaacaaaatgtttacaaactttttcatcaaatactctaaaacctttacaataatgcaactgatggatattacctaatgcttgaacagcccctaccatcttactcagttcaggaacagcgtttgcatggccatgtgcttcaagagatagcaatgtttgctcttgtttcatgacctgaaaattaaaaagtgatataatcagtaaaacatagcacctaatgtatttatcaattcagtaaatctgcttttaccttgattttattttccaagttagatatggcagctgcccataatttattggcattttcatacttttgggaaacacttctcagttgatcagcttgtctatcaaggacttgttctgtcaggaacgtaaaacagtggtgagcatacagaaacatcttatctgaaaattagaccttgaaggagtaagttgaatctaatatattgtgtcttacctgctattgctaccgttttcgaatacaaatggcacaaaccatgggactttcccttactcctttgaagtttatgacaaaggtgccattactctcaactgtcaccctaatatcatgcatatgaaggggtctgttacctcccaccactgcatacacatcaaattcagacaaaatctgtgcatcaatcaaaagtcaaattgtttagctaaacctgaaagtaaattgtgatacaaaattaagagtctcatgaatactgtgtttgcattttcttcttgcacaaggacatcaaatgccctaattccttttggcccgtaagtgttcactatctcagcaaatgcagatgatagaaatagtctccaggagcaagaccatcgattttctagctggaatttccatatcgaactgagtggtaaagcaagggatagtcaccacttcaaattatatcctcagatgtcaatattgcatcccctccttcgaagaaagattcgtcagaaagctttgaagagggttcacaaccctcaattgcacagccaccggcattaatgaacagaacaaagtctcatcacaggcacaagaaggataataagaaacattgtggaactatgatggcatgaccaattaacatttcgataaggtacttccaattttcaatttagaattcaagattatgaaatatccattttggaagcacatgactgatgatggctatcgaagccccttctactcgatattactacagcaccacaattgatgaaaccttgtactctgacatagaaacaatcctattttcttcaaccaatccaatgcccatgactttagtactatatggtgtattattcattcactttgagagcatcaaatgaggccagcacactgatccacttaaaaatagtagctaacatggcagagaatcaagtcaatgaagaacccacaattttaagaagagaaacattactctatcaaatattcaaatctactccaaagaacctaaatcgacgcataaaagttagagcagtatgcaaatgattccacatatagatgattcctgttacatggagataccttattaagctcctagcataccacaacacctgaaggcctcaaaattgggattacaactttggaaccgatgtaggtaaagcaccagaaaataccaaatctgggtacatccaacctcctaaatttcctctgccacatgcgcacacgcacacacacaagaaaaataagagcaaatttggaagcaaactttctagggttttctaccagagccaaatcgagtactccaattcgaccatcctaaacgctcatttcccaaaaaccctttcacgaacatggtgggagggttaggatttaggaatagatcctcacctagctgctagaaccaccattgctgatcaaatgcacatagatttgcaggaatcccaccgcgggaagagggagagaggaggggacgactccgccgccgccaccgccgccgccgccgcggcgccggcgcagggccaggtggtggccgcctccgcctcgctaggattcgcggcgtgaggaggagaggagagtgagagagaggaaaaggttttttctttctttttttttttgacgggagaaaatatgaccgttttttttttgacgggagaaaatattaccgttgctttgagaggatagtgatagagaggaaaaggttttttctttcttttttttgacgggagaaaatatgaccgtttttttttacgggagaaaatatgaccgttgctttaagaggagagtgagagagatgaaaaaggttttttctttcttttttttatgaggactagaaagaaaatatgaccgttgctttaagaggagagtgagagagaggaaaaggttttttttaataggactagaaaatatgcccgttgcaacggattcattagaaactaaatatttagctacttaagaaatctaggatgtttttctcagttgttcctctgaaggtcctttgtcggtcatatatgtgcgatgtgtgtagagggaccgggtagtacagtccgacagagtctgcaaccggaccattccgaaattctcaacttgagcacgaaggtgaaagaactttaatttgtcagcaaattggaccctaaatccattcaaataaaatcattagatagatccacgggatttcaccataaagaaatagataaattgaagctaaaattgtgcatgagtgcgagtgacaagagtgtacgacaacttatgtcgagacagcttcggccaagtagaacttgtccgccaccgcaactgcatattgcagtctttcacttggttatctgtctcacacaccaccgctatcgcaggcccatggcagtcgtgctagtagcgccatcatcagcgaggtgcaccgcacggatctcctaggccactcgacgtgggtgatgtaagcggatatgcggggaactgattgagcagggctgcggtttgcgagggactcgactggtgtttgatactaatgaaaatgaatattaagtaagggcatgaaaaacaagaagctattagcatatgattaattaagttttaattattgcaaatttgaaaaatgaatttatttgatattttataccaacttctatatagaaagttttcacacgaaacatgccattgcccatttagtagtttgaaaagtgtgctaatagaaaccaaggtgaaatttgcatctaaatgaaaaaagaaccggctattgctgtgtcagtgtgttatcctgatatattttgtcgtggattgatcgagtattcaatcaagtttcatacgtattttgttaccgtcgctacaatagaaaccatctttcgtagcaacacccttttattcgtactggcggatttaataaatgcgcgcttgtaaatatacttaagacggattgcggtcaccaactttcgctggcggccacttaagatatttttacaagcggatctcttaagcgactgccagcgctggcggtcactaaagagcaccgcctttaaaatcggccgtggtgcattaaaaaaccacgcatagcaaatatcctcagatccactcctcattctcctctcctcagatcgacacctctcctcttctcctccctcactaacgcaccaccgcctcactcctctcctcccttcccaccggcggcgggtccaatggcggcggctccggcgacgacaaaggggaggggtggtggcggtgaccggtggcg

SEQ ID NO: 6118 - DNA, 1925 bp, Oryza sativa
attttttttctcctttatttttcgttgacgaaagccagcagaaatgaaaaatgggtgagcagtgagctcatttattgtacaaaggaaaggaaaaaaaggggttgctttcctctaattttaaatttgatttatcatatttgcaatagcgtccaaggaccaagaccataaaacattcccttccttttttaaatgaggataacctaaaaaaaatgtcattgacaagcgtccaaatacaaaaaaatatcatcgataagtgtgagttctaaaaaataccattgtacaaacaattttatcaaaaatgtcatcgtcattatgattcctttcattccgctatgttaagtgtaataggacgaacaatgtatttaacagcgtagaatagacggaattttaacggtgatggtatttttaggataaaatcgtttgttcgatggtatttttttaaaacccacacgttgatggtatttcttagatttaaacgttcgtcaatggcattttttaattatctcttaattaaacctcatcaatcaaagtgttgtgttaagcatacatgtggatatgcaacgatgtccacatgcacgatcaaacagacatgtaactacagcatttactcctacacacatggataaatagacatgcaactattgcatttacttctgcataaataaacaaatagacaggttagatgatgatcaatttgaaaagatctcttaagagtgtggtcagaaggaggggttgggtacgtattattgcacaattaattaaatattagctattttttaaaaaaatagattaatatgattttttaaaacaactttcgtatagaatttttttaaaaaaacacaccatttagcagtttaaaaaacgtacacgcggaaaacaagataggtgagttaggaaaactgagataagaactctgtgcaaaggattaaaatgggatggagtactgctgtgcgcagtttcggtttccaattatggccaaacagagattatgacgagtgggaccctggataaggtgtcgcaggcgtggtggttggtggggccaggtccaatattttgttttttttttgcgaatattgggcctcattgggaccgttgcatgagtagaccatcttcttattctacatgggccaccgcataacccactaactaagtttcctgcaaagtgagctgtagccccgtgcactgtgccggcccatctcgtgtcagatggggccgtcagtcacgtgtacatccgaaagcgaattttttttatttttaatttttttattaaaagttttacaaaaataatttttcattttgaaaattgacagaagtggtcgcctaccgccctctgggagggcgatttttaaaaatcgccatcccagagggcggcgaaagtgacgtggcagacggccgttcgctctcgggcgacggccgtcaacgaaatttgcaggcggcccccttgccgccctccgctagggcgattttgtactgtgcggggggccgcctgcaaatgggcggcgagggggcctggaattttgcaggcggcccccttgccgccctgggggagggcgattttatactgtgctttatattttttataaatatcaatagttatcaaaattttttatattgaaaactatataagattaaaatctccaagactggtaaaatacaattttattattttttagggcctatttggaatgttaccgtacaaatattttgttagtgccaaaatataagcaagttttggcactaccaaatatttggtaaggtaaaattgcatttgatcatatttggtttgctgccaaaatgtaaaattgtagtgaagaatgttctacataatctcaaatctagattacgtattaccaatgaataggcttcaatcgaaatcaaacacaagtactattcaaattaccaaaatattggtagggcatgttttt

SEQ ID NO: 6119 - DNA, 20166 bp, Oryza sativa
ctcagggaagattcctcaataagggggtgaaaggggtaaaaatcaacaaaggattacgccccatttaaaaatggaccttcggttccttcgtagttcaccatgtttcatttatcttctttgatggggttataaatctggccgattcttaatcctttattggatggtaccttcgaaccttttccaaaacctttgtattaattttattgtggtgcttaaacttcccattattttcttacacttgaattttcccatattggattccccttttgggtttgtgcataggcttatctttatgcaacttgccttgattcaggcttcgttggagtcaagctccaagcctttgccattgcccattggcatcacaagtagcctaagggtgtgttcggacttccaggttcccaacccctcttcctcgttttccgcgcgcacgtttttcaaactgctaaacgtatgaaagttgcttaaaaaaacaaattaatccatttttgaaaaaaatagctaatacttaatttatcacgtgctaatgaaccgctccgttttccgtgcgctgagataggttcccaacttcctccagcgaacacactctaaggaggactcaatcattttctatactctttttaagtcatgttctgcaaaatgctgataaaaggtgtaatttgctcattcttgtggggcttcttttgcaaaatgggatgagtgaacgcactgttaccacccatgtattttgtttatagtctttataaaaaaaaacaaatgcacgagtttaagaaaatctacaaagaatgaatctaaccaactgacctacacgactttggtcaagattttatttaaattcatgataagatcatggaactacctatatttcagtctacataattctcaaccaaaatcagtccatttttattcttcatggttcacaacaaactattatatagaaataatatcatgcattaaaaacataagaagttgtaaaatcataccatcaaactataatcaatagaaaagttcccaagtaattaacttaaaaaatcagtaaaatattccaagagctaaaacacaataagtgtttctatcaatccaaaatcctccattaaagagttataaaggacacctttcccaatactttcccaggagatagtgaggacacctcgcctgcatgtagggctgtcgagctcgagcgagctcgtctacccaagctcgagctcgacacaagctcgagccgagcctattacaccttcgagcttttaggaaagttcggttcgagcttgttcgtgctcggccacaagtagtataatatagtagtatattttaattatcatttctggataaatataattattttctatttgatcactctaataaaagagtagaaaaggactaagataaatatattatactaacacatgctaatttattgtctaaatatatactaatataaattgatatattagtttattaaattaataggaagaataaacaatatgaactatacacagtcaagttcggtagaagttcgagctctattcggtaaagcttgcaggcttttgctcaggctcggatttggctcgtttggagctcgagcctaggacgagtctagcttgagctgctcgcaagccttgagcttttttttttgacagccctacctagatgacacatatcccattagatcagatatatttttctattttgattagaggagatggttccgaaatcacatcttatagttacggtaatatagctttgttattcacatgagaaatgatctttcggacaccatcgtctgatttttggtatatacagttagtcatgaagcgctgcaagtgttagcacctatattctatatatactttcctgcaatttatttaccaaccgtctgtttgcatgtgtgggacataatcttattgttaataacatagtaagatgctaattgcatgagtaccttactgctagtcatgcccttcattggaaacatattatgatataacgaaaagttaaccttgcaaataatactcgttgttagttttttttttcttgaagaacaatcatatatattggccatgactgcatgatccaattgttaaaatgcaatccgatttttcccaatttctcctatgccactagattcaagtgtgagtgtgtgacttacagaaatgtcaacttgatgttataattaacagctcaggcggttggatgttgaaaaaaaaatcatccaaaaaaccctttattccttttcacatatgaataaggtgttagattgatctcttgccaccgagtcagagaattgcgctaatgggcttgcccacccacgcccacacgtacctaacgatgaggactgattccctcggtcctgagcgcacgttgctctctatcgcgcgatgatcggacgcgctatctacgtaacgtcgcccccgatcccctcaacgcacacacaattatctttttttttctttatgcaagaaacattatactttaggacggtagatagcactatacctcatacctcatctttttcttaaattaccctaacaaacctttttcttaattttttatcattattttcataggtcggaagcacctacggctaatttaattatcgagatttaaactacatgaaacatttcatgaagaatcttgaaaatgttttttttaacatagattaattatgttgtcaatatggatatacaaaatttgaacgtaaattttatattgggaaaaaaaatcaaacaatgctgcacggaagcaaagtggagccactttatttagtttaaactccagtggtaaaaaagctcaaaaattgtcaagctaaattacatagacttgcatagttacatagtgcgtgcatctccttgcgaaaatggttagcgaaaactgtctagagagattcacaagtttaaaattaattagagagtaagctcatcaaaataagagaatcaatcgacccactgaccactatgtagtagttgaacctaacaaaacaatgtgaacggtcaatttcgttatacataagtaccacaactatttgtttttctccgatatctcatatggcacatgtgatttcaaagagagatatatctgcaaatcaaaattacatctccagcttcacctttatggtgtggaagaagctaactaaataacctcatgctttgatggagcataccagccagctactctgctcatctaagttgtgcctaacgttcatgatcactacgttgatgtctatctatggccaactctcacatctttcaggatgtgtaaccttttttcaggtagctagaatatacgaagtagaacgaagtgtgtgccactctcaaatgcagacagacggttggacatgggtgatgatgcgatttgtctagttatgtcttctgccggctataacatggaggccgctcacatatccagttcgtgccctgttactaaatactgacctcccataagtgataagtttgtcatttgtcattgataactgccggctataccatcaaggtgacctaaagattggattactaagaaaatatggactaacaaaatggaaaaacacatgccggtcaaaaaaaattaaggtggactaggtatccataaccttaatatcaaaaatagatgcttgtgaagcaaatgactttctagttggttaatggtggaggtgtatgacaagactttttacgaaataataaatacatgaaggataaacttctctctatatgtctagcaacacaggtatttttttagtcctggaccggtctaattaaagttaaagatcaatttctaatatttgggtcttttagatgtggcaatgagacaaacataagattttggaaagacacgtggttgggattgcgtactttcaaagttcaataccctactttatataatgtgactcgaagtctactgccgcagaggttatgaccacaatgctgttgaatatttttttggagagccattgttggctaaagctaattgagtggaatggtttgattcttaggctagctaatataactgtcaaatgaaaaatactgctttgttggtagctccataagaacttatggccaattttcagtctctaatgttaggatccaaatgaatattctatgggactttatatggtttctttacaagaaagtaattctaacgaaggataacctgactaaaagaaaatgggggcagacaaacattgttccttctgccatgcacaagagataatccaaatcttttctttgagtgtcatattgcccagttttttttggagatgtgtgttttttttcttttaatatgcctctaccccgtaacacaaaaaatatttttggtaattggcttaaaggggtatctacgtctataaaaaagatgattataattggagctaatgatgtatatcggtcaatttagtgtcgttgtaatgatcaagtttttaattgtaaataattatctaaccctatgcaggttattttcatgtctttctattgtcttaatttttggtctacgatgctacaataggggaagcatgatacaatgtgcaatggtgctatacttttggtatcggtagctaatggtctcttattctattataggtgacttagtttcattagaattgctagctaataaaatatatgtggtttaactctagtcaataataaaggagagttagggatttgtcccatcaccttatgttttatttttacctttaccttttttttttaacaaacttatgcctatatatcttatgacaaaaatcgaaggtgtaatacattttcattattaaaaaaaataacatcaaaggctgctcacggctcacctcgccagttcatgcgctgttactaaatgaatattggcatccaaaaagtttgtaattttttactcaatacccaactgcttggatggagactactcacctgcgctgccctgtttgtttggctccgacatctataaggccaaataggccacctggctcggcacgacccatgcacgaccaggcctgggccgaggtcagtcggccggcacggtccgacctacacgtggggccagtccgtgcttgtccacgggctgcacccacggtccaataagactcgggccgtgccgggctggtccaaaggcacgacaacttatcgtgcttttctatagaataagtctatttttcctctctcatctctttggatggtgtcttatatggttggataagtctattttgtatctctcttttctttgggccgtgcattttatagctgaattaagtttattttggtcccttaactatttttcttgatcgcgtcgggctgggccggcccaccgtgctaaggctcggctcaggcatagcccaactgttggcatgggcccgacaccagtcataccgtgccatgtttgagcctggctctcgagccttatggccatctatgccgacatcttatctcactggatagaggaaacactcgtagctagcttaccttctggcttcatgaacaaaagatcgatcagatcaaagaaacgcttcccctcgagacttctatcataattgctacttcaatgccatctctttctacttcaattgcggtagacaccgcctgatctagatatcttcatagttcatcgtcaatccagttgcctcagggttttggctaacttagctgcatgtaaaaaaagaaacgtaataagcatatagttaattgaatattaattattaataaaaaattaaaataattctttaaagcatcttttatctacctctataaccgtgacgccgacgccatggcgtcatcacgcgcgtatacgcctaaaccgcggttgcccgcgtggctcgacgccacaaaaataccaactccgtcgtctatgtcaactttagtagcattgcatgcaagacgcccaagtacttgttcaaggtcggccatggcctagaggacaccggcaagccatttctatgggtagtgaagaagtcggaggtagctgcgtggaaacgagccgagccgtaaagtaaaataatcgatataaaaagatggtggtctaggctccgaaacaagcggctcacaagccagcttgggctcggctcatttcagcaacgagctgaaaaggaggcttggggttgtctcgtttggcttacgagccgagccaagcccgagctgagctcatgagcctgagccttttttccatcactgcatcgaaggtagaagaatggatgtcggccctagagatgtttgggatgacactcaccacatgtaagttgggtccgcgtgctcacgtcttactttctgtacccaataaaaggaggaagaaacagagaaaatgttgcaagtggcatacactcgccacacgcaagttaggcctgcgtgctcacgtattactttctctacgcaataaaaggaggaagaaacaaagaaaaaaaatggcaaaatttgttacaggacacgtaaaaaacgtgtaattagctgaggaacaccgcaaaattatgacactgccctaggatactacaaaatttgtgtaatttgttgaggcacaccgaacgcattattttatcatttcccggctgaaagtggcgatatttttttgaaatgcctagattgcccccgcgtcactccaccgaacgaaaaatccccagtccctaaccctagcttgcgacggcgacggtggcggaggaggcttcggcggcgcatgctaacgcggtgatggaggaccaggcgtaggtcatggcgtcacccagcgacacgcttgccggcgtctatgatggccatggcggccccgacgcctcccgctttcttcgctcccgcctcttccctttcgtccatggtgcgtgcgctcgccggcgcgtgcgcggcggagctccatcttttactttgatttgttaaggttctgagaatctttagttgatttgttggcgccaaaaattgaacagagttcgcggcgttgtgcaacggcgtggtggacgctgacgtgattaggaaggcgttcctggcggccgacgaggagtactagcagctgttgcggtggtcactgccgaacatgtcccgcgcggccgcctcgggctcctgctgcctcctgggcgccatctccggcaacatgctctacgtcaccaacgccggcgactcctgcaccgtcctcggccgccgcgcggcagccgattagaccgtctccgagcggctctctactgagcacaacgtggcctcggaggaggtccggagggagctcgccgcgctccaccccgacaacggcgaggtcgtggtccacgcccgcggcacgtggagggtgaaggggatcgtccaggtggcgcgtgccatcggcgacgtgtacctcaagacgccggagttcaagcacgacccagcggtgtagcggctttgtagctgctgtgctggcagcgccgccgccgtcgagctggggcaacatatagtatagagggtaacgcaggggcaatctgggcatttagaaaaaaaatatctgtcacttttaaccgggacatgataaaaataatatgttcggtgtccctcagcaaattactcaaattttgtagtgttctagagtaatatcatggtttttcggtgtctctcaactatttacatgtttttttacgtgtcctatagcaaattttgcaaaaaaaataaaaatcctgtgtttatcgtgttcactgtgattgtttgtgctcttctccttcgcgtccaagctcgtgtgtgttgcatggtttcgctacaaccgccgggtttcgctgacagctgcccttttcaatggggaagttgtactactccctccataccctaatataagagattttaacattttaattgcactgtttaatcattcgtcttattttaaaattttttggtattattatttattttatttatgacttactttattatccaaagtattttcagcacaacttttcattttttatatttgcacaaattttttaaataagacgagtgatcaaacagtgcaagcaaattaaaatcccttgtattaaggaaaggagggagtagtaattttcgttggcattagttatttaaggcttgttcactttgctaccatttttaactttacattttttttgataaagttatcgaaaaagtggctatatttagtttgttgctaaattttagtaagtacatatgaaatcttaccaaaattttgataaccttactaaaatttagaaaaatggtagcaaagtgaataagctttactttcatagatgcatgcatttttgctggctgcagagaattcatcatgcacatcaattgagtcacccgtcattctatttggatttggggtgtgtttagttctttgagtgtaaatttttttaagtatacggatacacatttgaagtattaaatatatactaataacaaaacaaattacagattccgcctgtaaaccgcgagacgaatttattaagcctaattaatccgtcattagcaaatgtttactttagcatcacattgtcaaatcatgatgtaattagactcaaaagatccgtatcacaacttacatccaaactgtgcaattagtttttttttctcacatttagtgtctatgcatgtgtccaaatatttaatgtgatgtttttggccaaaattttttaatctaaacaaggccttgacggcgtctcaccttcattgcttcatccaaatggtcaccttgaaattaatgttgaccacattcaattcatgcacgtagtactactctatccgtcaaaaaaaaaaggcaaaccctgagtttccgtgtctaactttgactgtccgtcttatatgaaattcttttataattcttatttttattgttgttagatgataaaacataattaatattttatgcgtgacttgtctttttaatttttttcataattttttcaaataagacggacggtcaaatattgggtacagaaaccaggatttgtctttttttttttgacggagggagtaggttctagcaagtctgccagtcctgccactagctaacggagtacagtgacaaattttagatgtactccatattaatctaaaattaatgcacttgtacaaaactagaacatgaatatatttctttttaacagaacccccaacaaaggaactcctgcaccatccgtcatccacaaccatatatttttaataaaagttaaacgacacaagatatgaaaaaaacagaaaacaaattcccgataataagttactggtaaaatgaaaacaataaatttgtaaatcataatagtagtataactcggtgaccaaaatatcaatcttataccctccttccctaaatgtttgacgccgctgactttttaaaatatgtttaaccgttcatcttattcaaaaacttttgtgaatattattaaaaaacttgagtagtagtagtatatttaacaatgaattaaatgataggaaaataattaataattgtttaaattttttaataagacgaacggtcaaatatgtttaaaaaagtctaacgacgtcgaatatttagtgacggagggagtatatgggtctattgatatagtatcgcgatgacacaccgatggacacgttggagcaacaacgataatgtagtgcgcctaacaaaaaaaagtttagaagagagcgaaaatgtagtgagggcaagttttataataggtgactaccatatctaattttatgcatgacatatataattaaattaagatgtgatatgtataataggttacctctaccacacaatctccaatttctttaacactctcacatatttattgaagtttgtgtaggggctgccccttgcatgagaggtgactatttctctctcatccttcttctctcctccacctcactatttagtcctatgtggcatcttggggcttgtgcttagatgcccatagtacttgccctaagagcaaggataatagtagagctcacttcctactattagtccatcttaaagccaacatatataatggattagctataaggttggttacaactatcttctcctgtctctatctctaacctatgtatttaatatatttatctaggagcttatgttaagctagctcttgcatgagagccaacattcttgatttttttgttatctctctcctccacataagcttgtagtagacttatagctcactattatacttgctctaaatcagcacccaaccgcttggacatgaatctctaatgcttccccacaatggagcaataatgataatacagctggctatgataacgaatacccaaccgctggctgctgtaagaagtttagaagagagcgaaatcaaaccgcacccgtcttagagcaagtttaataatatagccaactactaactctaattcatatatagccaatttaatagctcattcatacaatagttacatatcacactattaatacatggtcccacctgtcatacacactgtgtcttggagtccgtgctacagccagctacaaatctgtagcccgctgctattctctctcctcatttatctacttaaaatatgtttacagctggcttataacctgctattgtacctactcttaagcccgattagcctgatttattttgctccactatctcacaacctatcttaatttccgattgctctagctcaaccataaaaataatgtcctttaatttctcccatcttataccatccaatttataggactatgcaggcacgggtgtcatgaaaaccattaatccaattcttgtaaaccaccacatttaatttgctatgtggttatgcattcttgcatagatctaccaatagtgccatcaacaaatctcatgcgaaaaaactatcggtgtaattacggtgtaaaaacacatcatagttacaccgtatactatatatatacgactagtagcattaaaattgagttcaagagaaaacacagcgctagcttggtggcaaaaggagcactcgtgtgatgggggtgggtttttataaagaaaaactcatgcatttattttatatataggttagaaacataatatatgatgagttgttacagtgcagtgctaacagtacggatcactgggacacttccagttttgcgaaaaaccccttgtgaatgggcaaattacacttttgctcaacattttgtagaaaaggacttagaaagaaaaaaaaagcaatcgagtcattctccttcttggcctttgtcaccgatgaagaagatctgaagctcacttccggtggagggtgaaaccaagtgagctgaatgcactcaatccctaatgattcctcctatgtatggaggctaaggtgttgatgagcaaagtgaaattttagcaacaccacttgagatttctactattgttcttgagagaaattagtacaaagaccatagctactccaaagacaacaactagatgtattttgttggtgaagaaagcaaaagaaacgcggtgagctacataagaagccaagaggcatacagattcggtcctccacgagtgggaggttgagacatctttgatgcaacttgaaaactccagccacctagtgaagatttgtcgccaaggatcaagcatgaggccgccttccttggaaagacctcgccggagatgtcgatgtagacagacgttacctctctttgcacagatctggaggcatcctaggtagcagctgggagaagaagcccaacagggagtgattcgtctccgtggagaagcccgacagcgctcctagacacaaggacgaggccaaccgacgccaacaatcaccatgagaatcaaaagggaaaattaaaaccacgagaagaacctgaaccaacgggataacccgactattgctactacaagtactagaggagcagggaacctagtccctatcctaaccttcaccagcgatgagccgatggtggggagagagaggggttggaaaggggtgaactttactataatgagtattcatgagaggtcaaggaccaacgagagagcgttttctgtcacttatgtgtggctgcaatagggaggttgcagggtcgattctcaccccaccagcgtgcgcctgtgcacgaatcttgcaacgaatttaattgtctaaaattagcagatttcttccaaaaaaaaccatcacaggtactagaattaaaatctcaaagcaggaagagttgagcgatatggttaaaaatggctagaaaagaaaatcttaatcatcaaaaagcaggttgcaggtgtacacgtccattctcactaccataaacaaggggatgtattccaagcgaacagaaaattaaacaaagtcaaattactaagttgaaaacaaacttacatttgttatccatagattttcattggtaccattaatttcgcaatcactttaaaatcaagattgctcgggtgttcagtgcactgctcatgtttgatgctaatatagattggaccgagaaaaataatcaatgcaaaacccataaaagaacgtggggaatctatgcgtacgaagtgagttggcgagtagacaaatggaggggtggtttagaccgtgagaatttgtaatttattccaaggaggtattgtgtaatctagtgatgaactcataacgagggaatgccatgattttttttttctgcaaaaataagaacatgaaagaatttctgaaaagaaacaagcagtggcccgtttcaatggtgcggaccgtgcggtcgatgccttggtgggtctcacattctcactggcccagcctcgacccatggttattactatttcacatttctgggtgcacttgtcagtaggataataaaaaagctcgagactcgcgaaccgctcgagctcttaacgagccgaggcctaagctcatgagctttgtcgggcttagctcgatcttctcaccagcataggtgcacatttaatttttatcttttatataataagctagtaggtaattaatatacattcacgtgagaacttagtatatatattttgtagcagaaagacctctagatggtttaaaaaagacgcgaatgacctaatatcaaataattaaaagtggtaaggcttcgagtctaaattgtctagcccaccaccttgtggagctagctagaaaacctatgagcgtaattaggggtgggcattcggtctaaccgaaaatttcggtctcggtcttcggtctttcggtcatttcggtctttgaaaagtgaagaccaaatttatgtgaaaaactatcagaaccgacaaattcggtctcggtctcggtcctgactgaaattcaacaatattttcatatatgcaaagaaataatggaaattttcaacacaaaaatcacaataaaaattcgtaagcatttatgagtaaagactcttattaggttgcatgcctagaagaagtagggatgtgaaaattagagtttaatcctattaaacatagtggattgtagattgtatttagacattttttgataattcggtcttttcggtctattcggttatccgaggagactaaccgaattgaccgaacaaaattcggtctttcactatctaggaccgaattgatgaccagatttctcggtctcggtctttttggtctcggtctcggtctttccggttcgctctttcggttcggtccttttttttcccacccctaggcgtaatcactccatatatccaacgtcccatgttagccacgccatcaaagcttttggctggtggctgccgctcgcaccggctgcaaacgctcgtgctcaccttgtccatggcgcccacggctgagctcgatactgctacgtcaccgccgccgccgcacttcgtcatcgtcccctttccggcgcagggccacaccatccccatggtcgacctcgcgcgcctcctcgcggagcgcggcgtccgcgccagcctcgtcgtcacgcccgtgaacgccgcgcgcctgcgcggcgccgccgaccacgccgcgcgcgccgagctgccgctcgagatagtggaggtcccgttcccgccgtcggccgccgacgccggcctgccgccgggcgtcgagaacgtcgaccagatcactgactacgcccacttccgtccgttcttcgacgtcatgcgcgagctcgccgcgccgctcgaggcgtacctgcgcgcgctgccggcgccgcccagctgcatcatctctgactggtccaactcgtggacggccggcgtggcgcgccgcgccggcgtgccgcggctgttcttccatggcccgtcgtgcttctactccctctgcgacctcaacgccgccgcgcacgggctgcagcagcagggcgacgacgacaggtacgtcgtgccgggcatgccggtgcgcgtggaggtgaccaaggacacgcagccagggttcttcaacacaccagggtgggaggacctacgggacgcggccatggaggccatgcgcacggccgacggcggggtggtgaacacgttcctggacctcgaggacgagttcatcgcgtgcttcgaggcggcgctcgccaagccggtgtggacgctggggccgttctgcctctacaaccgggacgccgacgccatggcgtcgcgcggaaacacgcccgacgtcgcccagagcgtggtcaccacgtggctcgacgccatggacaccgactccgtcatctacgtcaactttggcagcctcgctcgcaaggtccccaagtacttgttcgaggtcggccatggcctcgaggactccggcaagccgttcatctgggtggtgaaggagtcggaggtggccatgccggaggtgcaagaatggctgtccgcgctggaggcgcgcgtggcggggcgcggcgtcgtggtccgcgggtgggcgccgcagctcgccatcctgtcgcaccgcgccgtcggtggctttgtcacccactgcggctggaactcgattctggagtccatcgcccatggcgtgccggtcttgacgtggccgcacttcaccgatcagttccttaacgagcggctcgccgtcaacgtgctcggcgtcggcgtgccggtcggcgcaacggcgtccgtgttgctgttcggcgacgaggccgccatgcaggtggggcgagcagacgtcgcgcgggcggtgtcaaagctcatggacggcggcgaggaggccggcgagaggaggaggaaggcaaaggagtacggggagaaagctcacagagccatggagaaagggggctcctcgtatgaaagcctgacgcagctgatacgccgcttcaccctgcaggaaccaaaaaactcaagttctataacagtagagtgcagtgcaaataggcacatttgaatccacagattgcagtgttttcctgaatattttttttccattttgttggcattaggtttgattgcaatgatttatttctccatgcatggacatccatgcacataagtcacctgtcttttcttattctgaagaagttaatggatgatgtaattctatttgcggacaactttcttcacaatgtggacttggaagttggaatattccaatgagaatccaagaagatgcatgcctccagaaatcagaatattcctaggccgtgtttagttccaaattatttcatcaaacttctaactttttcatcacatcaaaactttcctacacacacaaacttccaacttttttgtcacatcgttccaatttcaaccaaacttctaattttggcgtgaactaaacacacccctagttgacttggaattgttggcttttgtcaggatcccaatctaccctatagttcaacgttgcttcgtctgaacattttatcttggccgtgtttagttcacccccaacttccaactttctatcacatcacatcacatccaaaactttcctacacacataaactcctaattttttttccaaacttctaactttccccaaacttttaacttttttcaggaacccttgttgatatcaggctagctctatcaggttgtcagttgccacctttgtggcctttcatatttcacctttcgccacttatgatcatcttgcaatgccatccacattcagatgatctgtatggtgtaacaagtctgccacaaacaagtgagttcagtgtttaaattcatcaagaaaatacacttggtgatgtattggatctcgatcgatctgataaaccaacgatgaccatttgcttgttttctctctgtgtgtatgactctgctttaggtttgcctgtcattttcatgagacactagccaattagtcgtgcgttgcacaactttgggtgcctgtaatgtacaatcatacttaattttgattttttttcttacaaaatcatacaacttgattttaaaactatagattcagctcaaactatatttcaactgaaggttcaaatattatgtccaggatcaacctcttaccgtatacggtgaagaggtgagaatgtttactcagcaatacgatgcataaggttcacagttatcaaacctaacgcaatacacagtagcaaagtaaacggcaatcaagtccatgatttgaaaccaacacaaattgctcaaagatcatttggcctccgagtatctcaagaagataacataataaacattccaaaatgaaaatgtacaatttggttatgaagtatagtaaaaaatctagagtgatcacaattacagtagtttgtctatttatgcattattgccaaccaaaaatccttcagcccaagccaaggaggttttctcttctctgtaggcctgccatcaaccacaactcattcatttcaggaaattcgcatcaacaaaaatattcttggcttgcaaaagcaaagcaaaactttgtaaatcttcaggtagtttctcctagacagcaaacgaatgatgacaggttattctcatccttgtaagtgatggttctgccctgaataatagtttcagaaaatctagttcatgtttcttttctttgaagttggtaagctccacctctgcgagtaacttcatcagaacattatgagctccctagcttgttgattgatagcagatgcaattcaaagaacatgattcttccccctgaaatgaaagaatatttaggtgtagttgaagttttagttttggaacaaaaacaaaactaagatatgaatagactgattctcttatgagatgttaaggtggagacgtcataagtagattatacaaaagagttacaacatagaagaaaaaaatattttaagggtaaactcagtaagaaaatatcttctttagattccatctaatgttgtcaactaataatttttctaattcaacgcaactgaaaatgcttcagagcaaaattgtctcgttaagtgtagtacctcaggtcccctttcaatttttattctctcatttttttaatacctattattttatatcaaggagcaaacataattccttggcgatctctaaatgaaagtttaacgtcttgttagttttgctatataacttggttaaaggagactgtataatagcatgccacttgcaatttagtagtcttgcttctgtgtaatagcacctgaaagtatataattgaattttactgttggatggccttgaagatggaatcactacttaaagcatatgattatgtagttatgcattactaattaacttaaagaagtgattttagatataacaacatttgcattctgccttgaccattgcacaacaaataattacctagatgcgatgcctattctagaaaataaaaaacaatgaagaattaggcccatctttaaatcccacaaatccttgatatgactcacaaagcctcaaaatcctatatatgaaagaatgagatgtagtgttttgcataaatagtagaacgaatgcattctattgacctttgcttcctccacaccattactcacgatttatggtgatcctacaccagttcattatagtgtgctgacacatctatcagtgtgaaaatcaatgtacttcctccgttctgtattataagaccattacccacatttatatatagatgttaatgaatctatacatttctagcacatctatatgaatgtgggcaatgctataaagtcttataatacgaaacggaagaagtaatatttaccatgattgtagccatacagaaatttgtgcctcgctcttcatcactccatctttggcatcgtctcttttatttgagccgatctgcagtggtaggccacagcgtgggaagacagataggaggggatgggatatattgattatgtaacttattaccagatacctgggatgggatcatgggattcagtgggcaagggaggaagagatggcgacagtcttgttgcagtacttctgcttgaatttgcgatctgatttttgacctcgatccaccatcgtcgatctcgatcttgttctgttctttgcagctgtgattcggatcaatggggaaacacggcagcggcggcggcggaaaacgctgcggtggaaacgatttgaagcagtggtgcggatggggaggtgcggtgggagggtggcagtgcaaacgaggaggcggcggtggccagtggaggcgacggcaatacgggcggagcgcgaagacgagagaggcagtggtgcacacgcgattgggagtgtgggctgtgttttttttttttttttgccgggtaaatccgtgagaccgatcgggagtagtgcggtgggccgtggacacgtgggctttatatattcacgaggcttccagccttttcagtccaagactcaggaagactactcatgttacttcgaaatccaatggtccgtgttgatcacatggttgcatccgacggtcatttttaatccgatgacgtggcacattctggtggtgaaaaactttacttttttcactactttagatactctaggattaaaactagattgattaccgtttctcaaaaaaaataataatgaaaaactagattgattattgtgttgcaggctagatgctaagtcggtacaattagatctctgaagcccttttctcgctctccacattttcgatcagaaaaagggtctaattcgcacatgtagattttaaaaatttccattaataaaaaaatactcagttttttataatgagaaggtaggagtgccatttgattaaatgaaacatttgattctcttgcaaaatttgtaccatacgttatgaattgcagtatgcaagtatactaatttcatagttgcaaatatttgtcccaaaatgtaatttagtagtatgagatattttggatgcacaagagtttatcaccaatcattatcttgtgatggttagagaggtcaggattcatgagactgtagctccattactgaaaagagaaaaacgcagcttgtgatggctgcagaggccattccctccttcaatcttcagactgtatttttcattggagcagaatcaaaaagtgaaaattgattgacggtgcatgcctgcttgcttgggtgtgtttcttggcttgtgctttcttcctcatggagcggacagtatcagtaccaattaatcgagcagttcagctgcagctagccacatctgaacgtcttgagaccagatgttgattggcataattgtggactacgacaggttgatttttgcactattcgttttcatcttgccttcctaatgcagtgtctggatgagttacagaggtcgcgtagtcaaatctgaagatccaaccgtgtggttgaaacctagaacacagtttgtttcagatgtcgtaattttgtttcctggcgttctttgtatattcttttatccagcctatacacttctccaatgcaaatagtcgatcaacatttctatgtgatacatcacttacatagaattacagaaaatacatatatttatatttcgcgtcgtaccggtgctacgtgatcatgcgtgtgggaaacaacgaatggaggaccgggactgacaccatctctggcaacatatacgcgatcttcagagaaggaaaaaaatagaggagattgacgatgacggacaaaagaacgtaacactttactccatgctaaaaaattacctcagtcctagaataaatacagttttatgagtagaaggataaattaacaacgagggaaaatcatctagctgttccctatcaattggggggtggttgaaagtgtgaagatagttgggtgtaaattagagaacatttaaattagttgttattaatgggacaagtaacaagtagcactataagttttacttattttgggacaaaattaaaatcgagaattgcactttttaggacggatatagaataagacgtaaaatcgatcttgaatatcgtaatttaaccatttatttcttttataaattattatccacaa

SEQ ID NO: 6120 - DNA, 9206 bp, Oryza sativa
cttcatgctaggaaaacttgaagaatgccttcagttgttaatcgaaaggtattgccatttgccaagactatcctatttaatagtacaatgcttattcagaaaatatattttttattttatggtgatcacgttatattctctatacagtaatcgtataccagaagcagcattgatgtcgagatcttatcttccgagcaaagtccctgagattgtaacattatggaaaaaggatctccaaaaggtaccatctgccctatcccctataatatttctttgtttttttctacctattctcatgcttaatcttttgcacacctgtattagatcgtgctcagttgctcacattttagcgtgacttgtctcttcaacctaagttacatattcaagcatgaaatttctgttcggcattactgatgatttttagtgatgtttagtgatgtttcagtcctttctggtggtaatactgatggtttttagtgatgtttcagtcctaacaggcagaatgccccatctaatttttgtgtacctgataaatcaagggcattttgtctattatctaagctagcatgaaaaaaccaaccaaaagacatgcttgttatcttgtgctagagtattgttcttattttcagacttacgcgacactgtttaatttgtaggagctatgtgttttattatctcaccatgccttttttccttctcatgccattatctttataggtaaaccccaaagcagcagaatcattggcagatcctgacgagtacccaaacttgtttgaagactggcaaattgctctcaatgtagaagctaatgtcgcgcccaaaaggtatgttcgtaaaagtaaaaactatgttcttttgtgaaagttttaccagttctctcttccatgcatgggacaagtcgtcaaggtttgctttcctcttctctttaattgaaagcatctgatgaaataagaatgatgtcctctaccatgtacaggatgtggggttggaatatcatatttagcttcaattgaacacatatagtgaaataaatagaagtaatgtcggtgctcatttgtattgtttttctttattgttctgatgaaatcctgtttgaataggggtatttatccaccagctgaggagtacattatccatgctgagaggcccaatgagactctggtggaagctttcaaaagtatgcatatacatctagaggaggtgctgccagatgaaaatggagatgacactcacgaggtatcactcctacggaaagagttgtaaaaaaatattgttaaatagtgggtagctatttgaagatgttaaattacttctactaaactgatctcttttttttttggcatgcgatgtcctatatttatcaccaatcttttaaagtgatcattatttcaataaaatcacattttttgctattcattatattttcttttctccttgctttaagttgtaatatagtaatatcaatctggtccaccaggctatcgaggaaaatggagtagaagagagccaagaagatgctgttgaggttgatgttgaagctgatggttcgactgacggtactgtccttgtgaacggaaatgataccgaggaacagtggggtacgaacaatgaagaatcattagcataaaagctgtagttgagcaagtgtacagtcctaaaacctttttttcgtcctagtttctcctcccagggcaccaatgatcatagtgaaaacttgctgctggtgtcctcaaaaagaaaagaaagaaagaaagaaaacctacctgcttctggatacaagtgtttattctgggctatatcctttagtttaatctgtccgggataatttaattttggtattcgagttaatctgttggtctgaccagttttcttagacagtttgaacatgagagcaaaatttgtgcttgctatacatgagttgttgatgttttctaacgactatcttgccttttgcagtattgactcctgaccaatagtgaatcagcgggacagcaacctgatacactgattcagcttgtaaaggtgaagtgtttttccatctatacaattagcgacagttgttaacaactattcatttattatagctaattattttttgacaggttgctgactcctactgaaactatgtgaaggccgttttcctccacttgtataatcattgggcgtgctttaagatcggcatatccgacgataaaacccacagaaattagtcatcgctttgtccttgtttgagatagaaaattttgtacctttttacacacataggtccttactgtgggttctcaggatgctttatatatacgagggatgttcccttcttgttgaggttgaatttgattagctaaaccggatccatattttacacaaagtacatagggtaaaatgttaaaccagccgaacattacctttttttttttctgtttcatgttacacgaaccagctcccatgaagccatgatacaggtaattcactaaagagcacccctaaacaaaaaaaatagtataccagaaaaatgggggactaggaagagagagaccgcgagtaggaattaattacaagaaacagtataaaacaaaaatagagatcatgattcatgaagaacagcgacagtggctaggaggaaagaataggaggaacaagcccatgcaacttcatctgttaagttggatccctgcctttgctgctaccgccgctgctgcagcctgcagaccagtgtgtacataggagatgcgacaagctcagggaactagggaaaaatgagagggaggtgcggggagcgtttttataggctcgggagggtgaaagggagctggggcgaggcggatttgggcggcgacgacatgggcgaagtggagctcgattaggcgccagaatttggggaaatgtggagaagaggtgtagtagtgtgcgacgaccgggcccgcatgagagagggcgcgaggaggcgcggaagaagcggcagcgtggggcgggtgcagtgaccatggcggtttcggcccgaggagaccggaggtaggaggaggagctgacaggtggcgtcaccggtcccacctgtcggcgagggagggagagaggagaccgagagaggaacgtgaaatggacagcccaaagaggaaggaggagaggagggcggcccgatagggaaaagaggaaggaggggcgggcgggccaagggaggagatgaagcctttgggccggaagcggcccaaagtgcaggaagagattttaaatggttttctatttaatttaattgattaattgatgtttgtactattataattactttttgagctctgaaaattcacgggaaatttcagagagtaaattagaacatagagaattttacaaaaatattttcggccatgatttttaaagaaaatttttaattccctcaataattcacttgattaaattgctttaacttttaatataatttctagaaatgatttatttaatgatttttaatcccgaacgaaaatcagggcgcgacacgacagcttatcatcgtctagagaagttgtttgcttggactgggcttaaaactgatgttaactttattaagcagtgtcaagtatgtcagcatgccaagagtgaacattgcaagttgccaggcttgctggtacctcttcatgttcccaaagaggcttggatggatatctcaatggactttgtggagggtttgcctaaatctgatggctattcagtaattctggtagttgtgaatcggttcactaaatatgcttatttcattcctttgaggtatccttttacagcctctcaagtggctacaactatggatcgttctgtgtttaaaacatatggtattcctcacttgattgtctctgatcgggatatgatatttacaagcaaattctggggagatttgttcaaagtttggaacacacagttgcaaatgagtactgcgtatcatccacaaaccgatgggcaaaccgagcgtgtgaatcaatgtttggagatatatcttcgttgtgtatgactcaggcttctcctcacaagtggcatcattggctccatcttgccgaatattgatataacacttcttctcacacctccatgggctgttcaccatataaagcattctttggtactaatccccactccaatcagattcctgttctttgtcttcaactcatcatgctgtggatggatttagtatttgaatgtgatcagctctcagcttttcttcaggagcaattgcaaagagctcagttacgtatgaaacacaaagctgacaagggtcgttctgaacgtgctttttcagttggggaatctgtctttctgaaactctagccgtatgttcagtcatcgatggtcaatcgtccatatcccaaattggcgttcaagttctttgggccttccaagattctagagaaggttggcactgctgcttatcgtcttggtttgcctgatcacagtttggtgcatccggttttccatgtgtctcagttgaagccccatgtgccggctcacacacctgttttcggtagtctgcctactcttgtggttctggatgcagttgaagttgtacctgcagagatccttaatcgtcggcttgttaagaaggggaatgctgctcgaatgctgctcatgtgcaagtgttgatcaagtggacctcgctgccagccgatcatgcaacttgggaagactatgacgtactccctatttgtcaagattaatagccaaaagttgttatattttggggtggagatagtactgaagaatcccttcccttgtgcgccagcttggggacaagctgatactttggcgggtggtactgttactgttacgagtgtatgagatatagactttcatgtgtgagtgggcctgcgagcccaggaggatttaggcctgtgcgccaacaactagtatataagcaaacagaaatgagaaatacatctctcctcccccgacaactctgttctaacttcttcttcctcagttcctctgcttctcgatcttgagcgatttcgaagatactactctcttcctcaactccgatcagatctagcctgattccggcggtgaacggcggcggaggttgtgtaacagccgcgtccccgccgtagccggccgtcgcgggcgtcacaatggtacgtgactcccctctctctctcgctctcgccttcccccaggctcgcgctgcttaggtttcgccgcgagtggggatcggtacggcgagggcgaaccgtttgacggccgcgccgcgccgcgcggtgccgtgccgtgccgtgccgagatccggtggctggagcgtcgaattccgcgtggatctggggtttttttttgtttgttgcgtactgacgtgattgccttctcgttcgtgctttcgtgtgattttttttttctctggcggcgaaatggcgatggctgtgatgttggcagccgctcaggttggatatcaaggtaaccactgcgcctctccctcggatctgcttagcttagtttggtttgttttggtgtgtttagctgaatgtgtttggtggttggatcagaggaagctcgcgcagaggtcggagagggccaagtccgtggatctgcatccgaccgagccatggtgagtgggcaagtttgtgtgtgtgacatgatttttgggttttggggtgctagtgatgtaatgattatgttgttcaaagtcacatgaataacttcctccggtgtaatgcaggattttgtcgagtctgtattcagggagcgtttgcatctggaactaccagacgcaggtacatgactgttcacagtagcttaattcgtcattttctgctggtttcatggattttatgaaatgatgattatctactaccagcacgctgagcttttgtactgcaaaatggatattcccatccatatgtaaaattcaagatacattggatttagtgtgcttgtagtagtaaactttgacgatatgcgctcatagtaagttgtaccagagcccggaaagaaaacaaagaaaaagaggggggggggggtcaaacatagcgatgaatgatgaattcttaaaacctagcgaggaagtcttcgatgcattgtagaaaggaatatggtcaaaatagaagtaacaaggagtcaatgaacttctagatggttgtttcagatgtgtgagtgttagctacataattgggacttcttaataggtttgcaaactatttagagcaaaacaggaggaggtaaaacataaaagtaaaatctagaaatcgatggacggaaaaagaaacatacatattttcagcatagttactcttaaagttaaactgattataatatattcatctatcctcagacgatggtgaaatcatttgaagtcacagagttaccaggtatgctttcccacctcatcgcttacttctgtttgatataccatcttgctaatataatcatccccatttcagttcggtcatctaaatttatcacacggaaacaatgggtagttgctggtgccgacgatatgttcatacgtgtgtacaattacaatacgatggataaggtcaaggtttttgaagctcatacggattacatcaggtgtgtggctgttcacccaacccagccttttgtgctgtcatcatctgatgacatgctgatcaagctttgggattgggataagggttggatgtgcactcaaatcttcgaggggcattctcactatgttatgcaagtcacatttaacccgaaagataccaatacttttgctagtgcttcacttgatcgcacagtaaaggtttgcgattttgttccttacatttgcttggcatagtttttgcatttctaacatttcttggtctggatttgaatgtggtgcccttatttaatttcaggtatggagtcttggttcccctgatcctaatttcacattagatggccattcaaaaggtgtcaattgtgttgattactttactggtggtgatcgcccatacttaattacaggctctgatgatcagaccgcgaaggtatgccatctgcagtgaattatcttgtgagtatattggacattgttacgagacacttcgttgaatcaggtttgggactatcaaacgaagagctgtgttcaaacgcttgaaggacatgcacataatgtctctgctgtttgtttccatccggagttacctataatacttactggctctgaggatgggacagttcgcttgtggcactctactacctacaggttctctcgctctctccccctatgatacaactcataggatacttcatgcatagtttgaattttgagataaattcatgtactcgttactctcgtgggtgtgttgttctattgatggcaataaaaactctgttcggtggcataaaatctggttcttaaataatcattggtgtgtcatatctattgatgaccttacaagcatagtttctggtcttcatgtccttgtttctttacgaattagtttgtgcatttagtaatttattatttagccatgtaattttgattgatgcagcattacattctttaatctaaatataaatttttgagtgaaagtgttacatttactcctatagcataagtttgtattacaactcagtcctattttagtaacaatatagagcaatttatagcttgaagtacgactagctaagaggaatattttctattaaacctgtcctgattggcatcagagctggtagtgatggttagggtcaaactaagagaaatatgcaactataccacttcctaacaattggtgacctctgaagtgaagcactgtgtccagagaatttgaagctaccattttcctgtggtgttgaaaataaggagattctcttgccatattttgaaactagcattctacaccaggatatagataaacaattttggggggtgcgaccaggatgcacatcacgcccatgccacaaacattcacttacgcgtagctactatgcttgttagttacatgaattacactgtcttcaataagtattataggttactatatatgcatatgcttagttggcacctggcaagatgttcttatctctgtgcattggtttgttcttctcttttttttgaagactgctttggttgttccatttttgtcaatcattgttttggatccttttaatcttactgtagactggaataacacgttgcttgtttcttacaggcttgagaacactcttaactatggccttgagcgagtgtgggctttaggatacatgaagggttcaagaaggtattggaaatattacactcttactattcggatgctatggacttacggttaatgtcaagtaccatgatactaaatatcacctattcatgtggtattgaagttccccacacccaaaatgaatcaaagtataaagatttgattagtttagcgtatatgttctctgctccatagttctctcccaatgtagcaataacatttttcgttgtctgctaaacagtttattccacaatttgctcttcacagaaacccttttcttttcatgttttcattaacttcttccttttcaagttaatttagtgatacgggaaaaaacttgacttgtgcagggttgtgatcggatatgatgaagggacaataatgataaaaattggccgtgaagttcctgttgctagcatggacagcagtggaaaaatcatatggtcaaaacataatgaaatccaaactgttaatatcaagactattggtgcagacaatgaggttttcttgttcaccatgctaatatgttgaaaacttgtatactttcttatacgtcttgtttactaacctgttccatttttcagattgcagatggtgagcgcttacccttggctgtgaaggagttgggaacctgtgatctttatccacaagtatgttcatattttctatttaaatgaatgcatcattcgcatagtgatcaagtgatgttttccaccagaaccaacttgatgcttgcaaatgagtcccaaatttctgcttgagtttctttttcctattcattacatgagtcacatgtatacaccatttgaccatgcatgttgaaatatttttaatatgttaatttatttgacatttgcactggtgagttgttttatttaaacacaccttggagattctgttgttgtagtaaaattaaattaatctcaaatctagtatagtgtaattatagtgtatgttagtaattatagtaattatagtgtattcatttcagagcttaaggcacaatccgaatgggagatttgttgttgt

SEQ ID NO: 6121 - DNA, 20046 bp, Oryza sativa
caacctttcttccttggttcatgtttctttaaaagcaaataacttggtggggagcatccctgagagcctaagtaagatcccaaccctagagaggctagttctcacatacaacaatttgtctggtcatgtgccacaggctattttcaacatatcatctttgaaatatcttagcatggccaataactcactcatcggccaactaccaccagatataggcaacagacttccaaaccttgaagcattaatcctatcaacaacacagttaaatgggccgatcccagcttctcttcgcaatatgtccaagctagaaatggtttatcttgctgctgctggtctcactggtatagtgccatcttttggatccttgccaaacttgcaggaccttgatcttggatacaaccagcttgaagcaggggactggagcttcctctcatcccttgcaaactgcactcaactgaaaaagttggccttggatgcaaattttctccaaggaaccttgcctagctcagtcggtaatcttccctcacagctcaactggttgtggctcaggcaaaacagactttctggggcaattccatcagagattggtaatcttaagagtctcagtgttctgtatttggatgagaatatgtttagtgggagcatcccacctaccattggaaatcttagcaacttactggttctaagcttggcacaaaataacctctcaggccttattcctgattctattggcaaccttgcccaactaaccgagtttcatctagatgggaacaacttcaatgggagcataccttcaaacttagggcagtggagacaattagagaagcttgatttgtcccacaattcattcggtgaaagcctgccaagtgaggtcttcaacatttcttccctgtcacaaagtttggacttgtcccacaatttgtttactgggcccataccactagaaattggcaacctcataaatcttggaagcatcagtatttcaaacaatcgcttgaccggggaaataccgtccactctagggaattgcgtgcttttggaataccttcacatggaagggaaccttcttactggaagcattccacaatctttcatgaacttaaaaagcatcaaggagctggatctctctcgtaacagcttgtcaggaaaagttccagagttcctcactctcttaagttctttgcagaaactcaacctttcattcaatgactttgaagggccaataccatcaaatggtgtctttggtaatgctagcagggctatcttggacggaaactacagattgtgtgtgaatgatccagggtatagcctgcccctttgccgtgaatcaggatcacaaagtaaacacaagtctactattttgaaaatagtaattccaatcgcagtgtctgttgtaattttattgttatgtttaatggctgttctcatcaagagaagaaaacaaaaaccatctttgcagcaatccagtgtgaacatgagaaagatatcatatgaagatattgccaatgcaacagatgggttctctcccacaaatttggttggtttgggatcctttggggctgtttacaagggcatgttgccgtttgagaccaatccagttgctattaaggttttcgatcttaacaagtacggagcacccacaagcttcaatgcggagtgcgaggcattaagatatattcgccatcgaaatcttgtcaaaatcattactttatgctctacgattgatccaaatggctatgattttaaagcacttgtctttcagtatatgccaaatggaagtctggaaatgtggctacatccagaggaccatggacatggtaaaaagagattcctaactttgggtgaaaggattagcttagccttggacattgcatacgctttagattatcttcacaaccagtgtgtatccccactaatacattgtgacatcaaaccaagcaatgttcttttggatcttgaaatgactgcatatgtcagtgactttgggttggcaagatttatgggtgctaattcaacagcagcgcctggtaactctacaagtttggctgacttaaaaggatccattggatatattgcaccaggtgagagaaattggaaacttatactgatttattgacctgtatgcttcagccatcttattaacttatccaatgttacatggattgtagttttcctccattcgccattcttatgttttcaaatgaaaatgcagagtacggaatgggtgggcaaatatcaacgaagggtgatgtctacagctatggagtgttgttgttagagatattaactggaaagcgtccaactgatgaaaaattcaatgatggtttgagcctccacgatcgtgtggatgctgcatttccccacagagtaactgagattttagaccccaacatgctacacaatgatttggatggtggaaactccgaactgatgcaaagttgtgtcctcccattggttaaggtggccctcatgtgctccatggcatcaccaaaagaccggttagggatggcacaagtttctactgaactacagtccatcaagcaagcattccttgagctttccagtggaggaaaagtagtgtgaataactccccggtggtgtgcaaagctatgttgctttgcaactactgtgtaaggctacttctattaccataactaagcctatatataaacaggggcagacacagcagggggtcaaatagggctcaggcacacctactgccgccaggccccctggaaaccataccttattcaggaaccaagtccacactaatacaagccaatctcatggcttcacggtacagtattgcgtataggctgcagccactcgttcaagggaggcaagcagacacatgtcaacacagatttagcagccattgatgctagtattggtcatcaacagatctaacccaattaaaccatttttgctaacttttcttagctcagcccatgacagtataaatcaacaacaaaagctttgataatgttcatgacttagtggtactacgtattttaatgataatcttatattggtcttttaaactagcacctcctaaaattttgttctgcgttctccactgtatataaataacctcatgaatctattatgtgtttaggaattaggacagcaccaaatgcaatgttagcaggctgtcgacacacccaagatatggttacaattccacggtagttagtcagcggcacaactcacaccacacaacaggcataataacgcgcatagagcaaaacgggcacacagctgcgcccgcccaagtgcgttagtgcgtgctgcgcgctactactttcagaggcatttccacaaacacgccacgcgcgttcgaagtccatacacgaaatccagcacacacaggcatacgcaaaaaattcagaaaagcagtagcacgctgaccttggagaagacggcgccggcctggcaaacctgccgccttccgccgcgcctgcgccgcccatcgtctcgtcttcctccgccgctccgcggcggcgcgacagggtcgacgccgtcgaagagttggagaaagagagaaagggagggtgacaaaacaaggttgggtcgggccttgttgatgttgggctgtgggcaggccgtcctcatagatgtattccattctctctcttaattaactttctagtagcaagttttttttcctctcaaaaaaatctcatgtaaattccaaacttttttttcattttattttttaaaaattacatatttttttcatttaagggaagacatacacatgcgcatatacgcatgaatgtgcgctttaacacatcctataagaaacactcttaatatagttacaattttattgaaagcattttcgtggtgtgatatttatgagcagcatgatttgaaccagatgaaccaccacatatcggtctttcctagtttcaaataattttattcgtatgagcagatagttcatctttattcaacagtttcagatacgtttggagcaaatttacatagactcgaatacaaacttttgggcatgaatttctagctatgtgctatttttttaataatgaaaatagattatatctccagtctttggcaatggacacacatcaacaagtttcagaagaatttaaaatagatgtgatctatgtgctacttaggccctgtttgggagagtttgtcccagctgcagcttttcctaaaagctgcttctgctagaagctgccccaaacagtctaagattctgaaaaatgaactaaaaagccagaagatataaaagctaggtttcagagcttttccagattctcagaagctggctaccaaacagctgcttctcaaaatttaaagctcccccaaataaacccttagattggcttgctatgtcctggggcctggccaacgatacattccacgtcgacctacggaagcaaaagcaattcagtttataataatgctgctataaatttagaggggaaaagtgaaggaatatttacatatacttttatgggtacaaacggacgattttcctaccatgttttttcgaggattcttaattatcaactttaaaaatagtaccaagtcatggtactatttataacctaggaaaagttctatgattaatatttagacaaataagttcgatacatcttattagttatatgtatataggattatatcttgtgcacccaagatggttaaagtgtcgtacttgaaaagaaagatggttaaaaggctcttcttttttctacatgtaactacattttctggtggaatacacttgcctgtcggcatgtattggttgccatgcacggacgagattggaggattgtgagccccgttgggaccactaccatatccatctccatgttctacaaagcaattatgtaaattttaaaccaagttgaatttcgtgtattagaatatgttatatttttccttaactaatagctaaccgatgttatatgtagatatttcctctggttctaatatgcagtacagttgagtagttttacagcttttatacaccttttctatttccattccatgtttattaccctttccaaaatgctactactttcaaaaataaaattgtctcatattttaaagaaaactcttacatatttttctagattgataaactattttttctacaagtagctaaattttcaagtgaaatacacttgcctataggtatgtacgggttgttgtacacgtaagagattggaggctcgtgaaccccgccgggtccaccacctccggctccacttccatatccacctccaccttttacaaaatcaacatctttaaataaatttatgcagtaaatttttaaacatggttttgttttgagtattaatatattatttttttcctttacccaataggcagcatatgttcatatatgactatttcctcttatccgaaatgcattgcaagtagtttcagaacgtctatacactattttaccttttatttcaagtttatccttttcataaataaatgtcccatatttctatagtaaaatataaatgaaagacaataaaataatctaatataccattttaaacttctattagtaatgttaaaaaccaataacttcatctgaaaccagagtacaaatcagaggaaatgttccaccggcgtgcgtcctcaccagcgaaagggccaccgccgccggccaccggcggcgcccactgcggagggaagaagggcggcggcggcggcggcgagagcgcgagcgaaagcgacgacggcagcagcagtagtaggaccgacatggccgacgccgctggcgctcgtagcccgaagcgaagccgacgagctgctcccatggccgcagatggagctcgctctactacacttgatcaatcgctctctgaaatctgaagctggtagatcactcggctgtagttctcacgtccaaggctttgccccccatatatatacaagataaacgcaacgacgcggttttgctatgacaatgcagcttctctacttgctacttgctagccagctaggagtgggcagtccatcagtcaatagagtagtatacagttcgaactgtagtgtcaaatcctgctcaatcagccacaggttctgattataatgtatactaatattatgcttgttttgagaggacgaacaagtggattgattctgcgtctgaccactgaaagattaggcctgaagtttccctaaggtataccaaacagaatctgcttgggatttgtaaaagaaaatgagccaaagagccttccaagttccaacataaaaagctctccacaataacgacggtgacaaaaatcaaggaggaagtcaagacctgagcttcaggtacaatagcaggctataagtcagctgcaaacatattttaaggagataaatgagaaaagagaagagcagcggactacatatttgtagccagctgtaacacgaactccaagacacagtgtgtacgataggtgggatcaggtattaatagtgtagtgtgtaactattgtataaatgagctattagattggctatagatgaattgtagccagtagttggctatactcctaaacttgctcttagccagagcgaaacgtctctcgaagctaggggtagtagtgaattagggcccgtgggcgctttcacaacccacttcagcctttaaatatttttagctaaaaaatgtattaatttttagtacaactctttttgaactcagcccttgcattttgccacccctgctcatagctcatccttggttttactttttgtgcggttctcctttttacttatacaaaatttttactcctactttattcaatgaaattaggacatctagtactggttcgttaaaaaaacaagaagttccccaacatcttaggctactccaaccatgagatgaacaattcttcatggttactgatcaggccacggaggatgatgcactgtcactctccctggcaactctgatgaagacatcctccagcgttgtgtcagccaagccccaggcaagaacgttcatcctgagcttcgcatgctccatggcccggaaaacttgagagatcctcacctcctgcttcgccatctcgaacttctgcgtcccggagatgtggtacacaatgttcatggtaggggagatggactggaccagtctcctcatctcctccgcctcgcctgtcgcggttgttactgtgaggacatatgagcctccatattttgctttcagctggaaaggcgagattttgggggttcaagttactaagttagcatttgggatcaatggccatatatgaaatatgtgatcagtttacatgtgtagatgtacctctttagagttcccgatgcattgcaagctgccgtttgcgataattcctatccgatcgcatagaaattcagcttcttccatcgaatgcgctggaaataggtgaaagtatgatgtgataatatgatgtggtgcaaaagatttccatggtgattaactggactaaggttatactgttgtatcagagttgaaagcaaagtgcagtacttgtgagaattatggccctgtcctgcttggcagacttgacagcattccacaagtctttccttgatgctgggtccaaccctgagcttggttcatccatataaactacctgcagaatgttaaaaaatgcatgatttatacatgcaagaatgttcaaaatttccctgaatttgacatatatgaattgtaccttagggtcaccaattagagagattgcaacactgagacgacgtttcatgccaccactgtatttgcttacaagcttatcggcaatgccaccagcaaacaggcgcacacttttcaaagatttctcaatggcctataaaataagaaatatgagatcttagatgattgcttcagaacttgtattttataataatttctcgtgaaatcataaccacataagaacagaataactactgggaaaatgtttgttgaaccagtatttataataatctgtgctaaagcgccttggacgataatgtgtcttggatcttatgtgcagatgataagctcatctttcacttgtaaatagtgtttgaagtcgaatccatcatgttcatccatggaaaaaaatcaccatatattacttcttccgacattattgactttattgggtcaaacttttaaaactttgactatcaatagctctcaagatatttagtttgaaaacataaaaatcatatgggtagaattttacttataaattataattgcttttacaatattatagtttcgttagatattatcgctatattccaaaataaaaatagtagctaaagttgtgcactaagactggataaaatcaacaaaattatatatttaaatacagaggtagtacgttatttaccaaatggtcacatattacctgagataatggtgcaccccgcaaattcttaagtctaccatagaacaacagatgctcgcgaccagtcagtgtttcccatagcaagctgcaacaagaaaataaaagaagggggaaatttaatttaagttcaccaatactaaattgccttaaaggctgtcctaaactaaacaaaactgtaattcagaaacatcagagtgagattagattactcatgctgtggacaaacaccgattcctgcataaatcttgttcatctcgaattgtatgtccattccttcaatgtacgccgtgccagacgtaggtttagtaaatccagtcaactgttgtcaggataagaattaacccccttaaccaataatgtcatgtgaccaaatgaaacatcagttatatttgtaagtaatctatatagggatcatttgtgacaaacagaaaatctggatcatttcttactacctagacatgttttcagatttttagaaatgtatatgcctgttcctggccttgaaagtggcctgtactttacatactagagatttatggctatctaaatatattatttatttcttttattattaagatctaaaattaaatcatacttaccatgttaataagagtggtttttccagcgccatttggtccaagaacaccaaaacattgcccacgtggcatagaaagagatagccctctgacagcaattttttttgcattcccatcttttccatggtacactttcttaaggttgtcacagatgatcgagtagctattctttgattcttgtaagatctgttcaaccgtttctctctgagaaatcatgatagaacaaaattaatactcatgatgctctgtgcaaatacatacatgcaggactaatttcaacatattatgcttgtttaaactatcttatgtatttgtattccatacagcattgaagtttggtaaaaagaaaaaaggaaggtaaaaataagataaagtgagactccaagtatccaagctaacttttgacgtgccatactataaaggataaactgacatataagctgcttctagcctatgattagaaagcttaacataaatggtcagaaagaccaggagtcttaccagctagcaccacaagttggtgggctagccggtctgggttcgagacttacccctgcttaataccatcaatatgaatatccttcctttcatatccatcattttctttagaaattacaggaatatacagaacaaaagagcatacctctttgataacatctgtcttctcattgtcagcagaagctttgaactcttgaagctggatggtctgctgagtagcttgaaaacgattcttatcaatgtgcgagtgaaatagtactgctgcttttcttattcccttttggaaggaaccgaagtgatccaaatagaatgccaataaaaggaacagaaaccattctagtaccattatggtcaaaacacttctcattccatttttgggatcattcaagtcaacccacttcatcccggaagagttcatataattcccgagcaatgcagattgtgcaaactcatagataatgcgatacaatgaaaatgcagggaaaagctccaaaagtgtaatccagcttccttgagacgaacaaatacaaaatttccacaaaattattggaaaatagtgatagacactgacatgagaaaaacactaaaatcatagatattggctgcataaaaatatcccacatatttatctttactaattagacaccaccattttaatcctacattcatcgggtataaagaaccatctgttatatgcaaaggaaaacatgcattttttttagataatgaaacaaaatacagctttgattcaaaaagacagtatgtttttattgattattaagtagattcaactgaaaaaaaatgatttctattaaaggaaaactaagaaagttaccatgacgacagctcatagcctcatacacagccaaataaaaagaaagatcctatggccactatagcaagactagcaagagaaaaacataagcacaattgtaataatggaagggacaaaatggatacagcgaacaaagaattacggtatcattgtaaaagataaacttgtacatacttgagaggaaaacatcttcaacataggacctgaataagaattctcctaaaaggccagaaccaattatgtagaagtatcctgtcactgaggcacaatatgccaaataatcaaagtaaatttcataatctgacaaaatggatatactgagattacttatatatcaaagcataccagtagctgtgctcacactagaaaagcatgacgcagtaagaaatgcgaacgaaatttgtaaattcatataggcgaagtaatacacaaactgcacactgtagtcgttcagtcgaaagaatcttaaacctgaaaacagataaaggtacaagcataagcaacttgcctccaatttataatttttccatgaggtttcttttttcttgtatcaaaccaggaactaagaaaaataggtgaaatatcagaattctgagaccaaaatcactgaatacatcctagataaaaaagattgtcttaccaagaacagaaccaaataatgtgaaggacatcacatagagcagcgaaagaagaaaaaaatagcagtacgagatagtccaatatgaaaaatcaccaagaccatgcatcttcatcataatccttagcttcttttgcttctcgtatacaatgttggtcaaaattacctagagtattaattcattaaacattacaaattaagcttgcagctcagttatttgcttgtaaaagtgtcacaaaaagtcacacatgattcaaataaactggtgcaatattcataccgggaaaagaagttccatagtccatacataaggaagttgccctattaatgaggatatatcaattggcctcattggtcgagctgctctgggcatgtctttgacaaaatcaaatgagatcttgaggccactggcccttaggtgaaggtatgcatttgaagcctgcaatgtttaaactatatgaaatgcagagcagtgatgaagcataagaaatcatcaaatagctagtaaacagaatagtacacaaatgagtggtaaaatacagatttgagaatggtatgcgtgcaacactgataaggttatatatgcgatgatatatggacaaatattcatgaacaattagggaggatataatgaatgtaaattatcgacatgtccaacttttcaacttggaaaaaaggataccatattgattagtcgtgaaacttgaaccaatctaggtgcttgccatgctccttgattaaaagtgagtgagatgtcttgttcataagcatcaaacttttttgttgagttatacgagatgaacacgttaaagttgccttgatcagaacttaagaagtcataagctgcaaacaatgaattcaatgttaatgagtggcagatttgaagaactgattgagggcacattggagattacctgcagcgatttcattggtcttcttcttattatttccttggtagtaacctctatagagttcatcgttgatgagccacaaactgtcacgccagagcattaatccttgggtacattgcacatctattccatgtccaagtaaacattagaataactaagttgtaataacattgctagttttgaaaacagagaaaatgtctgtaaatgaatttattcacttttccatgttcattagaaccttaatagaccagtattgagaatagttgacaccattggtacggcacatttttctactaaacaatgtgcaacccaacttttgtatcttacatgtagaaaaacttacgtttagtctcggttgtattgccactttgatatgtaaaagaaagtgtctggtttggggtgcatgtcttctgaagaaaggagctgacttcaaaggaattgaaatccaactcatcatctgcctctgcctgcaattatagatacatcacaaaatgcctcaacacttttccatcttctaaacatacgcagcactaatacatactattctttaaaaaaaaagatcaaccagaacaaaggtcacactgaaatcaaggacactaaccagaacataatcagacaaagcggaaatgtcagacggtagtttcgccgaagaattatgagcagggaacatattgtccatcacccctgcatgcagatcaagctatcaaagactgaaagactgttcaccgtcagagtaaaactacaagtcaacatatgcatgtcaatagagatcggagatgtaaaccattttcagtcttaaaaaaggagaaattttatagtccttaaaaagtatccggatgtacctagattttacattttagtacctcgagatacctactacttagagatatcaagttttacatttgaaaatatgtttatatccagactcataatgctactcgttagtatcctattttatactaggtaaacactcctttaggacgatcttgtaaacacttgtaaccctcattttcttcttaataaaatttggtcggccaatccttcggccgacccggtaattttatactaggtagcaatattttaggacgaagatagtacttcccgatacatttttaaggatggtaaatttttttttaaaaaaaataaaacaacgggacaagagcacaaccttgtaactgcaccaaaagaaaagaaaaaggagcatacttgctacaaacgatcggttgccgccggtgacaaggaaggcggcggcgcaggacccggcggctctgcacgaggcggcgtcggggagatcgccggcggacgagaggaggtccccgtccccgacggcgcggcgctccggcggcgggatctgcagaaggggcggccacttgggggcacgcggcagcgcgcaccgcgtcgggcagtccaacccccccgtggcgttcgccgccacggcaacgccgccgccgcacccgccgcagtcgatggaggcggcggcggcgaactcccgcagcatctcgacgttgatggcgatctggaggcccccgatggccgagaagaggagcagcgggaagaggacgatgcagcagttcgtcttccccgcccgcctctgcacacaagaacagcaaaatcgagctccatgggtgactaatcttgacgaagaaaaacaatcttggtatgaacaaacatagcaaaatgggtgggaaatcgaatcttggaatcagaaaaaaaaacaaaaaatcgtgcagcatcggaatcaccgcattgaacataacgagaactaatcccctgaacatgcgacttcttttcacccaaatccgcgagcagaaaaaaaaccaccactaaacaagaagcatttcttcactgattctaagtttctgactactgaatcatccaagcaagataacgaagaagccacaaaaatgttctttcaaagaaaggcataattctgctgataaaaactctacggctcgacgaaatcgagcccgaaaaacgaagagcaagatcgatcgagaggccatcaggccatcacctggatgacgaggcttttcctgaagagggcattggtctgcgcgaggcagctggctgccatggcgctcgcagctcgcagctcgcctcctccaacctcggagaagccgaagcaacaagagaagagacgcagacgctacactctcaaaccggcctgagtgtgagtggagcgaggcggcaacgttaatacgggggaaaagctttgcctcagcgaaatgacggttttgccctcggagagaggcggcaacgttaatacgggggcaagctttgcctcaccgtaatgacggttttgcccttgggagtgaaggaaagtggccgcaagtgggtcgtcgtcaactcgtcatcagtcgtcgcgagtcaaaggggaaatgacgatcacgagttttttttttcttggtatgaaaagaaagaggaaatgtgttgcaaatttgggtgacctgaattaatacgcggtctcattgttgggtgggtatttgctttttttatttgggggaataaagatggttttggcatagctatctatctacagcattgaatgtgtgaggacttgagaatgtgatttgaaagacattattggctaggcctgtgtgagatgtgatttgtaaaccattattgattttaaatttcaaaattaatttattgtttttaattttatgtttttaacctcacacatttaaacaatgaagaatactggtataaaagttttgccaaaattatttttttcaatgttcgatcaaataatttgtggctgagttcgtttgctgcagttgggaactaatctcccgtgtacacaaaacggagaaactcattagcacatgattaattcactactatacaaaagatttttcattgcagaactggtcgcgtttaggaaaatatgacctatttttacgtgcggtccatttaagaggaccacatggaaaaatcgatttttccgtgtggtctttggacagcatattttcacgtaccgacctattaagagaactactcggaaaaatacccaccctctctttccctcctacccactttctctcctctcctctttttctcatctcctctattactgtctccactttcgctcctgccctctgctctcctcccctccccttccttccctccccgacgacggtagtggcggcggcgtggcgacggcacgcgggatctggcgggtggtggccaagccccacaaggatccagcggccagctgccctcccccgcgggatcccgctcccctcccctccccttccttccctccccagatccagcagaggggagggcgttggcggcggtgcggcaggaagggagcgcggaggtcggcgggagggcgaatccgtcggccggcggcgcagaggccgccgccgccgatgatgagagcgggagcggcgtcctcagccgccgctgacaatgaggaagacaatgaggaggacgacgatgacgaggaggaggaagaggcgatggcgccgccaccggattcgtttttttgaaaaaaaaatttccggatttttgtttttccgtgcgggcaacataagcacctgcacgcaaaaatcgcgattttcgcagaccgttggattcgtgcgggccgcccacccacacgggaaagccggtctcgtagtagtgattaagaattagcttttttcgaaaaatagattaatataattttttaaaacaactttaataaaaaaatttatttagccgtttgaaaagcatgcatgagttggaaaaggaaacaaacaaacacaacctcatttgtcttccaggcgtacttttcacattggcacgttgatcccatatgaatcaagagcataaattccaggttgcaaatttagcatccgaattgcttatttcatttcattcatcaaaatatcttcacaaaataggatggaagaaataaaaatctacacgacgcacgcgtgtcactctctgcaaattatcttcatgtcgccacgggcatgtcgtactgcctgtatccatctcttcaccagcctagcgccgccggcacggcggcgcgggggcggccggacggcgcgacgatgttgccggcggcgtcgtagttgatgacgccggagaactcggggagctggcacttgccgcccatgaggatgttcttctgccagacgcacgacggcggcccgcccagcccgtcgtccgccagctcgccgccggcgccgacgccgacgacgccgggctgcacctggtggatgctgacgatcaccggctccgtcctccgccggctcacgctcgccagcgcgcgccgcagccgctccggcgccgcgtgcgacgcgcacagcgccagcgccagcgcgcacacggccaggaacgccgccgccgccgcgccgagcttcccgcacgccgccgccgcggccaccgccggcgtcgcagcgtgcaggacgaggtggtggcgcgccattgctagctagctaattgcaattttctcgtgtgcgagagatcgttcaggctcgcgtcgttggtggtgtgtcttcctgtgatttggagctcgctagatttttatactaggtgaggactagctagagtttttttttttaaaaaaaaatgttcccgcgctttttgtggagttgttttacttgcttgcaaggagcagcagtgcatggagttggtaagggtagtttgctagctcaaacttgcctaactcaacctgaaccatttcacttttcaagtcttgtggattgccaaggtgaggtgacactgtacatatctgtaagctgcaagcctgctcctactagaaattgatgtaggtcttgtttagattcaaaaatttttggcaaaaaaatataacatcaaatgtttggacacatgtatagggcattaaatatggggaaaaaaactaattgcacagtttgcatgtaaattgcgagacgaatcttttgagcctaattacgccatgatttaaaaatatgatgctacattaaacatttgttaatgacggattaattagacttaataaatttgtctcgtagtttacagacgaaatttgtaatttattttgttattagtctacgattaatatttttaatgtgtgtccggatccttcaaaaactttaaacacacccttagtactgtagcttttttgtggcagatgtaagttaagggtgcaggatggctattgttttgcttcactgggagtgagcgttaactgttttgttgttttcacatcatcaatactccatataggaggaaaaagtgatccatatctctatatggtcttgctcaagtactgtggaagtgagccacatatagcagttcatatgtatatgagcagaccataagaataaaaaagtaataatattctcttctaagttcccatcatatgctggtgggtcccatattaaagtttacacatcataaaagttgaaataacaagagctcactgcttggtaaatacagcactgcttgtgatgagataaaaggaaaccttattgatcttaaagaagatgatataaatactccaagactacctctagcctctctacctaggatgcacttaacctatatttattgaaaaattaagaatgaaaaaagaacgacatgataacgaatatcgagctacaagcctacaaccacaagcgattttcatcctcataccacaccgaagcaacactcggactgcttcgtgattattgcccaatagtgaacaaatagaaaatacctcaaggtgttgccatttttgctgttatctctcaagcaatccaatcctagttcttgttcgacaagaagaattgtgatgtttgacatgcatttttcatttccatgagtgtgaggatctagatatatcatatatcatggttttggttttctttattcatgattactctatctacaacacaagtctctgcataagttcatcatattgccgttttgccattccattccattccaaacaagaaaaatactagtgaccaaggctgttttccagttcatacggcgcataataaatcaattggagtgacaaatgctaattcaaacttcaaagcacataactattttacgtgcaattggttcgtcgtatcccctgcttcttatcacttaactttcaatttggggcaaaactctctttcaagatcctgagggcttctccaatcccgtcctgcgaaaagcaacatgaaaaaaagttagctacagagttccttcaaagaaaaataagcatggttagcattcgtaatctgttagtgaagaacacgcctcagaagaaagtttgttagcgattctggttgcctgagctttaatttcaggtgataatgccgatttgatagctccaatcagcatatctgcagcactgttgatgcttgaggcattgtcagtatccggaattagatgttgtcttcctaggggctcaggtgccactcctagccagtgtagcctttctgcccagtaaaactgatccagcaggaaaggacatgaaatctgcatgacaggattgtgtgagcaatctgaaaccatctaataacataattttataacagccatgtaatatgttgagtatagaatatagaacattatttgaatatttgcctgtcaccctggaccactccataggttgtttctaagtgatgtcaaaaacaagagtagaaagaacaacattgaaccacccgagtgatcaaacaatacaaaatatatcggtgcaaagctgctgtatttatcacctgagggatgccggcaaaaagtgctgcagctgtagatccactgttatggaagtattggataattagaaattctgtagagtaatgggaaaaaattttcaatcatatgctgggccacagtgagaaaatgtaaatttattttacctgccagcatggtgaatagcaactgcacatttaggaaacagccaactgtatggtattgatctgaaaaggtagtcatgtcattggccagtgcatgtacaggtttccagcaagaataaagagatttgtgatattactcacccagaaaagcaaaagagtcgaccattaaaaaggagattgctgtcacaatgaagagcagatgcctgatactcacttgattctgctactgaaggagcaaaatattgtattgcagaatctaatggctggtatccagatgagaaaaggataaatctgtaatctgttttctctatgacagctttaagcaccatcagaaatgcttttggatttctaagaaaacccatgctgcaggaggttgatgtcatgataagtataccaagaaaggcctaattcaaatttttgctaatgaaatagaagaaatttgactcctaaagttatgaaaataagcacaaaataagaacagtgagcttgtcaacagcagattcaaaatgcgcatttgtgagcggtcgatacttctaagggcatgagcgagatgtcaacttcatcaagggtgattctcgtatcttagtaaggtacaaatcagataacacttatggagaaatcatacagctctaaagtctaacaaaccaaatgttaaatatataaacatatcaaggacactgcactggctaagagaaatgtcgttgtgaaatagaaaaacagacataaattcgttagaataagaaactcacctaccaatggaacttaatcctataaatataggtaaggacgaataagaatttcccatggtaaagtgttctaggccagcatgatttacacagagagcaccaccagaattactggcatttccacacagtaactccttgcatttattacaagaaaattgccaagccataggaagaaaccaaaaaccacaaacatgagcgctgaatggccaatatcctgtcatgatgttacacaataaatatcaaactttggtttcatgtgaatgaatcctatattattatatagttcattcccactaagtatagttaatgctatttctctcttatctcatgaagctacatcatcccaattatttctactctttggatgatagatctatggtacaaacacttctttcttctctcataaaaccatacaatctcaattatttttaggctcaaaattcataagtatcaattacataaaatatgttcaccttgcattatatttgcaaccatgtgtaaattatatagaacataggaagtcattttgttttggcttagaaaatatattacagcttatttgtatatattttcctgcagcaaatacggcggggtattcatctagttaagtataaacatcctgtaaggatttaaggtagatacaaagacctcagc

SEQ ID NO: 6122 - DNA, 25023 bp, Oryza sativa
cgctgaggtaagtcctcaccagctagatcccttttcctcgcatgaaattgatttctccttttctcctcatgttttctgcttcccaattcctttagatttgttgcacctttccaacctagtcgcgattcctagcctttcacacaaaaaccactattttcttggcctaatcgacaatctcgaccacactgatttcatcatcggtgaaaccaaccggatcccctttagactagccaaccctaacctgggtcactggaagaataccttcaagtcttggccatctctcgaaaaacctactcctgataagagctggaccacctggtaccaacgcgtatcggctagtaagaaagttcactgcgatgaaattggaatcggccaagcacttgctctcaccatagccaattctgctaaggatgaacctttgatggctgccgccacctacttttggtccaacaccatcaatgctttcttattcaaccaagggccgatgactccaactttaatcgacatcaccatgattaccggattagatgtaacttcatcggctaaccctatgagtatgaacaccaagaaccaatttgacttcaagaccaaaagcataggtggctggtctggctatgtggcggcatatatgggccaagggtctgttacccctcgagagcatgtagctttcttgctcatggctggaaaagttcctcttcagtggatccagttgtggccctacaaccaactggcaatttgtagccgaagccttagaatcaaagaaagaatttcctttgggcaaaatccttctcggctatctgtaccagatgttgaacaatgcattggctaaaatagccgttggctcaatagttggagcaggtggaccatggtggctgctgcaaacttggttaaacctgatagtcatgaaggttgtcaatcggccctctgtgacagaagctgaattcccattgccagagccgattgtggaagatgacggagaagagcgcacccatcgcagatgcatgtcatatggagaatatgcatccacaccaaccgatgctggagcgaagctatcggctgagctactcaaggactggttctgcagcttctacgaaggttttaagaaagatgcacaaatctggtttccttatgaagactcagcagaccttgaacttccatcagactttagatttgaagacattaatcatgaaaaattccaaaaatccagagaaattcttatagctgcaatcagcccatgcatcctccctgtcggcattcaccaagggagaaacatccaagtctcatacgagttttatcacctaatgagctcggccagacaacttggattgggccaactcccaatcggcttattctttgccgacaagattcagtgcccaggacaaatcacatccactctaatgatggatcggctacttaacctactaggaccccctttgggcagcattaataatattgagttggcaggatttagaagcaaaaagtttgacagatggtggggtgaatggaagctgcatctatttcatcaatcgacttcaatgtatatgacagatctattccctgacgtcataccccaggtaaactttgtcattactaaattgcataaccagttagccgattcattacttgactaatctcttgctcctgttttgcagacaacagagtcctcccctcctcatcaaagtaacagtggcaagaacattgaatatgcttcaggtctaattccgaatggaggtggactatctcccccttttatcggctaccatgcccccaagacttcaactctccttcatggcctaactagggaaccagccgatgcaggcaagaaaaggaaaaccagatcatcaaccatgagtaccttagccttggctccaaagaaaaaaaccaaattcaagaaaactcaaccacaaccaactgatatgccgactgatgatctacctgccttggatccatctattgaacaagctttagatgaagaggaaattggtgaagatgttgaccaagctatagccgaaatgagtgacacagaaagaacaccatcggcttcacccaagcaaacgcctccaactccttctgcccccgttcattttacaagagtaagtacctctctctgacttcttctgaaattacctccctcttcggctaattacccatagactttgtagttgcagaagaagaaaactgctgtgaagaaaaaaccagcagcaacaattgttaaatcggctccaccagtaagatgtccttaattcttttacttaatcaatctcaaccgattctatataacacttgtctatttcgcagcctcctcctccttctcctcctgtacagcaatcatcaagtgatcagactccatcggctgtggggagtcatcacgtcgaagaggaagaacaaccagctgctcctgctatcccagtaagtttccctttgtctccacaattagattggctataatttacccagctcttattctttccgaaattgtctctgcatgctctagccgatctcttctcttttgacatcagagattaccttgatgaggcagaagaagacacttcaagcaaagccctagctcccctatccgatgatgtgagaaaaacacttgaagacatctctcatcggctagaagcctcttctttagacagtttggtagttgactgtgggtcaattaggacacagatgcatgaagttcaatctctgattcccgaagatttggctgatgtcctaactccagccgcttatctcgagcaacatcagttcaagctggaaaaagccaagctaagactagccgaacgccgtgagcgcaaagagattgaggccacaatccaagctaatcggcagcttgtgcatgaagaaaaaaccaaacttgatcagctatctgaaggtccgatcaaatccaatattgatcggctcgaagctcgcaagattgagctcttggcgcaacttgaagaatgcaatgccgagctagatatggaacacaaaaagctagccgatctcccaaaattaattgaagaacaaaaagcaaggctcaaatcggctatcaagaatgttgctgacctaaccaagtccctgaaagtcatctctggaactgatgctcaagatgtccaaactattgaagaagtagaacaaattaggcaaagggctattttggctatccagcgatacttgtctcaataacttttgtgtaataggactcagaaattttttgtaatcagctaagatgctctagtactttactgtcttgataatcctttgtgccgattaattatgactttgaaattcgctcaaaaaatttgcattgcattttgatatatatgtgcccccctaattttacaatgacaaaagcattgataaaattataaaacaattaagggcgatataacaatatcggccattgtacctcggcaaaccacaaccgattacaccatgaaaaacaactatgggcgatataaccatatcggccattgtacatcgacaaaccacaaccgattacaccatgaaaaacaactaagggcgatataaccatatcggccatctcaaggcgatgcaaacacatcggctgtcatgcatcggcaatactagccgatcatgcgttaacccaaacacttgggtaatatttcttcaaatacttgccattgagcgctcgcccatagacttcaccatcaagcccttgcaacagatatgctcccttagacacaaccttataaatttggaatggtccttcccaattcggcgaccacttgccgaatttactatcacgagtaccaatcggcaaaatcaatttccatacatgttctccttccgaaaaatctttaggtaccactttcttattataatccgagcaatacgttccttatccttggtaacctttgcaagggctcgcaatcgtgactgaaccagatcctccctctcatcggccataaggttgtaatactcatcagctattaaatcgttttgtaattctgttcttcgagagccgattctaacctcccatggcaaaacagcctcatgcccataaacaagtttgtaaggagggacttggatcgatccatgacaagccatcctataagaccacaacgcttcggccaaccgagtatgccattgccgaggataatcagaaattttccgattaatcaatttgatcaaacttttattagacgcctctgcttgcccattatcttgtgcataataaggtgaagaattcaataatttgatacccatgctatcggcaaactgaacaaattcgtcagacacgaagattgacccctgatcagttgtaatcgtttgaggaataccaaatcggtagattatatattcttgaacgaattgaattgcatccccataatcaactttcttcaaaggaatcacctccacccacttggtgaaataatcagtcgccaccaatataaacttatgtcctttactcgatggtgggtttatcataccgatcatatcaattctccaacctctgaatggccatggcttaataataggattcatagccgatgccggagctcgttgaattgccccaaacttctgacaatcttgacactccctataatatgtgaaacaatcctccagcattgtcggccaaaaataccctgcacaccgaagtaaccacttcatcttatgagccgattgatgagtaccacaaattcctttatgaacttcgccgattgcaactttagcctgatcggcactcaaacatttaagtaacactccatcaatcgtccgataataaagctcatcatccaacagagtatactttaatatacttatatatcaattttctagaagccgattaagatggattatgcaaatactgatgcacatcatacctccaatcatcggctgtcattgctgcaatttcaaccttaacatctttgatcatcggcttataccccgatgccccttgggccaaatcattagcttcaatattttgttctcgagagacatgctttaaagtaaccagccgaaactccttcattagttcttggcacttctcattataaaccatcaatgtatcattcttgcattcatactctcctaccaattgactgattactagcaaagaatcccccatgatttcaatggtatcgacttcaacttccttgagtaattgcaaccctttgagcactgcctcatactcagcttgattattagtcgcatacggtttaatagtataagcaaactcgaaacatgcccccctaggggaaattataactaggctgataccacaaccatgagtacacaccgatccatcaaagaataaagtccatggcattatttcaaccgagccgattgaatcatcacgatgttccacaataaaatcagctatagcctgtcccttaatcgccttcggcgactcatactgaagatcaaacttggttaaggaaaatatccactttccaacccttcctttcaatattggagccgatagcatgtacttgacaacgtcggccttgcatataacagtacactcgttggactgtagataatgcctcaaccttgtacacgaaaaatatagacacaagcataacttctccacaggggaatatctagtttcagcatccaagagccgatgactgagatagaatacaactcattccttcccttccaactcctgaatcaagactgagctgattgacttctcaccggccgataaatataacctaaacggtattcctttctgtggaggaataaaaacatgaggagagctaagatattccttaatattatccaaagccttttgctgctctgcccccaagtaaactgctgaacggctttcaatctcaacaatagtgtaaaaggttctaaccttccagacaaattagaaataaaccttctaacaaaatttatcttgccgatcatctcttgtaattctgtcttattctccggagactgaatcttcttgatcgcattaacactcctttgagttacctcgatccccctctcatgaacaagaaatcccaaaaactggccagccgatacaccaaaagcacattttgttggattcatcttcagtccatattttctggttctctcgaaaaccttcctcaaatcagctatatggtcctctatttctttagacttaacaaccacatcatcaatgtagacttcaaccaaccagccgattagatcatgatatatgtaattcatggctctttgatatgtagctccagcacttttcaagccgaaagtcatgaaaacccattcaaataagccgattgcaccaggacacctaaaagctatcttatgaatgtcttcttcggccataaaaatttgattgtatcctgcgtttccgtccataaaactcaaaatcttatgtcccgaagcagcatcaactagttgatcggctactggcattgggtattcatctttcggggtggccttattcaaatttcggaaatcaatgcataccctgaccttgccgtttttcttgataacaggaactatactagaaacccactcaacatatcggcaaggacgaataaaaccagcatcatataatcttttaatctcagccttgaccggttcaagcatgtcggctttgcatctcctcggaggttgttgatgtggcctaacccctagtttgataggtagccgatgttcaacaatcgatcagctgagtccaggcatctcgtaatatttccaagtgaagcaatctctaaactcttttaagagctctatcagcttggttctaaactctggacataagttcttactaataaatgtcggccttggccgatcgcctagacctatgtctacttcttccaaatcatcggccgacatgaaaccttgaccttgcttgtcatcgagatcatctaccgtgtccttagtgtagacatttgaaccctccacgacgccctcaaaataatagcttgggttctccatcttcaattggctgtatatcagaatcggacacttttagaaaatctccatcccagacttttccagataaacaatcaaggccatccatctcccaaagagctaaatcggcactggcaacattaactgacctgtcggctggcacgatctctatgttgtcgccttgccactgaatcaaacattgatgcatagttgaaggaatgcaagaattggcatgaatccaatcccttccaagcaacaagctgtaagaacctttcccatcgatgataaaaaacgtggtaggaatagtcttactgccgactgtcaactccacatttagaacacctttggtttctgatggattgccaccaaaatctttgagcaccatgtttgtcttgatgagatcctcggcatttctacccaacttcctgaacgtagcatagggcatcaaatttaccgcggccccaccatcaaccatcttttagacatcggcttcccattcacgtagccgtttatatacaatggtttaagatgccgattctctgtcccctcgggtttctcgaacactgcctattctggtgacaaccaacttagccgattcctcctccacctcgtcgacatcggcgtgatcgatcccgaattctgctggcagggtaaagaccatgttaaccggtgccgtcacaacactcttcccttttgccaacctctttgcctcatcggctgcaacatcatcagctacaggaacctgattcttaacacgccactcctgccttggctttgctttcttcagccgatgatttatttcttgttcaacctcctgaaggcgctccctgttactcaatctttgaacccttctcttctgattcttcttgaaaataccagaaggacaccattgattcttcctgattacattgtcctcttggccatgatcttgatttactggacccaatctttgatgaacagaaactcttgtctgccttagccgattacccctattatatgatcggcttgagttctcgacgatgtcactacacccagggcagttttcaatagatggcaacctcataccttcattccagtagaatctaaagaactcacatccccaataaggattaaaaccatcatcgtatttctcatgatgcttctcttgctgcttgtcatacttcttctgatatttgttgataatcttagccgaattcacctgaaaaccccttgcacgggccctatcggctgtctggctagctgtatgcaccatattaacaggaaaaaggttaccatcgaccttcatcggctttttggaatcatcaaacctaatcttgcctccctcaatggccacctgaatctgctgtctaaaaaccttgcaatcgttagtagaatggaacccagaattatgccatttgcaatacctctttttgcctaattcctcagccgatgggattgtatgaccagtaggaagttgaatttgcttctctcggagtagcaaatcaaagatcttgtcagctttagtaatatcaaagtcatacttctcctcttttccagaactttttacccattggcacggtatgacctttttactcctcacccactcggctgcagctatttcagaatcgtccttatcatcatccgacccatacatgtacggataagcatgattaaccttcttagagtttttcctaacttccgcggacctatgttcatgcaaggttactttctgtatcagatgtgacaagctatcaaagtcttcagacgagaatttctccctaatcggagcaatcataccctgaaaggccagatcggctaactgggcatcagttaaactcaagctaaagcatttgttcctcatctccctgaatctctgaatatactcgtgcacaggttcatcatgccgctgcttaattgctatcaagtcagataatttcatctcatgaaccccactatagaaatagctgtggaattgcttctccaaatcggcccagctattgatcgacccatacggcaaagaggaaaaccaagtaaaagccgatccagacaaagataaccggaataacctaaccttcagagcgtctacaaccgatgcttcaccacactgagctaagaatcggctaatgtgctcataagttgacacaccatcttgtcccgaaaatttggagaagtccggaactttgaaccgattgggaagaggaactctctcaaaccactcagggtaaggctgtcgatacaagcttccagtctcttttggtttaaacccaaactattccctcattacgtcagcaatcacattggcccacagtcgttgctgagctaccccttgtgactattgctgcatgggctcgaactgaccgtattgaggcgcaaactgaggttgagccaatccccctggctgatattgggcttgcggggaaggaggctgatattgataattcaagttacccccttggtaattatgaaggttcggctggatattacgtaccaaatgctcaggaacaacttgaggtattactgtgccatctgactgtacatggtgaaccaagtgttctgggacaacttgatttaaaaattgttgtacaggctgaccaccaggcgttgcaaacccggccgatgcgcctaatgaaccttggtgctggatcggctgaacgatttgttgtcttaacggcgtctgctgaatcggctggagaggctgctgcattggtggtgtttgctgaactggttgcatgacctgttgctggattagttgcacaacctgctgaattgggggtgtctgctgaatcggctgctgctgtattggatcaacaataggttgaggcggcagaaacgtggcagcaacctgatcttgggtcagccgattcgcaacctgcccgccatgctgtggctgctctctcattaacaaccgagggttcactggctggtctggtgccattgctgacagaacaggcaggggagttgacgccagtgctgtcggctgagatgttggtgcaacggagggaaccgcctaagttgatggttgaacatcggtaatcaaagaccgataatttgggaagacatctccttgcaaataaaccgggctgcagcctgatgctcagctattgaaccatcggctatggacttcaccatgtttgataaggtattgactaacaccccagattgattgatcaaagcatgatgcacagcgtagtcaacccgatcttggaaattactgaaaaaatcttgtgccgcatcactattctgattaatatttcctccttgcaacccctgggcaccatcaccttgaactccatgcaccccgtcaccttgcactccatggactccttgagaattgtcaccttgatttcctagagagctatcggtagcacttttgttactcagctgagccgagccgtctggagcttatttcccatctccatccttagaagaactggtccccggatcatcagcaaccacttttattttgtacttctgaacaaatgtccccttgcgggtttgcatgaatgagttcaagaactgatcccgtgcttgctgcaacattgcttcaaactctttcttctgcttaggtgtgaatttttctggattgatcggcacgacgtttccttcattgacgtcagtcaaccctaatttcagcatcttttccttaacagagcctgggctagctagggatggtggtagtggttgtttctcggccatgaggaagaattgttggctgacttcttaaaggtcccaccgggcatgccaaaagcgtgttgacagaaaacacgaggcctaggagatctgcttaactccagtgcaggtccaaagctcgccttcgaatgtatgagcgtgccagttgatttgatcctgtaatcaacaagaaatagaagcaaagaaaccgcagttaaatatataaatgatagccgatcggctaggtgccgatgacacatcatttatctggcagccgatgtcatatatgaatcgatcggcggttgtaaataggcaataaagaactaaatctattcgatcggctgtaaatattaacaatatatagttcctataccgatatatacttaaatcaagtgactgggatagatcggtcgccatgccgagacagtatgaatcacttagatcaaaatatatattgataacagccttatatatcttaatagcatagctgatcagatagatctagcatgtatcggctaatactccgatactactctatatcaggatactaaaacaagtaaaatatatcaaacaagagcctaatatacttaaatgcagtaagatcttgacataaagggcagatttaatgtatcattgaagcatatagagcaaatacgattaaatcaggtaagatcggctgaaactccgacgctactctaatcggcgaccagagggcaggctagaaattgatattctaagcatgactttatagatcaaactcaactgatgtagcattaagtatgaaaataagaacaatatctagacaatcaagccgctggaagtttcatagagtagtagatatcttatataatctaggtcaacgtcgctatttaaacaaatcggctgccttctgttaacagatgttagccgattgtaggttagatgacgatattgtcgaagattatgtaagatatatgataacttgacgaattacatagacaagattagagtatcataaagatggaagcactaatcccgagaacataattcatcataacaagttttacctcttggtgaaaatcgaaaccgatgcagctcaacccgaaagcaagaactcgtcgaaataaaactaaagcaaaaagggtagcgatgtgtcacgcccagaaattcacaagtaatttccgaactaatttgtgcattaaaaccctcgtccaggaatcagccgaggtacacaaactgacaatttaatatacagattcatcaaaataactaaaatgataaatacttacataagaggcacttagtcctcaccatgaagaaaactgcagcggaaaataaaatctagcgaagcttcagctccactcccacaggcagctcaactgggatctaaaccaaaggtcttctccttctggatccttttcttcaactgaggtttgatgattattgcaaggtgagtacatggaatactccgcaagccacacagcaagtatgcaagtgcacatggataccaaaggatggcataatatagggttcatttgcaaaagcagcatttagcaaagagttaagagtagtaaaacagtacactaattaatcatcaatattaatcaacactgaacagcacacccatgctgctcaggcccaaccaaacctgaacaaccaaccccggtcgtacagatcaaacctccaaaccaggagtcaaattaattatcacattattatcattaataagtagtctggaactaatcacgaaaaacattgttagacccgcctataaccgcgggcacagctattcgaatagttttactctggccagagatgtaccaatgtacccacaagacacgattccacacatgttaccatgccccgaagtaccaccacggcactgcaaagggggaaatcgtgacagtaccctttgcacaacacaactcaccacagtgcaccattcctggatcataatctccaactcaaaaccagagacaatggactccccagcgacccccacggacttctcgccgcttcatagtctgacaccccgtaatgaatcatgctatacaaaagataaagccgttgcccacgctggcttgtggttggcatggttaatgtttcacaacagtagctcgcgaaccggtccttaattatcatgagcacgaccctcaaaaccatgtgctcacaacccaccattaatcatattttaattatcaattaattatcataacacgattgaccatcgtgagctaccattaaatataaccataagtaatagtgaagcataatttatctcattaatgagctaatgtttctaagcacggctaagcaactataaataacatctaactgaatcaatccaatatataaggtccatgctagtcaaattataacccataggaaaataaagtcatcttcggccagaattaaatgggaaaggctcaccacccaatgacattcgaaaataatgcataagttgaaataaaatattagctttaaacgggttcaacatgtacaaagggttgtttgggatctgtgtgacttgccttgagcttccgcaaacgcttctgaaccttcctcaacgtaaacgctctcctccagaacgtcggaaactaaagtaaatgaacaaaatcaacaaaacagtacaaaacaagcataaacagtacatgtggatacttttaacatgtaaatctcgattttagatgaatttagcaactttaaccactcgaatccgagttacgatgattttgttatgaatttccgaagtttaatcgattttcagctaacagagaaaactaaaaaaagatttatgacgtcatcgctgacatcatcgccggccatggcacggctccacgcgaccaccggcaaaagggagctcggttggactatccgaggacacctacgcgaagaggacgacgacgcgaactcaccggtgcaagaaataatgacggacgacgacgtatagcggccggcaacgagctccgacaacggcgcggctcggctcgacggcggcggtggcgctccggcagcttgcgacggcggctaaggggcggccgaggtactcctcctccgtgcacacccgacggcggcgacgggaagcggcgacgacggctacagttgcggcgcggcgcggctggaaggcgtcggcgacgtcggcggctagggctacgcggcggcggcgctacggacgatggctcggcttgggacttgaggcaaacggaagaggacggctaggggatgctatttatagccggaagagggagagatcggctcgggaacggatggaatcggcgacggattagtttgggttcgccggaaaataggaactcaaaaccgcgtcgaatccacacgatataccacgagactcaagggggtttcttggggataagatagaggagatcgagaggaatccattcccacaactaatttggaaagaggagcaacggagaggacgaatttggtggggaggcggcgctgtacacgggcacggcagggaggagatcgaccggctggaggttaggggcgacactgtagtagagggagacaagacagacttcttgccgggcttcatttcctcggcccaatgaaggagggaagcaaatagaacttcggcagagagaggaagagaggatgcaggctcgggttgggccggcggaagagagaggaagaaagcgaatgggccggattcggcccgagacaaagaagaggattttaattgactttttaatttaaataattgctgaaataatgttccatttattaaaaatacttccaatgctcaaataaatccaagaaaaattctgaaaatacttgggcacacaaagtatttgatgaaattttatctagctcatgtttaagttcaaatttttcatagattttattcacacactttctttaattattaaataatttctaaaaaattcctttttcacaatgatttataatttagcgatttttagggtgtgacacgatgcgccgagattgtattaaacgtgtgtgttaaaagttacatagggctcgggtctatttatacccgagaattacaagatatatccataacggacacgactactatctctaacaaactctaagataccataagtctttgcggcagatttttgcccaaacatatatctaaggtaattacataaaacatcctaattactagatacaattgccttctcaggactctatccatgtgcggcaatcaccttgaagcgcctcaattcaacccgatatcatacatcaagttgcatcgtcggaatcggctgcatcggcttacctagcccgactcagacccagccgatcctactcgtagccgatctggactccagccgattcctactctgtttccaaactcgatctccgcctccgactttgcttcgatctaatcttctttcccgatgccaatattaccaaatttggttgctaacacatctgtgttgacgaaaaaaaaatcgaacacacatcggatgatataaaggcaatcggctgatgatgatgcaataaaataacaatataatccagtataaaccaatcggctagcaatgatatgataaataagcatcgatccgaaggttaaagcacacatcggctggaggtccggtgtcatgaaatccacaagattagattaaacagtgaaacctttgttgtcatcggcgaaatgcaacttatatgtatgtgcaatccttatgagccgatgcaacgtccagataactcaccggctgaaacctcgatgaaacccttgttgtcaatcaagaagcaggctagagattatggttctaagcacgacttagtagatcaaacttaactgatgcagcactaagtatgaaaagaaacataatatctagacaatcaagccgttgactgagttttagggtggtagatgtctgagctaatctaatctagcaacgcgatttagccgatatcggcagaaaccctaaaacgagaagcagccgatatagctaaattgatatgctaggactagattaatagagacatatgataaataggtaggcaaatatatcatccaaactagagcaatccaagaggtcgaatgtactgatgcagccttgaacgacgccgatgtagatgagacaattgcctgggccgacggaacattggacttatcccttcgccggagatcgaagacgacgcagccccgcgtcgggtgccaagttccgccggaacgtaaaaaacaaaagtagaagtaaaaaaggtggcgatgtgccgaattgtattgatcgtagagataaattacatagacatcgggtgtacatatttatacccatgggttgatacaagtccttgtcggacaagaaagaaactaacctaaagataaaagaaaaatataaagtccttatcggacactaaacatactttcctaaagataaaaggaaactaacaaactattcctaattaatagataaactgccatgccacatcctttttaaactcggtcacttagggataagcttcctttagtagattgatttccttaaccaaatatagcaggaatccgactattggtgacttgataactcccatcggctgattccgagatgctgtagccgataatgattctaagccgatgacgtctttaccaattacaaaatttcactgttaacaacgacatctaaagattacggtatttgttagtagacatcgtaaaaacgagattttgcttttagtatcccagaaacttggtaattagctactggacattaccagcaacaaaataatatatacagccaggagaggagagacatgttgtgtgaaatgtcatttatacccttttcttcttgtaccattatcttcaagttcctcttctgttcttccactgagcatcaagcagtactccacggccctcttccaggaaattgtcaaacattctcggtgagcatcggccaccacacacacgcgacgagctgtaccttatctctccctagctagctggccatagcaagagccgtaaactaccttgctgttgcagtgttgcttgccatagagagcctctactatacaagagcttcatcatcaagaaccgccgccgacgctactgcttctccagctccgaccgtgccgacgccgacgccgactccaccgccttctcctccactcccgcctcacgtgccctgctgcaagaacgtcggggagatcggacaccgatggtgatgacgagacaatgttgttggcgacgaacatcaccgtccgggtgcgggtacatcaccgtcgtgttctgccggacgggtcggccgcgttgagcactagctgccgcgccgggagggagttgttgtgtcgccgccattgtcccatatcactggaatggaaggatgaaagagaaggggatggttatttggggattttgactggttgactgattttgagtgaaaaaatgactgacagtcacccaccgcccaccggggaaaccgaaataggggtgcgtttagttcacgctaaaatagaaagtctggttgaaattaaaacgatgtgacagaaaacttgaaagtttatgtgtataggaaaattttgatgtgatggaaaagttgaaagtttgaagaaaaaatttagaactaaactcggcctagactagggtattttggttttttcaaaatgattctctctccgaataggcaagaaataataaaataatcgatgcaatgtatagcaacaaattactacaatgtttccaggatgtccaaaagcaaaaccttgtttttatcatatctagcagcaaagaccataatatttaaatgtcatttagcaaattttgtcttttaagtacattcatgccattgttttttgtgcgggacgatatttactatagatatctcaaatagagcgagtagaatggctgaggctaggccggcgagcagtggcaaatacataactaaacttaaagttaaagaacggttagtgggatccaaaagttgaataaaactatatatcaaaataaaaactagtttacccctttatccaaaattagatatgaacaagatagtggagttaaaacttgtctttgtaatatatttgaggatatccgcttcctatttcaacgatcttgctatgagtagggtttacaaaaccgtgcattatcccagttatcacgtacggtaaacttagtttttaaaaccactatgaacccgtgttaaccacatggttttcacggtaacatgttgttatcgcgataaccgtcttatcatcgggtgatggtacacccatccaaaacgccttggtgaaccccggctatgagccaggctgaggcttgctaggagagcttctcacgttagagccacacaatcaccaatgcaggtcagggcttcctcgatgaaacaaacatgtgaagaacagcgaaacaaaagacaagtaggaatcattaagtgatagccttggcccttgaccgagtacgtaactactagctaggtgactgtccatatatgcaagaatgcatgaccacctagcaaatatatgcaagaatgcatgaccacctagcaaattaaacgcggttggctcggaagaattgcatgatgatccattcttgcggagtgctataaattgaatggtatagatagatgaaaacaaaataagagttatatggttagcactttaaaattatggtatgactgttgtgagataatggagtgaaatgagataatggagtgaaacaaatcttactatagacgcagcttgtgtgccgtgcttcatatgctctcttctttaatagtcctcatttgggtattggtccgttctgtcatgtctattgaattatcgttgctccatggttggatgcctatccactacagttacacagttgttggcagtatctctttcctcgtattgtgcacagttgttgctagcacctccttcctcatatttaataggagaacattgtcataaccaaaacataaaattgatagcggttgtttcataagaccgaatgtaatctccgaattgtattatgatttatgaaatgacggcttttattttaataatatttttatttttaattttaatttttttctttgcatcttaatctttcatattttgttgaaatctatgccgcgggggttaatttgttgagttttcatgaaataaaatacttaggctattgctttattggaagaaattaaattaatgcaactgagggtacatataacatttcccctaaccctaaaaatgtggttacatgcatattaacattggtaattttcacaatggtctatagaggtagcataatgaatctaagcatttgtcttattttatttaatggtaatgtctattcatactatatgttaaattaattgtggtagatttttctacttatagtataaatcgatgatttagattgttctactaataataagactagtactagaattctagtaccagtagagatcagggtttatcttaatagtaaataccgcagtagccgtacatcccatagcggttcgttagcaaaaacaactagtaagtttcatatgatgtaaagtttgttattgttgataataatttataaaagaactaaatggttaaattacgatattcaagatcgattttacatattattctatatccatcctaaaataagtaaaacctatagtgttacttgtaaattgtcccattaataataactcattcaaatttcctctaattttacccccaactatcttcacactttcaaccacccccatttgatagggaacagctagttgattttccctcgttgttaatttatccttctactcataaaactatagttattttagaactaaggtaattttttagaatggagtaaagtgtttcgttgttttgtcgtcatcgtccatctcctctctctctgttttccttctctggagatcacatatatgttcccagatatagtgtcagtcccggtccttcattagttatttcccacacagatgatcaagtagcacatgtacgacgcgaaatataaatagatgtattttttttgtaattctacatcacatggaaatatcgatcaactatttgcattggagaaatgtataggttggataaaagaatatacgaagaacgtcaggaaacaaaattattcaacgacatgatccaaaaggtccccaagtacttgttcgaggtcggccatggcctggaggactccggcaagccgttcatctgggtggtgaaggtgtcggaggtggccacgccggaggtgcaagaatggctgtccgcgctggaggcgcgcgtggcggggcgcggcgtcgtggtccgcgggtgggcgccgcagctcgccatcctgtcgcaccgcgccgtcggtggcttcgtcacccattgtggctgtaactcgattctggaggacatcacccatggcgtgccggtcgtaacgtggccgcacatctccgaccagttcctaaacgagcggctcgccgtcgacgtgctcggcgtcggcgtgccggtcggcgccacggtgtccatgatgctgtactatatttccaattattactattatattgtggctctatattgcccattgtttgtttctttaacttcgacggatgtgaatttcataaattttgagtggcttattcttatttccaacaattttgctagttaactaattaattagtgatatatgccacataatttttaatttttaaaatagcttaaatttctgggttgtttcaagttacaagtagcactataggattttacttattttgggacaaaatttagatcgagaactgcacttattttacgactgatatatcataagacataaaatcgatcttgaatatcacaatttaaccatttatttattttataaattattatcaacaacaacaaactttagatcatatgaaactcaatagttgtttttgctaccaaaccgctataggaagcacgactgcctgtggtaactgctgttaagataaacccttatctctaccggtacttgggaagtacgactggccggtacttgggaagtacgactgcatgtggtaactgctattaagataaacccttatctctaccggtattagtagtattctaggtactggtagtattctagtactaggcttattattagtagaacaatctaaatcatcgatttatactataagtaaaaaaatctaccgacattatcattagataaaataatacaaacgcttagattcgttgtgctacccctagagaccattgtgaaaattacaagttaatatgcatgtaaccacatttttaggaataggggaaatgttatatgtataagtagaattcatgttaacatcaattgcatttgttccaatgaagcgagagcctaatattttattttaggaaaactcaacaaattaacccttgcagcatagatcttaacaaaagataaaagatttatgatgcaaagaacaaaaaaaaataaaaatcacaattaaaaatatagtaaaataaaaaccgtaatttcataaatcataatacaactcggagattaccatcggttttatggaacaaacgctatcaattatatggttttggttatggcaatgttctcctattaaatatggaagattaacaaatactatgagcggtgatggtaacaactaggcacaactaaagtgtatgcgcatccaaccatggagaaacaataacagagcaatacccagttgatagatggtgtaaggagtgttaaagaagagagtatatggaacacgacacaccggctacgtccattgtaagatttgtttcgctccactatctcacaacaattctaccttaattttaaagtgctaaccatacaaatcttgtctttgttttaattcatctaaaccattcaatttatagtactctgtaagaatgaatgacatgaaattattcatccgattcttccgagctacccacgtttaatttgttaggtggtcatgcgttctttcacatatggacagtcacctagctagtagttaccctggcaagggccaattctatcacttattggctctacttgtcttcattccactgttcttcatgtgtttgtttcatcgaggaagcatacatgcatacatcacgtgtgagtcggatgagtaacccctgaccagcaatgatgattgtgtggctctaagagcaagtttaatagtaatcatctatagttaatttaatagccaattcatacaatagttacctataaaaatatactacataattaatgtttggtcccacatgtcatacacatgtgcatcttagagtccgtgctacaactggctataaatatgtagcccggtgctcttctctctcgtcttttatctcctcgaaatatgtttatagctggcttatagtctgctattgtatcttctctaacgtgaggctctccaagcaagcctcagcctggctcatagccaggattcaccaaaccgttttggatggggttaccatcacccatggtgagacaattatcacgataacaacatggttaccgtgaaaactgtgcggttaccacgaggtttacagtgattcaaaaactaaaaagattaccgtatgtgataacagtgataatcgcatgattttgtaaaccctattcatagccagattagttaaaaagtacgatgcaaatatcctcaaagatatttgaacagactgaatttaatactaaaatttattgtctctaaattttaagggccctgtattgtcagatactctctacagatgctaatacacggccctggaaggccaagccaagcctgagttgcagcccatgcatagtaagccatttctttaatctcttgtcttttacttctattttacataattacaaattcatttttcaatctactatcttgttcatatctaattttagataaaagggtaaactagttttcattttgatggatagttttattcaacttttggatcccactaacagttcttcactttaagtttagttctgtatttgccactgctcaccggcccagccccctcagccattgtactcgccccatttaacatatctatagcatatcgtcccggccgtaccgaaaacaatgtcatggttgtacttaaaagcctgccaaaatagtggtgtgatgaaaggttattttagaagtaacattattaatagtctattgttagaatattattaaacatgtttagaaatatgtctttttattattaaatgtacaaaaaatgatggatatatagatttatgtactttttttaaccaaaggtagtgggggaggcccccacggtatattaattttccagtagtatgtacaaagaaggaaaaagataaacaatgaaggaaaaaaaacatctaagttacagctgatctatccatgattgaactaggggcctgtaacattctttgagcctaattaaatgtaagctcaaatctaacttcaagttcatcaaccagttttgcactgagggctggatgccttagaagataagtccatttctctccttacagatattccatgaggcaattaagaatagatccataaagcaagaatgcaagacagccactttttgagcctggatcctttgatgaaaatccaagttagggttccatgtccatcccagacaattccaacaagccgcactaaaaggacaaaggaagaacaggagatctctagtttctctggcattagctgagcaagagagacaaaggactgaagtattgggtggcgcgcagtgctttctatcaaggagatcccttgtattaaccctgtccatgaagaagagccattcaaagaccttaattttcatattgactttggactgtcatatccatttgatagtaggtgggggagtgagagccagaaaactgagcttgtaacagagtcgcgaagtgaatttccctgatccccaaacaaatgtccatgaatcatcaacctcctgaagggtaaaggattggagattttcttgcatgtccttatattcatcaaacgcttgctgcgaaaggggaaggaaaaattgatcttggggacctctagctaagtgttgtgcaatataatcattcctatgctttgcgaaggagtataaatggggatatttgttgatagaatcatgtactttttatttttagtacctcatcatagctggacatatgttgataattttcctacttttagcatataataataataataataataataataataataataataataataataataataataataataataataataataataataataataataataataataataataataataataataataataatataagagtagagctttttttttttgataatgagagaagattagagagatacggtaatacatagataagatagatgatgcaatagtgtcaccaaagcttctagagagaaacaaaagacatcagcggaccacctcgatggctaaaaacctttcttcatccaattaatctgctcgggctactatagctcgtgttcatgtttggcagtgttcgttgccacgtttcgatgtagcgatcatgtgtggaaaatatcatgccacgccataaatagtgatgtggttgtactcaaacgtacatcaaaattgtggtgcaaccgaaggttatttcgataaataacttaactaagcgtcaattgttagaatgttactaaatatgctgatgaaaatagaaaaataatgttggttaattgtatagcttttacttataacacagcaacccaaaaccaaaaggatgtacatagccaaacagtagctagacaaaggcaggtatgtttttcgtagttagcaataataatactccaagattagaagagatatcgagatagttataatcacaaaagcttctagaatggcgcaaaaaagaaaaaaagagctggaccgctttgatggctataaatcactctctatgctgtatccaatctcccacatcacccacactatcaaagctttttggctgccactcgcaccgctctcgtgcccaccatggcgcccacgccggactccgtttctgctacgtcaccgccgccgccgctgccaccgccgcattttgtcatcgtcccctttccggcgcaaggccacacaatccccatggtcgacctcgcgcgcctcctcgcggagcgcggcgcccgcgccagcctcgtcgtcacgcccgtgaacgccgcgcacctacgcggcgtcgccgaccacgccgcgcgcgccaagctgccgctcgagatagtggaggtgtcgttctcgccgtcggccgccgacgccggcctgccgccgggcgtcgagaacgtcgaccagatcaccgactacgcccacttccgcccgttcttcgacgtcatgcgccacctcgccgcgccgctcgaggcgtacctgcgcgcgctgccggtgccgccgagctgcgtcatctccgactggtccaacccgtggacggccggcgtggcgagccgcgtcggcgtcccgcggctgttcttccatggcccgtcgtgcttctactccctctgcgacctcaacgccgccgctcacgggctgcagcagcagggcgacgacgacaggtacgtcgtgccgggcatgccggtgcgcgtggaggtcaccaaggacacgcagccaggattcttcaactcgccaggat

SEQ ID NO: 6123 - DNA, 5312 bp, Oryza sativa
tcggcattacgtacgttggttccgtatatgatgttccggatgttcttttttctttataaaatagatctaactaaatccaaccattcaaaataatgggtccaccaacataagtaaaaatagatggtcagatttttcttatttattatggtgccacttggcgatttgagagtgtttatagggtgccacttggcggtttgagagtgtttataggaaaatataaatattggcaccatccggcctaactgcctaacgacctaggagcgtttaatggacttttagtatataatagatagatagataaatattggcaccatccggcctaactgcctaaacaagtgcgaacttgtctaactgtcatgaccacgggctttaatacttcgtttaggtgctaaaataaaccaatattaatgaaattataaaattgtaaaatttacataggttatacgcagatttgcctatgggtgctggtgtcagcgtagcagttgtatggctaccttatacttcctacctcccatattaagttcattgttagccatctctatttgtccctaaataaattcgtttttagagtaatcatatcattacatcagaacttgtgaaagtggggaatactccctctagagtaattatattgaggctgatcggttgcagctgcggcagctccaagctgctgccactggcagctattttcaatggccacagccatagccgctaggacagccagcacaagcgaacagcctcattaggagtagataaagtgatgaatagttgcattgagatttgataaagtagatgtattatagtatttttgcttttgtattggtatgtgtgtgatgaatgaaaaataaacttattttgggacggaggtagtagtggctacgatggtacactcaatacatacaagtcctatacgtgcaaagtatacatgaaaatgatttcattcttattgaatgatagaaatagtccctattcaacgtgcgtgcatatagatgtctaattggctacttggcatggtccgcctcgggcacaaccaagacacgacctaagatcagttgggttggcacaccccgactgacacaccgtgcccacccacgggctgtatctacggcgtaggcacgacctagtaagactcgagctatgccgtatcggcccgaagacacgactagttcaccatactcgtccttagaataagtctattttcctccctcgtctctttaggctacacgttattgtctgttataagactatttgggctccctcatcgttttggactgtgtcttatatgactggagtaaatctattttgcctcccttttctctttggaccggctgttgacaagctatgacctgcggaagcgttggccgtgccatatcgaggaagaggctcaggcacaacccaacagtcggtcggaccggcatgggcccaataatagttgagccgtgcctggatcggaccaaaactccgtgtcctgagctagaccgtaaggccatgggccttttgaccaactatagttgcacgtcctaggttacgtttgtcgacccatcactcgagattgctatttagcgatcagtcgcgcgcccccttccccgcgcggctggacacgtgtcgcgcgcggagagggggcggcggacgcgtcgcgagggaggaccggaggagcgagttttccttttttccccttttttttccgtttatgttcggttgttttttctttctccggttttttcgttctattcggcctggttttttttggtgtatcttttgtttggttctttttttgtttatttaaagatgtataaatataaagtttatattcgtatgtataccaagtacgtattcgtacatatagaaagtttatatacgtgtttgtatacgcgtatataaactttctatatgcatatgtagagtttctatatgcgatacaaagtttctatacacgtatacaaactttgtatatgtgtatatatttttatgcattaaaatatattcataaaaattatatatatacacgtatgtatatactatatagtatagtatacatacgtatatacatacgatgtatatagtacttacatacgagagagactaggcgagcgagtgatcgcgcgcgcgtggaggcgcgcggctgatcgcgtatcagcgccgcccggtcactctatcacgtgtacatccgaaagcgaattttttttatttttaatttttttattaaaagttttacaaaaataatttttcattttgaaaattgacagaagtggtcgcctaccgccctctgggagggcgatttttaaaaatcgccatcccagagggcggcgaaagtgacgtggcagacggccgttcgctctcgggcgacggccgtcaacgaaatttgcaggcggcccccttgccgccctccgctagggcgattttgtactgtgcggggggccgcctgcaaatgggcggcggggggcctggaattttgcaggcggcccccttgccgccctgggggagggcgattttatactgtgctttatattttttataaatatcaatagttatcaaaattttttatattgaaaactatataagattaaaatctccaagactggtaaaatacaattttattattttttagggcctatttggaatgttaccgtacaaatattttgttagtgccaaaatataagcaagttttggcactaccaaatatttggtaaggtaaaattgcatttgatcatatttggtttgctgccaaaatgtaaaattgtagtgaagaatgttctacataatctcaaatctagattacgtattaccaatgaataggcttcaatcgaaatcaaacacaagtactattcaaattaccaaaatattggtagggcatgtttttggtagcaatccaaataggcccttagtcttatgcatacaaaaaatcaccaccataattaaacattgtaatgataagatagataagaagtgccatcgatacacggtacaaatttgtcgatcccgacgaatcaagcatgcggtaacctatcggccccttctaggtcggtcagaatgcattgcattctcgtggtccttcaatcgttgatactctacttgtgtttctgactctgttatcttctggccatgatatgatggagtgacattgtcgatccatcgagtaaatccacccatccttggattgccatgtaaaaatagtaatgttattcagtttgggtagtaattttgtgcaaatcatagcggattttgtaaatggttagacatacaacgaaatcgttgtctacattggggcagacaaaatatctccttcgaaatgtttgttcagcaaaggatgtagccacctgccagcgatctctgcacccacactttggacgctcggaccatttatgtaaccctaatggattgttcctccagtctaagcttgcaatttccacccgacgttcgtactccatccaagcatgaatgaactgtatggtcggttcaggttgcattatcggcccgccacttgaagtaactctgactgtgtcaatccattgtacgaaagtgtgttgtcgtgagcataagttgttctagcaccatatgaatgaaaagaactatgtagaggagacaaacacaagtagtactgcagtagtaatagcaaaagtagtactgctttacaagtttataagccaaaagaaacggtcacataaggactgaagaggtagaacactactgacgaggcctcttacccctgtccctcctaccctgcgccctaatgtgcccctgggagtacgtgagtcggtccgggggtacggcacggccaacccgtcctgcctgtacaggtgtgacctctggctgctcctgagtgtgcgcctctggagctcctccaagctgagaggagcctagtacgtcgtggtggtgtgcaccgtgcaagtcgtcgtcgtagaactggctagtaggaccagtcctaccggcgtgagacgaagaggccccagtaccgaagatcccggctgcaaatcctgctggacaaggaccatcagtttcatacatgtatttaatagtattaataaaaagtaaagtaccgtgtgggcgagggatcgacgctccgtgagaggaagagctggcgaacgcgcccgaagaggtggcgaacgcccctgcggagctcgcggaagcgccggtcgtgcctgcgaacgcgctcgaaggcagacgaggtcctgcgatgaggaaacgtgcagttaaaacatggtgacatattcgtgcaaaagctgaaacaaaaatgaactaatctctgggctgaactgtaccgtgcgaaaccggtgctgtaggtcgcactgctccgaagctaggggcgctcgaaggcaaacgaggtcctgtgaggatggaacatcaagttacgacggggtgatgttttcgtacaaaaacataaacaaaacttaagaaacctctgggctgagcagtaccgtgcgaaacaggtgccgtaggtcgaggtcctgctccgacggtaggcgcgtgaggccgtggttgtaccggaccagctggaggtacgacgtccacggcgctgcgacaggagaagacgcgcatgaccgcacgcatcttctcctgcatccggtcgaaggtcaccctctgctcaacgtcagtcaagtgcaaacctctgttcaacctcacttggactgcggtgatatcggcactgatatcccgtgcggcatcagcctatgcaagatggaaataaaaaattcagtagttgtcctatattatgcaagataaatgaaataattgtaagaactaatacaaattcgacgtacccccacgaagtagtctcggtcatggtgcgtgggatacgcgtccgtgacagcggcaacgtgcggctctggggcgtctggagtgaaggtcacacgcgcacgagtgcgaggaaggtaccagcgaaggtagtcacggtagttctcctccgtgtgtgggaagagctcgttgatcacctcctctgtagctaacacccagtcgtcaacgtactgctgtacacgtggagcccaaagtgcgcctgctagatgtccccgtcgagtcaacctgtgaagagaggtaaattatatggctcaatgaagtaagtatcataaaaatttagaaatgaacaatccgaactcacgagtggtcggcagggaggacggtcggctgcacgttgcccggaaacacctgcctaagtccgaactgtctcatcacacgctgcgggcagtgaggctcaacgaaaatgtcgaacaccatcagcaggatggtgagccagtaagcctggtcgcgtgtgcacaaggacgaaagtcctagcggtgctctcgcagcgacggcctcttctgtgtacggctcccagatga

SEQ ID NO: 6124 - DNA, 25809 bp, Oryza sativa
tactaacctgttccatttttcagattgcagatggtgagcgcttacccttggttgtgaaggagttgggaacctgtgatctttatccacaagtaagttcatatttgctatttaaacgaatgcatcattcgcatattgatgttttccaatagaaccaacttgatgcttgcaaatgagtcccaagtttctttttcctattcattacacgagtcacatgtatacaccatttgaccatgcatgttgaaatattttaatatgttagtttatttgacatttgcactggtgagttgttttatttaaacacaccatggagattctgttgttatagtaaaattaaattaatatcaaatctagtatagtgtaattatggagttggagtgccggttttgaaattgtacttgtcgggttaaataaatgtgatgaacttttctacgttctggtttatgtttgcatgttattaataatagtgtattcatttcagagtttaaggcacaatccaaatggaagatttgttgttgtatgtggagatggagaatacataatctacaccgcattggcatggagaaatagatcattcgggtctgcacttgaatttgtttggtcacttgatggagaatacgctgtcagagaaagcacctcgaggataaagatatacagtaaaaatttccaggtttgtactgcccactgccccttcttttaattatcgttgtacatcagagtaggggtccttcaatgcaatgtgtggggctagaaaaatttagtaggtgtgcacatttcatggacaagctggagtactgtgcacattccaatataaataaaattgccaaaaaaaaattgcaagtagttcaaaaaaaatatagcatgaatagaataccacaaattatataataaaaaaatgaatatctcatgaaacatttataaatcaccaccgtcgatcttcaaataacatatccattgtttcaaatcgtttttcacatttggctaatcacaattagaaaatccattaaaaatcatctacaatttattaatatcactgaaggtttcataatataaagttagttttattcttgtttttctttagaatataaaaaatcagtaaatgaccaactccttctggatagggatatgggagtgagcaatattgcctatagtagttggggtagactgatcaatactaaaatgtgacttgagtaaggggcattatgaatcatttattcttctactgtgtcagggtcaacttgttacttatatttattaggcagctgccaagcttatcacaacaatctcctttactgtggtttctgaaacatagtatgatgataaaacctatctatttcaggagagaaagagtataagaccaccattttctgcagagcgtatatttggtggagtattgctggctatgtgtacaaatgattttatttgcttccatgactgggcagagggcaggatgatacgcagaattgatgtcaatgtgaaagtgagtaattttgttcctggatttaaatttttttttgcgtgtcatttggaatattatgatgctaaataggatctgctttcttatttgtagaatctctattgggccgatagtggtgatttagtgacaattgcaagtgacacctcattctacattttgaagtacaatgtaagtttttctgcattttgttggctctgtagttcaatgatgtaacatctacttgatgtaactataacacaacaattataccttccagagggatgtagtttcttctcatttggatggagggggttcagttggcgaggaaggtgtggaagatgcctttgaactacttcatgagatcaatgaacgcatccgaactggcctatgggttggcgattgttttatctacaacaattcttcgtcacgacttaattactgtgtaggaggagaggtaagtattttcattatatcaaaaatgcattcacatatgatttggttagactgttaattttcagaggtagtataactattcgatgtattacaggtcacaaccttatttcacttggatcggcaaatgtatttactgggatatcttgctaaccaaagccgtgtctaccttattgacaagcaatttaagtgagtcttggttgtctggtatcgtatcatattcggaagccacaatgaacttctgaggttaacttgttttcttactgcagtgttgtggggtatactttactccttactatgattgagtataaaacacttgtaatgcgtggagacttcgatcgtgcaaacgctcttttaccatctataccaaaagaacaacatgacaggtgccccctgttctgctaattattgtactctgcaactcaggcctcagaatctgaagataacccttttatttgcagtgtggcacgtttcttggaatcacggggcatgttggaagaagcccttgagatagcaacagactctaattacagatttgacttggccgtgcagcttggtcggcttgaagttgcaaaggcacagatgattaatttatttatcacatttccaagaatgtttttgtctttgttcaaatgttgttaactatttgcttttcaggcaattgccattgaggcacaaagtgagtccaagtggaggcagttaggagagttagctatgtcaaccggaaaggtacagctgttggatgtattagttactactccctctgtttcatattataagactttctagcattgcccacattcatatagatgttaatgaatctagacacacacacacacacacacatatatatatatagatttattaacatatatattaatttgagcaatgctagaaagtcttataatatgaaacggaggaagtatcttctatgagtggtcaatatatatattgtgctaattaagtgggactgttctgccatggcattttagtttcttgattattagtaccagtataccgtgtaacttaataattatgagcgcacagaaataaatccctcctcccaacaatataagcaagcatttgaattttgttcatgaatataagcatttctacaatgcatatgtaaaatcaatcacctcatttaaatttcttcccatcttacgcccaactactcttcaaccccaaccttctcattaaatgagggcactaaagtactttctcctcaactttaatctttgctcaacagtctagaaatgtttatattgttggacagaagaagtatataatttaacaaaggcatttgtgaagagataatattgcagttttgatgggaagtagctttgattgttgctatgatgcttgaattagaacctaagaagttcttgtgcctttgcttttgctctgtccatcttttgtactacctccatttcattttataagtcgttttgacttttttctaagtcagacttctttagctttgacgaaatctatagaaaaatatagcaatatttttaacacaaaagaaaaaaactattcaaatatattcaatgttagatgtaatgaaaccaacttggtgctataagtgttgctatattttttctataaacttggttaaacattcaagaagtttgatttttttaaagaaagtcaaaacgacttattatatgaaacggaaggagtagttgtttttaaaagtagaattatgcgtgcaaaacaatagttttgcctgatggcagagttctgtgtgtaaaaaaataacttaccatcttagttttaagtagaattcttgcaatttaataactttgccatgttatgtttcagcaccttgccagatacaaaactggctaaaagagtgcactcatattctaacatgtcaagtgtcaattctgcagcttgatatggcagaggagtgtcttctacatgctatggatctcagtggtttattacttctgtattcatcccttggtgatgctgaagggctaacaaaattaacatctatggctaaagaacaagggaagaacaatgttgctttcctttgtttcttcatgcttggaaaactggaagaatgtcttcaattgttaatcgaaaggtattgccatttgccaagactatcctatttaatagtacaatgcttattcagaaaatgtattttttattttatggtgatcacgttatattctctatacagtaatcgtataccagaaagcagcattgatgtcgagatcttatcttccgagcaaagtccctgagattgtaacattatggaaaaaggatctccaaaaggtaccatctgtctcttttttccccctccaaaaggtacccagtttctggtgttaatactgatgatttttagtgatgtttccatcctaacaggcagaatgcccaatctatattttgtgtacctgataaatcatgggcattcaagggcattttgtctattatctgagctagcatgcaaaactaaccaaaagacaatcaatcttgtgctagagtattgttcttattttcagacttgcgctacgcgacactgtttaatttgtaggagatatgtgttttattatcttaccatgccttttttttcattctcgtgccattttctttataggtaaaccccaaagcggcagaatcattggcagatcccaacgagtacccaaacttgtttgaagactggcaaattgctctcaatgtagaagctaatgttgcgcccaaaaggtctgtttgtaaaagtaaaaactatgttcttttgtgaaagttttacctgttctctcttccacacatgggacaagccgtcatggtttgctttcctcttctctttaattgaaagcatctgatgaagtaagaatgatgccctctaccatgtatgggatgctggtttggaatatcacatttagcttcagttgagcacatatagtgaaataaatagaagtaatgtcagtgctcatttgtactttttctttattgtaatatgaaatcctatttgtataggggtatttatgcaccagctaaggagtacattatccatgctgagaggcctaacgagactctggtggaagctttcaaaaatatgcgtatacatcaagaggaggtgctgccagatgaaaatggagatgacactcacgaggtatcactcttacagaaagagttgtaaaaaaatattgttaaatagtgggtagctatttgaagatgttaaattacttctactaaactgatctcttttttttttggcatgcgatgtcctatatttatcaccaatcttttaaagtgatcattatttcaataaaatcacattttttgctattcattatattttcttttctccttgctttaagttgtaatatagtaatatcaatctggtccaccaggctatcgaggaaaatggagtagaagagagccaagaagatgctgttgaggttgatgttgaagctgatggttcgactgacggtactgtccttgtgaacggaaatgataccgaggaacagtggggtacgaacaatgaagaatcattagcataaaagctgtagttgagcaagtgtacagtcctaaaacctttttttcgtcctagtttctcctcccagggcaccaatgatcatagtgaaaacttgctgctggtgtcctcaaaaagaaaagaaagaaagaaagaaaacctacctgcttctggatacaagtgtttattctgggctatatcctttagtttaatctgccgggataatttaattttggtattcgagttaatctgttggtctgaccagttttcttagacagtttgaacataggagcaaattttgtgcttgctatacattagttgttgatgttttctaactactgtcttgccttttgcagtattgactcctgaccaatagtgaatcagcgggacagcaacctgatacactgattcagcttgtaaaggtgaagtgtttttccatctatacaattagcgacagttgttaacaactattcatttattatagctaattattttttgacaggttgctgactcctactgaaactatgtgaaggccgttttcctccacttgtataatcattgggcgtgctttaagatcggcatatccgacgataaaacccacagaaattagtcatcgctttgtccttgtttgagatagaaaattttgtacctttttacacacataggtccttactgtggattctcagggggatgttcccttctcgttgaggttgaatttgattagctaaagaggatccatattttacacaagagtacatagggtaaaagtatgcttgctggatccagaatgtttctttgatgcaatctgcaagacaacactttgtgcgagctatgtatcatttcatttgtgctattccttgcgagcgttattagtgaataataaaagtttagatacaagagtgattcttttatattgatataaacgtcatagccttgtaaaatttcagctcttcttgttgggcctatcatgaatcatcttgataaccaaagggaaagtctacttgtgaacgtactcaacaaaaattgtttcgacactagtatggcatgaacagactgaaattctgctttaaaagaacttatttgccattctgcttgccgccatctttagcacctgacacgcactgatcacataccatgcttgtttacgtcacttgccgtggagtaattttatcatcattaaggtataagaaatcatagtgtaaaatttgatatcttctcgaggtactaaaatttttaattttaaaaaattttctcgaggacccaaaaatttgagaaagcacaagaatcttcaggtacatacaatatggtgaaaacaacttagaagtttcgttttgtcctgagtatcatacaacattccaaaaatggaccttacacaattatacatatcaaccataatccggtattaccatccacataaattttaatagccaactgcactgggggtaaataaacaacctgggccaataagaatacatgatttgcacatggtccatggagaatccgaaaagaaagtcaaaaaaccattcgaggccccgaggcctcatccttcccaaatatacatgttgcaaccgcatcaaacacaaatatacaaacactattggaatgcgcatcaagaactccgaagggtggagcttatgctcagacgcagttacgctcgaccattgtccttgtggaaacgagttgtacaaccaactacagcggataaatacacaaccagtagtatgaattaacaaattctctcgagggctagtatggttcctgatcccgctgggcactgcaaaccctttgtccgatgatgcacaagaactccaaaagagcagataatatcgcacgtcgattgtataatgaccttacccaaaaggatttcccccaacagagccataggaaggtggggtgcttggctgggggtacctgggagcagcttgttgatcaaagcccatgttgagggaacccaaacctccttgttgcctgtaatgccacaacttggacataagcgtcgaaacaacaaaaaattgcacaatggaaccaacaccttggaagtattttaggacggaaatacgtcttgtaggaactaaaacttaaaatgaaagaatgatataacacaacggaaccaacgcaaaggctggtgcctttggttgcagtaccagattttaatgacacaaacaatgggcatgccactagaaggtggatgctattgtttatagtagagcaaaggtgagataattctgaaagctacgggtttcagtggttgatgtcaaccatccaatctggtcgaatggactcattaataattagtctctattttaaggttgcatgctacttcctactcctacatcccaaaagatacaacaaaaatggcagaaaaaaaaaatcaacacgagcaaaaagtatctttaaaaaaatgctaaaaagttcttcactacactttcaacttaggagatacactaaatacagcagtcaactcacattggaagcatggtattaggtaactgctcagacatgtttggaacttgctgcatcatgtaatgatctgaagttgaaccacaaattagcacacagataagaaatactaataaagagcacaatttcagagattatgctgagatatggaaatacttggaggtgcaggtgactggtacagctgctgaggttgctgtggaaggactccaaaactcgaggtaccaagtaaacctgggggagtcatgccagcagatgctcccagtggtccaggtaggggctgctgctgctcaaggacacaaagattaaccatgttaatggagcaaacaaagatggtgagtcataccagctgatccaggtcgggattgctcaagggtacaaacaatatggtcgcactatcgtagtgcatcatcaagtataaaactaatgcacttgacagttttttagaggaagaggaccaacatttacacgaatatcacaatgttaatgaaacaatcaggcataattaatagacaagatacctcaagatttacaagaatagtaagtgaaacgatcttagtttgagatattttgtaaaagaggtatttcattctcttcattcataccgtgtgagcttgaactggagctggctcattcccaagatcaaaaggatttgatgctttcgcaggttgggggtatgcatgttgctgttgcggatatacaggttgttgatatgcaggttgagcaaatgccatctgaggatatgcttgcattccctaaaattggtaaataatttatctagttaggaaaaacatcaacatcagatacacaataaatcgctaatatgagaatgatagataccattgcagtctgatatggcatggcatatcccattccaaattggggtgttctctgccaaccccctattgtttgaggtcctggtggatataacgaagtaaagatatcctgcaaaaaaatgatctaagggtcaactatgctgacacaatgattttatggagcatattagtggccccaccaggtttttttttcttctctaatatgaccatttttcacagaaaaggaaaaggatcgcacagttgtcctcaattcaaagttagtttaaacgatcttgcaagtgaaataggggtacaacgaaaagacaaatgaactgagaagcattgttggtcacaaccagcatgaatgggcgactcagatcactacttattacttactggaagtatagactcaaaccaatagctatatattttttttctttttttcctttttttgcataatgatgacctgaatgcctgtttagctttttcactcgataacctgatttatttccatgtatctggttagtcaacccagatatcacattcaaatgcaccaacaattattaacaccattattcaactcttgccctaccataccatgcattgttttacatgcatatattatcatctctcaataaaaaaaagttaataaccatgtaacccccattaaaatgcaatttaatatgtaaacaatcaacaaatctcacctagttttaaaccaacataactgatcgcataggaaatgatatatcctaccaacgtattaacagttagctaatgcttgctaaacagaaataccacctctgacagatcaaaagatcatcatttaaccttgggccaccacaccttacattatttgacaagatttcaaggaaatactagccatagaaaaactgtaagtgtcagtctcttagcagttttgagctctataccttttatcatgtactcctgttctttttttatctgacactttttaactccataaaatttcagcacgacactgcaaataacttttgtaactttatgtaaattattaaaggcacctgaatatctagggacacatctataatccaatacatgtatatgctcaacaagaattttggagcttgggtatgaaatgtaccccatatgcatatggtaagtgaaatccgaactaagaactcatattgactagtactcaatttagttggactgcagtgattatatgtcatgaaattagttcatgggaggataaccatatcataagtcctgaacctcaaagcatattgctgtcctatatattataggtaatacaccaacaggtatcgacttggaagcctaggcaacaacaaagtgcctcatactgctatcctatatattataggtataaaataatgcagttcctctgcaacttacaacatggattctaaagcgtcaaagagaaaacggttgtgctactaatctggtaagtagttggttctatgccctgtccacaaatttggtaatttcagctttatgattcacaaaatatggttacaataagtttagaaaatggcatcgcatattgcacaagctatactgtagaacatacaaattaacggattacatatctaaatgaagccaatgaagcaaaggggtggggaagatgaaacaagtcagtagtgcagggactagaaaatgctgcaatgctagatgttcaattctctacaagcagttaatcacataccgctggaagttctttccggccaatggatctactgtcagtattaggtgctgcttcttgaatgccactagttgctcgggaattcgcagagacctggaacggaagtccagctgccggagcagctagaccagtttgttgaactgaagatccatggatagacattcctgttgaggcctaagaaaagtatcaagtgaaaacctatttcaaggcaaaaaaagaaatggaaggtacacagatcgacttctgatattcctctgcaaacggaagtacctggtgacctgagactccagggggtgcaccaaaaaatgaagaatgtgactgccccatcatggatgaccctccatcatttggaactgaagtgggcatgaccgaagctggaaaagctgatgaattgggtgcagagggtgtttcagaaaatgatagttgagcaagtgcagactcaaggggatctacactattgccagtttgtggtgtttgttgctggccgaaagaatcaaacgatgcccagtcaccaccaccactgctcactgatgacacatttttcccttgttccacagcaggctgttgtgctggtgcattaacaggttgcactggctgtgcactagcaggctgctgttgtgatgtaggtgtagattgtggaggtggcacagatgcagaaggctcaggatcagcactgaaatcaattaaacttatcgtacttgccacttttatctgttcggaggtcccctctgaagaaccaatactgctggcagttgatgtcctctacaattatgaagtatgtattgtaagctaatgaattgaacctactgataaaattatcagcttaacgtggaaatggagacaagaacatggtgatatttctaaaagcaatgtctgcaaaaaaaaaaaggaaacatcagaggaaaataataacctgcatctgtggtggaggttcgatggttctggttccatttggtcttggaggatcaattggccttggaggatcaatcggtcttggaggatcaatcggtcttggaggatcgattggtctcggaggatcaatcgttctcgctacatttggcttaggaggctcaccaacccgtagttgaggtgcattatcacccagtatatccctcactggccgtacaacagggctagatccatcggtttccttctggtaatttggagacccattatctggcctctgtggttcagaaggcctgcggtcctcaaaccgttgaactggagttgtttttccagatctatcctcacgatttctatcatcaacttcaaagtagcgggggcttttcttataatcattatgttcatagccaggacttcgttctccataggaatatctggaatttctgtcatcgctccttccactataactgcgacgatcagaatagctttcattgtatggcggacttcttgaaccaccccaatttccatcagatctcctgttttcactatactcatccttatcatcctagaagatacaaagaaataaggaaataacgaatttaggatagtataatagcaatttccaacaagcaatggcaactgcaaaaaaacaaggatagttataattagccaacatatcacctttcccctcggtggccgatctgcacttctttctccctgtgtatctccgttccacataaacatgcttaataaagttcctcaatttatccgcattactgagaccaaaagaaacaggtcagaattccaagataaaggaaacaagttgtaatctaaatatggtatggctaaacagaaaggtaacctgctgtcagggaaagaattgcggtgagcatcccattccttgaagaatatttctctagcacgctacaggttatgcaaaacacatgtcaaattagaaaggcctaaaatggtagaaaacatgaaaaagaaaagagaggacaagtcacctcatttcctccttcttgaagggcactaacttcctgtgcagtaaatttagccatagaaactgacttcgctcgatgcgtgaactctcggctagaagcaaaacaaattttgtcatcaataaaattaggatcactgacttcactaaaatgcatctaatttgaccaaagggacagtgaagctagagaggttcgacatattacaagtgtaacaaaacagaactgaataagaatcttactgtgctccactgcaattggtacaaatgaaggtccagaaatttgtacagacatattgtggtccctgttaatatcaatatatgtgattcagtaatatacaaaaaaaattaggaaacaaagtaatgcacatcagtattacacaaatacccactaattaagtctactttcccaacaaaaacatgtgtggagcacctaagcaaggagtactctgctgaagcaaaatatgggcataaatataagcttgaactatcttagagtccacctaattgcaagagtggagtgcaatcctccataatcttgacatgacattattaggcaaacctagctgcttctactgccgattccctccagtacacatattgcaaaactcttcaagttccaaatgatagattttgacattattttgggtgcaccatagaattagaaagcataatactccctccgtcccaaaatatagcaacttttagctatgaatctagacatttacttgtccggattcatagctgaaagttactatattttggaatggagggagtaatttattctacttgtggtagagaaaattaggcaaggctcgctgtgatgactagttggagatttccaaataacctcattgcgctgtagatcgagtaataaacgaactaccaaaaaaggcttatgtagtgaaaatgtcatgtggactgcagatgattcatgcttttccaacagtagaaaacatttgcaacaactgatggcatctaattatataggaccccactgttgcaatagcagtttaagaaaaaaaatcatttattttgcataataatagaagcaatcactaattggcatactctaaaagagtaaaaaaggtgaagtcaactgccagaacaatagacatccaaatgggccatgataatatagtttccttattgatagctgtggtaaattattaatgcccaaaacaactagcagatcagtcaagtcaagaatgctatttgccttaaatagcagatactatgctagcagaaaaagaaaaggaaaaaatcaagcttaaagaaatgcatagagcctaaagtgcagcgtgcaaatgtgcatgtattagcacgacagagtttagggcataaacagaagggaaaaaatattaaacatccatgaacgcaaggtcaactaagctattcaggtggttgaaacaacacgtgaatttttagacatcatctggagagttaacaatcttggtatatagtagaatattactccctccttcccaaaatgatcatcatatatgtttatgcaccaagaccaaggataatttaaatcacatcaatcaagacaccatgcacgcattctcccacaatgcatgcatcgatcaaaacaccatgccaattacaccttagcatgcacacattctcccatgctgcattaattgtattatgatgaaatccgtgtccatgcggttatatgatgatcaatttgagaaattttgaattccattacatgatgatcaatttgggaaggagggagtagcatgtactgccttgcaagtgccagaatgtcacaaaatacacgttttggtccaagacgaccatagtggtttctaattttttttgcttatgatcttcaattcttcatcaactataatagcaaagagtatatgtcaaagctgtttttcgactagggatttattaaaattccacatgttgtaattcaattataaagaggtgttctttttattttattttctgcttgtgctgctttttgaagggctgctttgttttgtcacaccacagacaatgtaagcaagtgtgacattcaccattgactttgactgcaaagatatgaacatgataactttgagacgctcataatccgtttttccgcaaagataagaatactttagcagctcataagcgccattactttcttgatacttgtatcttaggtacctcttggccattgttctagtcctaagtcgtaacgcgtgatgtatatctggcagaaagtagcaacatttgtcgtctacataattaattacatgaaaaagaatatgctgtgtgattacagggcatggcattacatccagcaatagctccacgcattactctccgtcccaatttactgaattgtgatccagtatcaaccagcctaataaaataccgctatccgatcggaaacctacctatccagccagccaatgagatctcctagtatgccgcaaacattcgcgggtagctctaaaaccctcgccattactagcaacgctgaagtataaagccaagcgagctcaaaaaccacttcccctagatcctagccaaccccgccgaaatcctaccacatttagcaagcgaacagtagaaagccagcgggaactcaccaaattgttgcagttgatgcacctcttgttggcgggcagcttgagcagcccgcgtatgatccgctcgttcctctcgtcctccttgagcctgctcgccatcgccgcccggatccccggccgccgctgccgccgccacaaaccctaaaaccccaccgccgcaaaaaaaaaaatcaaacaaaaatatcccccaccgaaatggctcgagatccgaccaacccagccagatccgcccacaattagagcaaagccaccgccaaaatcggcgagcactcacctgccgacgcgcctcctcctccgatggcggcgctcgcgcgagatctcgcagcggaagacgaggtggcggcgagcggcgacgcgaaggcttcgcctctttcgttcgctggctgcttcgctgcgcgtgtaagtaagtaataataataaaactgaaaaaaaaaacttttaattaaacctttttttctctcttccctttctcgtggggggtttgggagaagaaggcgaaggttaggcagccggtcaaccgagagagcggtgaccggcggcagccggtgggttggtggggcctggggtgtgtggggcccacatggcagtggcggttgggtcggttgtgggtgcgtgtgtgagctggacgtgggctgttccttcaccggcgtttctggtctggtcttggtttgtttttgggttttcgctgagtcgctgactaatgatgattcctgtctccgcgctgtctcaccgacaggtggggcctaacagaaagaaggtattttttttttattttggggggaagggaagatgatggttctagaacctttgtggttgagttggtggcatgtagtgatagatgaattcatctttgtttttgttctctttggatgcatgagagggtaatgaaggttttgaatcagttgtttgattagatgttttgaggtttactgtgttttattaagttattactaggtgatatcccgcactttgctgcgagatttatagatatatattaaatattatcgaaatgataaaagttgaaatgttaaaaaaataatgttaggaagattatttgacatatacttgttgatctctataatataatattgtagatataatataatattgtagataatatgttatgcttgcatgggatttaaaataggctagaatagtaatcgctagtgagtgaagatgtggtatacttgcatgggattttaaataggctagaatagtaattgccagtcggtgatgatgttgcatgcttgcatattgaactttagcttctatcaattgttagtgggtactaattatataattatatagaaagtatagattagtatgtgcctgattactatttggaagcatgttaagggaaaattgggtctcctgttcggagaacatgctttacggtggtctttttcaccccaggctataatgttgacgaaatgaaaactgaaactatgacgatgtccacatcttctaataatctaaaagctagctcttttgctagctttcgattggtgcatgtggcgccttttactttgaagaaaaaacataagtttatactagagaaaaaaaaacacctaacaatcatatgtgaggaaaaatctagagaaaaatataattccagaggcttccaaaactatcttctctttccaatcacacagaattctacttatttgcctcctataaatataacacgcctactcgataccgctccggtaactctagaatatatagtaaacctaaaaatattaagcaaaaaaacatatctaaaacaacaaatttacactcattttctttctttaaatatactaatcatactcggtactattagcttgcgcttttgttagctttcgattgatccacgtggcgcctcttactttgaagaaaaattataaatttatactagggaaaaaacacctaacaatcatatgttatgataaaaatatcacatatggattccagaggattccaaaactatcttctatttacaatcacatgtaattctactcctttgcctcctataaatataccacgtctactcggtactactcatataactctagaattatagtgtaaaacaaaaattattaagaaaaaacaaatctgaaacaatgaatttatatttattttccctcttttaaatatactacgcatattcggtactacccatataactctagtctagaatatatagtgaacaaataaatcatttatatataaatccataaaatgtttctttaatatcatatatgtccatttgtcaaaactaaaataatggttcataattttatttctaaaatattttatgaaaactttaaaatttcaaataagaatgtcacagtaattatccagcatgtcacagtaaatcttcccaacactctggtttaaagtagaaactcgtttatcacccccaccatttgtgttcattgtcttctccagcgcattgttcttcatcttcgccaaatgggtgttcattgtcttctacagtgtttgttgttcatcttcttctctagcaagaagatacgacttatataggtcatcgctctcttctgctagctgccaattatataatataaattatcaaccttgtcagtgtttaaataaataaacaaaaataaaaagagtgaaagtattgagcatcaggtatttaggtcaggtgtaagtatttgttgctactgtcggttttcgtagtaacatgtactactctgaatttctcttttaaaccacttatgtgataagcattaatgttcatccatacctcgctagaatgaggcttcgaccgtgctgatatcaacaccaactggttcatccgagtgaattctactacttatgtgatagcactaatgttcatccatacctcgctagaaggaggattcgaccgtgctgatatcaacaccaacgggtgaattctactgtgattacaaggcaaaaacgaaaacatcaaaaatactacaccgtaataataattacttacttgaaaacatcaaaaggaggtctaaattatgttagttcttaaagcgtcatgataatcatggcacatggcacatgtcaatgctacttgagcacttcatatctcgcattatgtctgttttgagttaccaattgtggtcatatctttggattgctcgttcgactatgatagcgcttatgaaacagagctgtaatgaaattattttacatctcatcctctgttgtgaggcacacatgcagtcaataaagttattaacaaaagaggattaaaaaaacagggtgagacacctaaatcaataaaaaaatgatttaaatggtacttcgaaacaaggttgcagttagttgctccggttatatatatatagtgtagaaaatcggtgtgccgttggcatgtttgctagtcaacctatataaatttatcataaaaaaatagtaaatgataaaattgatgtgctcactaatttgtcgtcactacaaagtggaaagccaaactaaatatgaaaggtttgccgtggaaataagtgcaagctgaggtaaatgagttggagaggcgaaaggtgatgttgctggcctcatgcaaggctagcgagaaagagttgaatcttcgatgaatcaaatccttgagctacagcacagcctctacagcacccacctcttcttgaaagacacccggtccagtttgattcgagagcagaatttaagagacaaaagttggaggaaaagaagatcattaggaaggaaagaagaagggaagaaaggatggcattgaaagaagataaatctgatagggaaaggtcatcaactaagaaaaaaaaggagagaggggcagtctgagagtgaaaggaacatgccatcagagaatacaagaaatgggaggtgaagtctcagatatcttctgagaagaagaagtcatatgagagctccaaggctgaggatcataagggaaagggttatgagaagtccaacacggagaagaaggggaaaggcaaggagaacaagagttctgagaaggggaaggggaagacaattgacggtagaaagaaatgacgaggaaggttagaagaaattgtttcagccactaggacaactaaatgccaagtatgaaatgcgactaggagagtaattaaggaacgatccctccagataaaagaaaacttgttgagtttttaagtcctatttctctgcaagtactttttttcatgaaataaagaccatgcacttatgcttcttatgcatttctctcagatccatcatccttattagtatgtgcctgatttctacttggatacatgttaaggggaaattgggtttatgttcggagaacatgttttactatggtctttttcatcccaggccataatgctgaccaaatgaaaaccaaaactagaagatgtctagatccatgtatataactggagcaactatctgcaaccttgttttgaagtaccatttaaatcatttttttcattgatttaggtgtctcactctgttttttaatcccttttgactgtgtgcgcgcttcataacagaggatggagatgtaaaataatttcattacagctctatttcatgagcgctaccgctggtgatcacaagtaaaccaagatatgaacacaattggtagctcaaggcagacctgatgcgagatattaagtactcaagtaacattggcatgtgccatgcgacatgattagctaacaagaactaacataatttagaccttctctagaacacaaatttgactggttttcatacaaactagttctaattccgtgaaaaaaatgccctatttctcccttcacaaataaggcatttgatacacaagacccagacggtgagctctttgatagctaaatagcaatttgacaatatactttaccttcgtttaaaactctttttttgttaagtataatattgtactccctccgtttcaggttataagacgttttgactttggtcaaagtcaaactactctaagcttgactaattttgtagaaaaaagtagtaatatttttaacccaaggctagtagtattataaaaaattattaaattatagatttaatgaaactatgttggtgttgtaaatattactacctttttctatagagttagttcaacttagagtagtttgactttgaccaaagtcaaaatatcttataacctaaaacaaagagagtagataactattttgaatcaaagtaaacaaagtgaatccaattttatggataacatgttactacctattttgataggtcacacacgtaccgagtctgagtcagcgtccgagcggctttggctaggagtccggatcagaattcgaatccgaatccgaaatagaatgagcgccccgcactataaatatatcaaccggcgatcgtataaggaatttggcatcgttgaatagcctcatcaccgtcgcagaccacccatcgcctgatctgcgcctgctgctacccatctgcttgctagccggggccgatcgatcgagaggcccaatcagtgatcagcttgcgagcatggcgacggacatggaggtggacgagatgcgccggtgccggcgatcgtcgggaggaagaggtgcgcggcggaggaccggaggatggagtcggatttgcggcaggaggcggagctccgtgcgaaggcgctcaaggacaacacgtggggggagatggtggcctgcgacgacccctggctgaaggagatcttgcggaggaggtgcgtgaacgcaatgcggacgagggccctccacgcccagatcaccaggctcatcgacgacatggatcgccgccatcgcaagttcttcctcacggggaacgaacaggtgctctggccgccctcccatgtgtactagtatcatggatgcatctcttctgtgcaattgttcatggttgaatcctttgttcctctgttccagattatccaataattctatgtgtaatcaagtaggtaattattattacggtgtagtagcaaacttttcaaggttttttttggccttagaatcataatagaatttactcagatgaagctgttggtgttgagatcggcaactgctaatacggccgaatcatcattctagcaagtcaagagagatttagaggcatggatgaacattactaatagtgctatcacataagtggtttaaagagaaattcagagtagtacatcactacatctcactataaaaaccaaccgtagcaatagctacttacacctgacctaaatgagagctcctagcgcgggattaagtgacgcacgcgggattaacgctagcacgtcatggaaaaaaaaaggggctgctagcacgcacgcacggcagccgctttcctttttctctctgatctcctattttggtgctttttggattttttttaaatctctttcttttttttctccacacgcgcgcataattttttttcaatattttacaaattcaatctttcacctttaatatcagtcgagagttttaaatttgagttgaatgtttattaaatttaagttgaatgttttaaattttgagatggaagttttcaaatttaagtcgaaggtgaaagtttttaaatttgagttaaaagttttcaaatcttgacttgattttttaaatttgagttaaaagttttcgaatccgagttgaaagttttcaagtctgaatagaaagttttcaagttcgagttgaaagtttcaaatcagagttgaaagttttcaagtctgaattgaaagttttcaaatccgagttgaaagtttttaaatctttaattgaaagttttcaaatctgagttgaaaaattcaaaaaatcttaagttgaaagttttaatcttgactcctatacatgtgcggtagtcaaaggcgaaaaaagaaaaaaaaacgtgacaacgccatatagtccatgggaaaaaaaagaaaaaaaggaataaaaaaacgtcacaacgccaataaaaaaaaagaaaaaagaaacatcgcgtctacacgggcctccgtttggcggcgtcgtaggcgcgtatgcgctagatagcttttccggacatgaatacctacctgaagctcaatcctctcactctttttttttcttttttgcttattcatctaaatactaacaagttgaataaactagatatcatgaccatccaaatgtgaaatgatattacaattaggcaaaaatcaacgacctcttccattcttcaatcaagaaaaaagaactgaatttcattctgccacaaaaatattgcattactgaactacaggcccaatactgaatgttggtgatatgggcctgggggtatcatgtttagagtgccccccaaggccacgtggccctcccccgaggggagtgaggccagaggtggggcggcggccactccttcccaaagactagtcagaggaggctgccccccaaggccacgtggccctcccacgaggggagtgaggcccgaggtggggcggcggctactccttcccaaagactagttagaggaagctgccccccaatgccacgtggctctcccccgaggggagtcaggcccgaggtggggtggcggccactcctacatagactagtcgaaggaggctgccccccaatgccacgcggccctcccccgaggggagtaggcccgaggtggggtggcggccactccctcccagagattggacggaggaggctgccccccaatgccacgtggccctcccccgagggggatcgggcctgaggtagggtggcggccactccctggccgagactagagggagaaggctgccccaggcgccacgtggccctccctcgaggggagatcgggcccgaggtcgggcggcgaccgccccctcccgtgactaggggtcggactcccccgaccccctctctaggtcaccacgtacggtgggttaggtgtccgcctccaggtgcccacctaccagcattaacggcgacccgagcggtcgcgccacgccgcatttaatgcggtgtgcagtgcactcaaccggtctgtgaccggtcgaatgactgatgggacccaggatgtcatgcgcaccatcgcttgtgtcaggcgacgtgcagcccgacatatcccatcaaataatgatggtgagaggttctcatcctcttatcccagccggagtcggtcctcccattttggtcaaagcaaggctcccgtttcccggtgtaataggagcccagaagtcttcacccattaaatggtgactgacaggggcaccccccgtgtcaggcggcaagatttgataggccccatcatcaagacgacgtgcgcatggcttcccaagccaagagacaagacatgcatttaatgcaaagattataatacttctccaccggagctaggttaggttgttgggcccatgtggtaaccccttgaggtataaaaagaggtccaggcctagtggtgggggggggggacttccgagcgaactggcgcttgagtctcgcaaccccaggcacttgtgttctacacttgaccataatcccaaacacaggagttggcccgaacctgtataaaccccttttgtctcatcgtctttgggggattgaaccccctcaagatcacacagcttcgctcaccgaatccttgaatctcacccgctgcccccagccgaactcacaaaggggggcctcacagttccctggtggaggagttcattctccgacatctggcgcgccaggtagggtgtgtgttcgtgatttttgaggttctttcgagcgccggcgcgacgagcgtcacaccgccgatgcgggggaaggcgcagcctcctcgggagagccgcgccaccctaggcagggggctaggcctcccacttcctcaccggaaaaggctagcggccaggcctttgtggcgagtcttcggaatgtccgatggcccctaaagttccgacccagcctcaccgagaagtacgacggcggcgtcaacccctccgagtccctccagatctgcacgacgatcatagaggcggcggggggtgatgaccagatcatggggagcttcttccccatgaccctcaggggccaagcgcggggttggctcatgaacctgctgcctgcctcggtctactcttgggaggactcttgcagttgagctccgggtgccgtcgaagcccgggaccccctgtgctggttcttccgtagcggctagctttggtcccgccggctggctatggtgcccggcccggctcaactaatcgtcctttcaaccttcaagtattttcaatttttcaattcatcagcttaatacagcttgaagtcttatatttcttttcccccattcttttctcatggccctgtgacgctcgtgtattgcgcattcgtttgcttcctcggtggtaagagcccaacctctttctcatctacatgaacgtttcctcgccaagtgtgggggctaagttttctagccctattccagccttaagttgagctccgggtgccgtcgaagccagggaccccctgtgctggctcttccgtagcggctagctttggccccgccggctggctatggcgctcggcccggctcaactgcagacagggatcgctggctctagagtttttcggctctcacactcgtgcaaaagtagtcgtccgtgtagaagggagagatattggaaggaggccaccgaaaggaaagagcaaacagaatgtgtagcgtggggacacaggctcgtgggaacttgacctcgtttgctaagtgatcacaggcttcccaagatggttcggaacccatggtggggggctctcttcgagctaaaggtttgaaaggtcgtgacatgcaagcaaggtttgtgtttgcttcattcatacaagcaattctttgctataagtctggggctacgattcctagctctatcctagccctgcgtcgagctttgggcgccgtcgacgcctgggcccccctgtgctggctcttctgtagcggctggctttggccctgacggctcgctacagcgcccaacttggcttgatcatgggtgaagattgttggctatggaaaatttagtcctcgcactcgcgcgaagataatcgtttgcatagaattattattgcttatatttatctgtcgcccatctcttcctcgtagtcccgcggtacccatgtgtcgcgcgctggcttgcctcccttgataacaaaaagtttgtattcgcttcatctattcaaatgattctttgctaaaagtgtgggggctacgattcctagctctattctagccctgcgtcgagctttggtcgccgtcgacgcccggggccccctgtgctggctcttccgtagcagctagctttggccccaccggctggctacggcgcccagcctggcttgatcacgggtaaagattgctggctatgggaagttcagtcctcacactcatgcgaaaataatcgtttgaatagataaagtagaacaccaacagaggttaacaaaaggcaggggcaagcgaggtacgcggcgtaaggtcacgggcccgagagaatctaaaaccgtttgctgagtatatacatgaaataagttcacgacctaaggtacgtgctaaactcccgagcccacagcgcttcggaaaccgggaggaaagtgagaagttaaggcaacgtatgaacgtgactaaactcccaccgcccaactcccagaatgataggatagaagatcgggcccacatgtcaactgactagaagattggcgtcaaccctgaccacctgggaaagggtttggtcagggctaacgccgggggctactgtcggtgatatgggcccggggtatcatgtttagagtgccccccactagtctttgggaaggagtggccgccgccccaccttcggcctcactcccctcgggggagggccacgtggccttgaggggcagcctcctccgactagtctttgggaaggagtggccgccgcccacctcgggcctcactcccctcgggggagggccacgtggccttgggggcaaccttctccgactagtctttgggaaggagtgggcgcctccccaccttgggcctcactccc

SEQ ID NO: 6125 - DNA, 13604 bp, Oryza sativa
tcttctgtgtacggctcccagatgacgtcgctcggctggagacggtcaaactcgaacacgaagtccgggtaacctcgtctcacctggacgtgagcgtaacgacgctgcaataaacatgatcggaattagacatgttatgtgaagaaaaaaaagaagacgactgataaacttataacgcagcgaagttgcactaaccccacgtcgacaccagtaagtccccatcgtgggaccgtcctctggccactgcgcgctgcgaccaaccccgtagggtgcgctgtccaccactggtcgacctatggcaaacctctcggctgcccaaagctcaagcaacatagggcagccagcgataatcgctcccgcgtcagtcttcgtgcacgcctcacagagggcacggtacgtggctgctagcacggcagaaccccagctccactgcggcacgtcctgtggctgagcatccgcgatggaccgtgcgtagtggaccagccggaagtccacagcgtgcccgtgggtgctagtgaacatcacccacccgaacaaccacaacaggtacgcctcaagggagcgtcggaccgagtaatcatcagcgtcagggtgcagaaggtccgcttacaattaaaaatgaaatgttagtacaaaacactctgttgatcgcaaataagcatgtctgataataacaacttatttacttacagtgaactggagcaaccaagccttgctaggcccgactgtagagtacggaggaagggtgttggccggtcctaggtgtggaaggcgcatcacctgctcgaagcgcgcagtgatatcctccttccacccaacaacaccgtccacgggaccaactcgtgctcccgccagcggtagcccgagcaggtacgacacgtcctgcagtgtcggagccatctccccacagggaaggtggaacgtgtgcgtctcaggtctccagcggtctaccagagcgacaaggagtgaccggtctgcatcccaccgcttcgctgggtcacggtcgtccgccgccgcctcaacaagcctacaaagtggtagaaggcctgccgcacgcaacctgtatagagcaaacttcaaacataagtacaacacaaagcaaagttgagttgaaatgtgaacatacgcgtaccaaggaatgtgacgggggtcgacacgcaaccactcgcgcgacgtgcgtggacggaaggtgccgagctgtgcaccctcgactgctgacaggaacgagcggtggttcctgtcaatcccacggttcaacagcgccggtgtgtcgtacaccatacctgcatcaaatagattggtcagaaacatataaataattagtcaacataagtaataaatgttcataagcgaattactaacacatattaaacaagagtacaaacaaacaaaagtgtcaccatacggaatatttctgattacaacaatagctgcagttacacgatatgagtacttagtccgaacactcatcacgataacattatgatacaacaccgaatagttcgcaatactactagtacaacaatagtcggaggtactcattacaacaacattcaattgaaattacacgatagaagtatttagtccgaacacacatcacatcacaacagcgttttatttcctaaatcgatagcattgttacaccatggaatcgcctgctgcgcgacgacgccttggccttgcgcgcctgcttgttgttccttcaccatgtggtcgcctaccatcacttgcctgtccagatagactagcatctgcgccgcttggaacttctgcattcttcgggcatttcttgtaagtatggccgcgcagatcacacttgctgcagcgtaaagtcctcccacctgcttctgactcatccatatcatttctgatgcgtctagtttggcgtcgaccctttttcacccttaacttagatggatctggaatataaaaaacttgggcactcagcgttgtgtaagatcctaagatcccgaacccatatatctcctcactccatgtatgaaagattgcttctttcctgaaataatttgagacgtacacattgggagatatgccacaatcaccggcagcagcaagaacgtgtgagcaaggaaggtgatgaagcttcggcttcatacaactgcaggtacatccaccatccgccttcaagacacattcctgcacggcttgcttgcgatagataccacgcctgctcctatcaacacacattatttcataccgatgcacttgtgtgccttgagcaacaactctatgtctccgtgcctttttgattttatcttccatgtactttgtcactacgttgccaaacactatgttgttatcggccatggacggaccaattttcttgtacgcttgcgtgccgtgaaggatgaattcaacaatagcaaccaatggaagtacccgaactcctcgcattacccagttgtacacctctgccaaattggttgtcattatgccataccgagatccatcggtgtcgaacaatagagacaacttctccttaggctcattctcaatccactgagtgaaatttctgatggccgaccctgacctccttctcattgttggtgggtcatcatgtaatgcaccaagaggtatgggaggctcgtcaccttcaacttgtggtctgcaagattgctcctctgtttgcttcgttgtcaactcatccaacttgtcccacaactcattaaatttcttctcttggttctgtgcacagagcctcttaaagagctccataagatgcttgttcttgaattgcttgtagaaatttgcacccatgtgacgcatgcaccaccgactccgaacatcaggccacttagctggaagtcccttctcatcccaaccgttctgcaagtagtcaatagcccgcaacatacccgtatgacgatcatgtataaggcaaacgttgggcctcatacgcaccactgcaatgtgcactctctctaggaaccagtaccagctttcagtgttctcactctctacaaatgcaaaagccataggtagaacctggttgttcccatcacacccaattgctgtcaatatctgacctcggtatttacctgtcataaaagttccatctatgcatagaacaggtcgacaatgcacaaaagcattgatgcaagcacccaatgagaaaaaggctctttgcagcacactctttgttcgatcatcaaccgatgtaaatgtatgtaggtcatagtaagtattattattcctctgggcaatggtggctaacaaacgaggcaaattatcataagaagcttcaaatgtgccatacctcatctcaataatcttttgtttggctctccaggcctttgcatagcttatggtgtacttgaatttgttctcgatgtgcctaataattgattttggttcaaagccaatgttaccaacaacactgctgtacatctcacttgccacaaaagctgaagtgatgtttcggtgatacttctccaccccttgtaagtagcacttgtgctcggtcacaatgctaactttccaataatcattccatttacccttatatgcatggacacgccacggacaatcttccttcatgcacctcacttcatacacataatttgttgacttgaccaccctaaactctctctgcaaggaaactgcccaatgcttcaccgcctccttcatctcatccttatgagcataccttgcaccctcaattacctcgttctccttatactcccagggtacatgatcaccctctgatataacaagtccagagaagtcctcatttgcccaatcagtggccattacatcaccttcctcatcggatgatgcgtcgtcgtccgcttcctcattatccgaatcttccctctccatttcatcaacaattataccgactctctccccctcatccgccatgcccatggcctgctcctcccttggttgattttcctcattttgcatcgatggtccaacaacatcccttgcattgataggaccctctacatcttcggtttgcattgaaacatttatatctttctcttgtaccgacacaaatataacgaggggccatgaccgttcaaaagccatttccacataccgtctccaagcagcagtgctgtccatcggcattagttcccaaaaataaccttctgttgcacgactcactacaactgatactgacattgtgtagacttcttggtctattctaaatcctctcaacaaccaactataaattgactgaaatgttttctccgcaggcctatcgatacccttagatgtcattacaaaatctgacagatcaacaccatctggaccaaatctaatatttccttcaccgtgaactatctgaaatgtgaccttatttgacattgtgcctgatgaaaacaataactgcgttaacctcgcatttctgtactacgccctaagttacattctctacaatattgttctccaaaattctaaaagtaggttacattctccagatcaaactaaactatatcttacaattaacactactgtctatgtctcaattcatactattatattctatgctctggatctacacatatgtgctgtgtactacagatatgctaaaatatatggaactaaaactaaaacgcaacatatatactcaaacataacatattagtacaaatgcaaaagatgtatgggagcaaacctgtgatgaagtgagcgaaccagcagggcttcgccgctccccttctgctgccctctcctctctctctttcgttttttttggatttttagtgaatataatgaaatttcagagaggggggactgggctttataggggggaggcaaaaatcgccctcccccagggcggcaagggggccgcctgcaaaattccatgccccctcgccgcccatttgcaggcggccccccgcacagtacaaaatcgccctagcggaggccggcaaggggaccgcctgcaaaattccatgccccctcgccgcccatttgcaggcggccccccgcacagtacaatatcgccctagcggagggcggcaagggggccgcctgcaaatttcgttgacggccgtcgcccgagagcgaacggctgtctgccacgtcattttcgccgccctctgggatggcgatttttaaaaatcgccctcccagagggcggaaggcgactacttccgtcaattttcaaaatggaaaattattttttgtaaaacttttaataaaaaaaattaaaaataaaaaaaattcatccgaaagctgtgcacgtaactgacggccccatctgacacgagatgggccggcacagtgcacggggctacagctcactttgcaggaaacttagttagtgggttatgcggtggcccatgtaggataagaagatggtctactcatgcaacggtcccaatgaggcccaatattcgcaaaaaaaaaacaaaatattggacctggccccaccaaccaccacgcctgcgacaccttatccagggtcccactcgtcataatctctgtttggccataattggaaaccgaaactgcgcacagcagtactccatcccattttaatcctttgcacagagttcttatctcagttttcctaactcacctatcttgttttccgcgtgtacgttttttaaactgctaaatggtgtgtttttttaaaaaaattctatacgaaagttgttttaaaaaatcatattaatctatttttttaaaaaatagctaatatttaattaattgtgcaataatacgtacccaacccctccttctgaccacactcttaagagatcttttcaaattgatcatcatctaacctgtctatttgtttatttatgcagaagtaaatgcaatagttgcatgtctatttatccatgtgtgtaggagtaaatgctgtagttacatgtctgtttgatcgtgcatgtggacatcgttgcatatccacatgtatgcttaacacaacactttgattgatgaggtttaattaagagataattaaaaaatgccattgacgaacgtttaaatctaagaaataccatcaacgtgtgggttttaaaaaaataccatcgaacaaacgattttatcctaaaaataccatcaccgttaaaattccgtctattctacgctgttaaatacattgttcgtcctattacacttaacatagcggaatgaaaggaatcataatgacgatgacatttttgataaaattgtttgtacaatggtattttttagaactcacacttatcgatgatatttttttgtatttggacgcttgtcaatgacattttttttaggttatctcatttaaaaaaggaaggatgttttattgtcttggtcttgacgctattgcaaatatgataatcaaatttaaatagaggaagcaaccctttttttcctttcctttgtacaataaatgagctcactgctcacccatcttccatttctgctggctttcgtcaacgaaaaataaaggagaaaaaaaatatcttctcgccgtctcgcgtgctgccgtctccgtctccggcgatggcgccgccaccgccgccaccgacggcgacgaagtacttctggggcgactccccggagcccgacgagtactacgcctcgctgggtctccgccacgccgaggcctacttccagtccccctgcggccgcctcttcacgcactcgttccacccgctctccgccgccagcgacggcgacgtcaagggcgtcgtcttcatgagccacggctacggctccgactcctcgtggatgttccagaacatcgccatcagctacgcgcggtgggggtacgccgtcttctgcgccgacctgctcggacacggccgctccgacggcgtccgcggctacctcggcgacacggaggccgtcgcgagggcggcgctctccttcttcctctccgtgcggcggagcggcgcctacgcctccctcccggcgttcctcttcggcgagtccatgggcggcgccaccaccctgctcgcctacctccgctccccgcccgacgccgggtgggcggggatcatcctgtcggcgccgctgctcgtcttccccgacgacatgtacccgtcccgcgtgcggctcttcctgtacggcctcctcttcggcctagccgacacatgggcggtgatgccggacaagaggatggtggggagatcgatccgcgacccggcgaagctgagggtgatcgcgtccaacccgcggctgtaccgcggctcgccgcgggtggggacgatgcgggagctcgcacgcgtgacggcgctgctgcgggagagcttcggggaggtggcggcgccgttcctggtggtgcacggcaccgacgacggggtgacctcgccggaggggtccaggatgctgtacgagcgcgcggcgagcgaggacaagagcctcatcctctacgacgggatgtaccactcgctcatccagggggagtccgacgagaaccgcgaccgcgtgctcgccgacatgcgcgcctggatcgacgagcgcgtccgccgctacggcgccggcgccggcgccgcggcggccgacggccacgccgaggcgcccgcggcctgacgacacggcggtgcgattctactatgctcgatgtcctcctccaattcgctagattttttcctcttcctttttactagtatcgaattatctccacggacaaatgttttttttttaaataatgtaaatgatttacactcctggtctctaataatgtaaatgatttacatttgtggtttctacaagcaggcgcacaatcaataagtaaagagaagataaataaaaaaactcgaggttatgggataaatcccatctaggcatctaccatctccctcctgataatattcaactataataccaagtagaaaatacgtagaaactataacgataatatcaagcactagaaactacgccatctaaaatagaactcccacggaatatgtgtaggatgaggttgttactcttgcgaagattccaatatgatttctcatctaagataataccaacaaaacgatactcctactctataatattacgttcgttctcaaataaacgacctaaataaacattatctagtacaacgaatttaaatagatacgatacatatccgaaataggtaatgcacagatttattgtaatactccctctgtcccaaaatataagtatttttaaaatagtgccaagttaaatataatgtttaactttgactattaatagcaaaaatcaataaagatcaatcgtgtaaaattgatgttactggatttatcattaaacaaactatcataatatgcaattctttttatttaaaacattttacttttatagatattattggttaaaatagcatctcgaaaactacgtcgaagttcaaaactgtttatattatgggacggagggagtaaaatataattttgttatagcttggttttgattagtgtgcctcctcgtacaaacaaatgtctcacgtggtaatagaacttttgccgacagtcagacacaacatgcaaatgttcagagttgagttcagatgaagagctttatactatacttcctccgtgcaaaataaaaaggcaaactgtgggtttctgtgccaacgtttgactgtccgtcttatatgaaaaatttttataattagtattttcattgttattagatgataaaacatgattaatactttatacgtaacttatctttttaattcttttcataattttttcaaataaaacgaacggtcaaacgttggtttgtcttttttgggacggaggaattactactgaacagatcacatggattgcagatcagatcagttgactccacgagaggatccccaggtccggagctaattcccgatcagtgtggaaacgcaagcgatcgaccaacgacgtcgcgatggctggttcagcgtggtcaggaatgttcgttcgatcgacatagacctcccaacgcgggcgccgcaacgattcccggtagagtgtttagggtgcgatgttcaggctaaaattggaagtttgaataaaattgaaacgatatgatagaaaagttagaagtttgtgtgtagaaaaattttgatgtgatggaaaagttaaaagattgataaaaaagttggaactaaaccaggccttaatgcgctgatcgagatgacgattgagatgtatggtgccaccaaccggttgcgaacagccgacggtttggaccagacaggcgttgagctatgatctcgtcaatgcctcctgtggatgaacctggagaacgctacgcgtcggacgaacggcgcgagacgaataatcggacgcatccatgagccgtccgatccgcgcgcacgccatcagccatccaacgttatcaagcatgcatgcatgcaaaactatttaaactattttttctcttaaattattatccaaatcatgatccgattgcaccattaaatccgttgcaattaaatctttaaaataagaccacacatgaatatattccggtgaaaaaaaaagcttattattgaattatttttaaatgttgcacgctgtttcaccaagtatattggaattgtttcactaggtagatcgaaaatgttttaatcgtttaaatcggacgctgcttcaccttatataaaaacaatgtttcagcaaatagcgaaagaatatttcgagtcaccgcaacatttgatccatataaagtgaaacattttttgtggaagaaaaaatgaaacgaattctcttaatagatgatttctataatatgtgagtgatttgttgtaaaagaatttttcaattcactacaacattagatctatacataaacattgtgagtacactaggtaaaacatttttagtggaatattgtgagtacactagtgaatacttattgtaacactcaaccaatacatatgcaacatttacaaataaactagtgaaacacaataaactacttactgaaacatgcaaataacaccatgagatatattaaagaaagatatatgcatcgtgacactaaataaatatgtgcaacataatagaatttcagctgaaacatctaattttcacatgtgaaacattaagtttaattggttgaaacatatgtgtgttttttattataatatagtcatatgagatcttgttgtaaagatttaattgcaacgaatacaatggtgtaatcgtatcatagattggatgagtaatctagaagaaaaatcatttttcaagtttgctaaaaaggtgttatgtacatgcaaataacctcgtctcatctctctttcatgcatattaatgctcagaaataaagcgtatgtaacagagagagcatctgacaaagtctgtatgaagcaaagtcatagtaagatgtgtccgatttttttttcaagatcggacgaccgatctgaagtgttttcctagttgttgctatgtgtacagtgtcgtttgtagagcgtccgatttttctccccgtgtcgaatgttcgagacgaagcattttcgaatgaaccttcataacatcctgtagaaagatggtttcatatactttatgtcggggaaagcaatagaattgaagctgatcctggcctggtcgacatgaatccaacagaactacagtaagctttttcagaagtataaagaacaacaccaacgaacccggcccgtccggagatgacgataagtagtagcttactaagagcaggtacaatagcagactattagccagttataaatatattttaatgagataaaagatgagagagaagagcagcgggctacagatatgtagccagctgcagcacggactctaagacgcagtgtgtatatgacaggtgggaccatatattaatggtatagtaagcaactattgtatgaattgactattagattggctatagatgaattggagctagtagtgggctatactattaaacttttttaacgtgagaatgaataagggtgtaggggttcatgttcatgggttagacccttagaaattaattagatccctcccctatacaaatcacacagcaccgtataatttcacaaactcaattcctccctaatacaagtataatttcattctattacacatggtttagtaagcaatattctgctattggtaacctattacaaggttggtttaataggcagaatatatggttgcatggtaccaagtcatgttattttacgcgtgcgtgcttgcggtaatataacattaacctctcactctccttaccatcccacctataaaattaacactccatgaatatgagatgaatactattctttggacttcatctcaatttataacacatatttagcactccaaataacatcaaatgaaaaatttatgcataatttattgttgaaacaaatacaagttgagatgcatataatgtcaccagtcgtcgtttttccatattccttacattatgttgttgggattaacgtgatatggtataaacaatgttaataaaacatgagttaggttgggattgatcttagaaatttgaattttattgattctttgttatactaagtaacaaagatataatttttagatcttattgtttctgtatgtatactactatgctaataagttatatattagagtgtgtacctagatttcttcataccgtacattatgatttcaactagattattgatatggtatgaacaataatgttgataaacatgagttagcttaggattgattttaacttttggattttattgattttgcagtatactacagtaacaaaaatacaatttggatcttactgtttctgcatgtatattactatgctaataagttatatgttggagtgtgtaattagatttcatcataccatatattatgattccaacttgatgattgttatttttactcaatatttattattttcaatggttaattttgactgaaagattgtaacctttcttgtctctgttttatacaacttggatggtttatgacccggctaatccttgttagttgatatgataaatatcttaccactaaattccatgacaataacctatgtactttatttttgttgggaggataaaatttgttttttaaaacgacacatatctaatccttagcattaaccatctagttttcaaatttctatttaagatgacatgttagtgctatttgtttttctccaaattctcatagagcaaaacaatatactatcctatatatccctaactttcaacaaataaaagagaagaaaagttctacagttgcaggtgaatctgcaggtagactcactgtgtttatataggagatgattctatcatctaggttttgcctttggtcattcatgcatatgactacatcacgtatacatgatagaccagtgagcttcagaccagtgagcttcaggacattttccatgatcttttcttcagcatccatcttttttcatgaatgttcatgagtttgggaccggccggcggtaattatctctcacactcctaccacgaaagtacgtacaaaattttcttcttattacaggtctctcgtgtgccgtatatgccgtcttgactgctcattaaaccatcatgcatcatctgtgctgttggcctgccaccaacccttgttttctgcatgtcgaaaacataaaatttcatgtgcaagctagagttacgacgactgttttcttcttttattttgtaaaacaaaaattctaccgactatagggtggcctggtgtggttcctggccaaggccatgttagcatcttgccaccgttaagaaacaaaccctatatatgcatactttatcctttctgtagagacagatgcgggcctgcagcaaacatgggtgatgaacaattcgattgatctggctcgagacagaggacagttggagatgtccctctttttcttcctaaaacatggtagaaacgcacaagctaatatagacatgtgcacactcacttatagaaagacatatacacgctctacccctatgaggttagcgacctaggctagatcggcacacgcacaccccctatccctatgatgttagtggcatcttcgatagactgagttggtatatcttaaggttgatgaaatcatcacacacacatcaatattgactgtagatatacgcaccgattttaagcctaggaaaaaaatgctttttctctcgttctctctcgaatcctgtcgcatcccgtcttagcacagctctcttccatgccatcttccccattttcgcaagtggaggatagaggggttgggcttcacggctcctctagtagtagtacttttagtcgggtcctcctactttctcgggctattcccatggattttactcttttggtcttcgagatggctgttggcttcggatgccatcgtcctactgtcatgatgttagtctccgggattcctcctgctaacgagctgcagcatcgccatcatttctttcctagcagccaactgtggtactactagatgtgcataaggaaatgttgctccggcctacacatatctcttcggcgagctctgtgcaagagaggcagccttcttctagatctcagggaggattcctcaataggtggttgaagtggttaagattcacgaaggattaggccccatttaaaaatggacctcggtttccttcgtagttcaccatgtttcatctatcttctttgatggggttatagatctggccgattcttatg

SEQ ID NO: 6126 - DNA, 50431 bp, Oryza sativa
  unsure (1)..(50431): unsure at all n locations
ccaaagtcaaaatatcttataacctaaaacaaagagagtagataactattttgaatcaaagtaaacaaagtgaatccaattttatggataacatgttactacctattttgataggtcacacacgtaccgagtctgagtcagcgtccgagcggctttggctaggagtccggatcagaattcgaatccgaatccgaaatagaatgagcgccccgcactataaatatatcaaccggcgatcgtataaggaatttggcatcgttgaatagcctcatcaccgtcgcagaccacccatcgcctgatctgcgcctgctgctacccatctgcttgctagccggggccgatcgatcgagaggcccaatcagtgatcagcttgcgagcatggcgacggacatggaggtggacgagatgcgccggtgccggcgatcgtcgggaggaagaggtgcgcggcggaggaccggaggatggagtcggatttgcggcaggaggcggagctccgtgcgaaggcgctcaaggacaacacgtggggggagatggtggcctgcgacgacccctggctgaaggagatcttgcggaggaggtgcgtgaacgcaatgcggacgagggccctccacgcccagatcaccaggctcatcgacgacatggatcgccgccatcgcaagttcttcctcacggggaacgaacaggtgctctggccgccctcccatgtgtactagtatcatggatgcatctcttctgtgcaattgttcatggttgaatcctttgttcctctgttccagattatccaataattctatgtgtaatcaagtaggtaattattattacggtgtagtagcaaacttttcaaggttttttttggccttagaatcataatagaatttactcagatgaagctgttggtgttgagatcggcaactgctaatacggccgaatcatcattctagcaagtcaagagagatttagaggcatggatgaacattactaatagtgctatcacataagtggtttaaagagaaattcagagtagtacatcactacatctcactataaaaaccaaccgtagcaatagctacttacacctgacctaaatgagagctcctagcgcgggattaagtgacgcacgcgggattaacgctagcacgtcatggaaaaaaaaaggggctgctagcacgcacgcacggcagccgctttcctttttctctctgatctcctattttggtgctttttggattttttttaaatctctttcttttttttctccacacgcgcgcataattttttttcaatattttacaaattcaatctttcacctttaatatcagtcgagagttttaaatttgagttgaatgtttattaaatttaagttgaatgttttaaattttgagatggaagttttcaaatttaagtcgaaggtgaaagtttttaaatttgagttaaaagttttcaaatcttgacttgattttttaaatttgagttaaaagttttcgaatccgagttgaaagttttcaagtctgaatagaaagttttcaagttcgagttgaaagtttcaaatcagagttgaaagttttcaagtctgaattgaaagttttcaaatccgagttgaaagtttttaaatctttaattgaaagttttcaaatctgagttgaaaaattcaaaaaatcttaagttgaaagttttaatcttgactcctatacatgtgcggtagtcaaaggcgaaaaaagaaaaaaaaacgtgacaacgccatatagtccatgggaaaaaaaagaaaaaaaggaataaaaaaacgtcacaacgccaataaaaaaaaagaaaaaagaaacatcgcgtctacacgggcctccgtttggcggcgtcgtaggcgcgtatgcgctagatagcttttccggacatgaatacctacctgaagctcaatcctctcactctttttttttcttttttgcttattcatctaaatactaacaagttgaataaactagatatcatgaccatccaaatgtgaaatgatattacaattaggcaaaaatcaacgacctcttccattcttcaatcaagaaaaaagaactgaatttcattctgccacaaaaatattgcattactgaactacaggcccaatactgaatgttggtgatatgggcctgggggtatcatgtttagagtgccccccaaggccacgtggccctcccccgaggggagtgaggccagaggtggggcggcggccactccttcccaaagactagtcagaggaggctgccccccaaggccacgtggccctcccacgaggggagtgaggcccgaggtggggcggcggctactccttcccaaagactagttagaggaagctgccccccaatgccacgtggctctcccccgaggggagtcaggcccgaggtggggtggcggccactcctacatagactagtcgaaggaggctgccccccaatgccacgcggccctcccccgaggggagtaggcccgaggtggggtggcggccactccctcccagagattggacggaggaggctgccccccaatgccacgtggccctcccccgagggggatcgggcctgaggtagggtggcggccactccctggccgagactagagggagaaggctgccccaggcgccacgtggccctccctcgaggggagatcgggcccgaggtcgggcggcgaccgccccctcccgtgactaggggtcggactcccccgaccccctctctaggtcaccacgtacggtgggttaggtgtccgcctccaggtgcccacctaccagcattaacggcgacccgagcggtcgcgccacgccgcatttaatgcggtgtgcagtgcactcaaccggtctgtgaccggtcgaatgactgatgggacccaggatgtcatgcgcaccatcgcgtgtgtcaggcgacgtgcagcccgacatatcccatcaaataatgatggtgagaggttctcatcctcttatcccagccggagtcggtcctcccattttggtcaaagcaaggctcccgtttcccggtgtaataggagcccagaagtcttcacccattaaatggtgactgacaggggcaccccccgtgtcaggcggcaagatttgataggccccatcatcaagacgacgtgcgcatggcttcccaagccaagagacaagacatgcatttaatgcaaagattataatacttctccaccggagctaggttaggttgttgggcccatgtggtaaccccttgaggtataaaaggaggtccaggcctagtggtggggggggacttccgagcgaactggcgcttgagtctcgcaaccccaggcacttgtgttctacacttgaccataatcccaaacacaggagtaggcccgaacctgtataaaccccttttgtctcatcgtctttggggattgaaccccctcaagatcacacagcttcgctcaccgaatccttgaatctcacccgctgccctcggccgaactcacaaaggggggcctcacggttccctggtggaggagttcattctccgacactgaaattcttatcgtcatcatgcgacggcccattactggcgagtaaataaaccagatatcatgaccatccaaatgtgaaatgatattacaattaggcgaaaatcaacgacctcttccattcttcaatcaagaaaaaagaactgaatcttattctgccacaaaaatattgcattactgaactacaggcccaatactgaaattcttatcgccgtcatgcgacggcacattactggcgagtaaatacgacggagagatctcccttttttatttctttctccggtcagtctcacgaataaataacaacaacgttgcgcttggacacacgagccagccatcatcgatccaaacctgataaagaacttgatcttgccgtcttggccatcttgctgtccctgtaaaatttgtcaattatgtgtgtgatgaagtgtgaacagcgcgttacattcgactgatcctgaaaataatcccccaaattaatatctgagctagtagctagctgcaatcgatcctgcaagctacaccagcggccaaaaaacgagccggattaaagccggtgcaattgcattgatgctcccaacgcccaatctgatcgacaatttgcactgcacgatcggctcaaatcagctcgtcagtcacactcgatgcgtaacagtgacagtgacatgtcactcctgtgtctgtgactctgtgtggctctctgtaaaaacgggatcgagagcgcgcgtgcgagcatgtgctcgtcgacggcggcggcgtcgcgaacgagtggatagggcggtgcgccgacgatctgatcgatccgcggctccgaccgcgacggacgtcgatttgggaggaaatgggttaatggaatggatgcacttgcagttacagttaagttaaccagagctttgctttatttgctctgctctgttttgtctgttcggtcactccgctggtccactaaatatcaccctttatcctgatcgattagttggatgggcacgaggaataactggtatgcttaaaaggtaccggtatttttttattgaccggtaaacagaatcaactctgtactcttcccatcaaaataaaggaattaacttcttactataaatttaaacatagaaagaaaatactagcaccgttataaaaaaagctatctactactccctccgccctaaaatataagtgtttttaattagatgagacacattctactatgtggatagattatcatacaaaacataaggcagcaagatcatttgaaccaagggactagggtagtacatagagaggaacggatcatgaagttaaccaagccataacaactttgtcacacataaatcgacgtatacattcaagacttcgggttggccatagcttcgttgaaacaaaagtagaaataacctaagtgagcaatagtttaactgattaggtttcttgtgatagaatttccctctgaatttctaaatgtttaaatttatagctgattattttttttattgctaggcaatgtaattgttgacaatgagatgtccgtgttgatttcatcaatattaagatataccaatccaatcttttaatatggtgtgcatatgtgtatttatagaagtgagtatatgaacgtttacgtttgtactgtgttctaaaaaatcgaaataaattttactacagtattaaaaaaaacttgtggttgtacgcacatatagcctagtcataccagccggcagtggctcgtcggcaaaaactccatcaaattttaatattgatgtgtaaattgatggtgaaatttatagagtaaatactatgaatccagttactctgcagtaatgttgagcaacattggtgatgtgaggagaacagtgaacgaatgcattgagcatcagcgctctactgtagctacagtatagtagatgttgctttacagcagaatttactgtagcagatcatccgaaccatcaatcacacaaccaacgatacacagtatccctaatgccatatattgtacctctctgccgtattacatttacatgctactcctataatatattaatatattatagtaacataatatcggatgagacatttcatattataatgtagacaccctcttatctagtatattcgttgtactatgaaatatctcatccgatactagtttattatattatgggagagagagagagtactgtaatagaggatcccaatccaaatacgaagttatattgaaatctattcgggttaaaagaaaatcttaagcgacgggcgccttcgtgactcctcatttgcatccaattttccccctgacccaaccgtgtgcccgcgccgccgaatacaatagaaacacacgcaaattaaaacacacctccaaaaccacgcgacgcgacgcgacccccggttcccctcaaaccaaacggttcgccgcaattcccaccccccccccccccctcccccaaaacactgccgcaccacgcctcgttcccgcggactccgacctctcccgaatccctttctctcctttgcccgcctatttaaacctctccctctattcccaaaccccaacatctccacttgactaatccacagttccactctctgattctcaattttcaatttcttaatagagaagaagcgatcggattaagcgatgagtgatgacgagctgattccggggctaccggaggaagtggcccgggaatgcctgctgcgcgtgggattcgaccagctgccgtcggcgaggagcacgtcgcggcggtggaaggcggaggtcgagtcgccgttctaccaccgcctccgcagggcccgcggcatggcgcgcccgctcctcgccctcgcccaggccgagccgccgctcgccgccgccggcccggctaacaagtacgccggcctgtccacctcctaccgcctcgtcctccacgaccccgtcgccggcggctgggccgcgctgccgccgctccccggcgccggtgggctgccgctcttctgccagctcgccgcggtggcggcgtgcggcggggagaggaggcggctggtggtggtcggcgggtgggatcccgagacgtgggcgccgacggacgcggtgcacgtgtacgacttcctgtccgggtcgtggcggcgcggcgcggcgatgcctggaccgaggcggtcgttcttcgcgtgcgccgcggtggggaggtgggtgttcgtcgccggcgggcacgacgaggagaagaacgcgctgcggtcggcggtcgcgtacgacgccgaggccgacgcgtgggtgccgctcccggacatggcggcggagcgggacgaggccaggggcgtctgcgtcggcggcaggttcgtcgccgtcggcgggtacccgacggaggcgcagggccggttcgccggctccgccgaggcgttcgacccggccgcgtgggcgtggggccccgtgcaggagcgtgtcctcgacgaggggacgtgcccgaggacgtgctgcgccgcgccggcgcccgcggcgggcgcgacgatgtacatgctccgcgacggccacctcgcggcgcgcgacgccacgaacaacggcggcgccgcgtggcgggcggtggcgagcctgcccgaggacggccgcgcggtgacggccctcgccgccatcggggacggccgcgtggtcgccatcggcgcggggagccacggcggcgagcaggcggtgtacctgctcaccaccggggagggcggcgacaagaacggcgcggcgcagtcgtgggcgcgcgccgcggcgccgccggagttcgcggggtacgtgcaggccgcgtgctgcgtcgaagtataacgatacgtgcaagtaatgtacgtacagaaacgtacactgtacgtacgtacatatgcgcgcgcgcgcgcgcgattgtgtatacgtttttgtgcgcaatttttatagtgtatatgtttgtgttgtacacttaaagctcagcgtttcgtatatacgatgatccgagatggagatgatcagttttgcataagctctgttttgtttgtttacttcacataagcagataagctcattggagtcttccgtgcatccacaaattgaacgctatttttttcttttcaaatatgcaaacagcatcaagcgtgtgtacactgcacggaagaagcttcttttgatataggacgctgacatgtaggcccgtgatatgtaggctaatgaactgtgggactatcaggcattcaaaatcagagagcaggagagtaagggggttagaacatgtttaaagagacaaaagattataataaattcatattcttgctgaaatccttttaaagtgttgtatatatatacttcctctgctctataaaaaaactatttttaacggtgaatctgaacatgtgcatatacatgtttgggttataacacgttctgtagaaaaatcccgcatattactgctaaacttattttttgataaaaaatatggcgccataaatatagctacacccaaagaaaaataccaccacccctaccatatgtcactgattaaatttacaaatcccaaaaatagaataatgatgtcagtaatatccgagacaattgacagagccagctttcggatgatattttggcaatcatctgtgacatttccctcttgaagacacggacaggacaaaccaaaaaaaaccatgagccaaatggattcaaagtggaccctgtagacacatcacacatatccctgcagcggcaagtgacgatgtgtaaaccagaagacgacgaacggcgacgatctgatccgaaaacccgccgccggtaaatggcgcgcgagagcaaccgcccgccgcaggataccttttttttggggcgcccaacggataaccgttgccggcacgaggtcccacggaaggcgaccatgtcgtgtgccgtttgacggcgacgtcctccaatccaacccgggcagctgctgaatccgccagctgaaactggcaagctgatgaggatgtttttcagtcagcgccatcggttactcctcaactcagtagcccccagctcaaatttaaaattgagtaaatttcatcatggactacattttttttaccagtgtttcatattgggctagggctaagtcaagattttcactttacaccatgtttctttgccaattgccaagagttgcactttggggcagggtatgttcacaacttgggcatgtgtgactgacctcgccgtagatattatgattggattgtgatgacactcaattcaaacaacttcttgatgcgcggtgtggcacggttcaggtagagatggctaaacccactcatgacatgacgaaagaacgagatgtgtgctatcgtttcatgcgtgcagaacttccttcgcatatctaggtgttgtcacattgcaataatctctattacaagcttgccgacgtccacaatccaatcatctccatcacaagcttgccggcgtcctctcttatctcctgatctactgacatgtgagagcatccagtccaaagtgaaagcttttggtaaaagaaactggcccaaagtgaaaactttgtctttaggattgtccatgttgaaacttaggtaaaaatacctagaccaatgtgcaatttactctttaaaatttaaaagttattttaaaaattgatcttgattttttttatcatactttatttcagaatttatattaaaagttaattttatagttgattttgattttttttaatcgtaccattgaattttaagtcgtccaaaatacatataaaaaagtttttcatatgaacaaccttctctatctcatattataaaaaagtcaaacgacttataatacgaaacaaagggaatattttttaaccgctaacaaaagctacagcttgtaatagctgtaggcgaaacgacggtttctagtgaatggatactgccacagtggatgggaagaaagggctgcaggtttcgattccaacgagaggcaaaaatgcctttttggaacgccgacaaaaaagcgaagaaatttctttaaggactcctcttgaaaaagagggaggtgaatcaaactaaaaactttaagaattgagataccttggctgcgtactctttgttcatgagcttcagagtcaccgtgctgccaattcttaaagctgacttaagaaagagccaactctgtcaacgccagaaagttcaccagcttgtatctgaagcaaagatcatttctggctgcttcgtgatgaagtgcccaaatctttctttcctctgctttgcacctggttattgactgcatacggcaaagcataatttaaggtcaattcttggtgcaaatccaactccaggcacttctacttcataataactgcggagaacaaagccacaaaaaatgtccggcacatgcagaatactaactattttttttttgcgaggaatctgacctaaaaattggcagcatgttctgactataggctaagacagaaaatggatgttcccaagccaatatccacctgataagctggaccattggtaaagttgacatcaacaaatatatccagaagtcaagccgttggcaccgatgaaacctgagtttactgagtacgatttctgcatgctgatgacacaattgccattcactaaatctccaatgttgatcacataagggcagcatatcttaccagatatggtggatatattcatgagaagtgcgttcagcaatctaaaccaaacagaccaagtagaacaaatgagcccggtgctcattctgaactctgaacttggtgatggaagcagtctatctatcgacaggctgttggttttctctttcttctttgcaccagcaagctttgcactcctagcagcatcctccattttgcagcatgctttgcagccccatccacctctgccggacttctttttggctgaagctatcttcttcatcttctccttcatatacacagctgtgatttcctcttcagatttgtatccgccacctctccatggtccttgctggaatccatttcattgggctgctctttagaatccttgattgatttgtcttctttgatttcttcttccttgaagtcttgctctctgaaggtacaggagcaccattcttatcaccaccattctgcttatctggctttctttcagctgtaaatttgggaaaaatcaaaatacttgcttgtttattaaaatatatcatatgatcaataaacaatagttaatgaatactccctccgtccctaatataagggattttgatattttgtttccactgtttgaccactcattttattcaaaaaatttatgcaaatataaaaaacgaaaagttgtgcttaaaatactttggataatgaagtaagtcacaaataaaataaataataattcttttttttaaataagacgtatggtcaaacagtgcaagtaaaatgttaaaatcccttatattagaggacggagggagtatgaaatagtgaagatgttcttaatttggtacaagtcacaccatgagtaagttctatacatttactaattgcatcaagctgggtaccatgtccagaaatccccagctcagccagcacagtatctagttctgcaagctctttcttcttccattccttcttcgaaagctgcctttctgtctctttagattgtgcaggtattagaccagaattcttaacctcaagctcagatggtacatcacctataccaacatcaaggtcatcatcttcactccccgattcctagagagcaaacgtacaagtaattaattaaaccagagtgagttggaggaaaaataattaggacacatacatcttaagggtggacagctggacacatgagccacataccaatttacatacctaagataaagagcagaatttattttatgcctaattagtctctgaatcagagaaaatcttgttcatgctgtccctcatagaatcgtgcaggagaaataaattagaagaatataaagcttaaataaacatttccccctttctgttctgtttagttaacactttcatatacacaagaaaaacatgtatcgttcatctttgctttcagcagtgttcgctaggggattcccacaagcacaaatttatgtttataatgagttcaaaattttctttattgcgaaatgatctatcagactatctggtatggtgtggtatcgcagaatgttgtgagcatagatactggcatagtctttagagaatactttagcaaatattggtactaaaatatatttaaaagttctgataaaattgaatataataaaaatatgcttgagataaatttgcacgcttgatatttatgcgttcaatccaaatatttaacaatgttgacatttttaaaagtaatttttgattaaatctctaacatgatataattaaaaatatatatgtagagtttctaagtagaggaatgaattttcttttttttctcttttttttggtaacacacgaacattatggtacttcaataaaacaagagaatctcccctcaaagaaaaaaaagaaaagaaaagaatctaccacttaataggatggggaaaaaccaaagcattgccatagatgggaaggtccagaaatggtagcgcactgtactaccgcatgcattgtcccaacatcaacatcattcatgatacgaaaaaggtgagaccacaaattcttctggcaagtcaatagtcgctttgcaatttccactagtgcaccgaatgccacctgacaatttgacaatttaaaccaagcagattctgctttgcattacattattatcgtttaatcaattattcgaagtgtctacgaacagattggttcgaagagaggagctattgttcgaaacgaagatttaaaatttcttttcctacgattatgaatacaacccacaactatctctagtttatccagattacatcccctgtacgggtgtacacgactgactcatgcttacattgaatcgctgaactaaaagagagaaagagagaagccaccctacaacggacgctcgcaggttgtaaaaccagcataaatttcaaggttttacaggttctatctcggtctccatgccattccacccacactcccagaaccatagctttgcgcgctgttattactgttgggtatcacaccatactgcgactgctgcaccatgctcgccggcgcagcggcggcggcggcgccgccctgcgccggccaccaagcattggtctgctgccaggcttgcgctggctgaagctgctgctgcatcagaggaagttgctgcaatggttgctgggttcggaggtaagcctgggggatagagttgctgggtatctgaggttgcaatgcattttggtggtggtaaagctgctgctgctgctgctgctgatgctggtagggatgatgcaattgctgaagcgagggcggtggtggtggtggaggcagcggttgctgtggtgtgggtggaactgggagctgccttgttggctgttgttgggtgacaagctggttggggttccattctggtatatcatcgtcgtcatcatcatcccaaggacgagcctgaacagatgatcttttaccatacttctgaaccagttccctcatttgctctaccgggcgagcagaggtaaggggtacatgctgccggcccttgtaggcctgggtggttgttacattagcagcaggattggacgagttaacaaaattaaattcaggaagatcgtcttcatccctagcaacaccagggccaaagcccggagggacatcatcagttacatcttcctcgtggcggtgacgctgaactggaaaacccggcggcgcgccgtgcgagctcataggcagggagggcctagggcctggagtagaaccagtaacctgcggtttctttaaaatcgacggcctccgggaaccatcatgcctagggtgtgccggcatcctgggaacgttgggcctccgccagacgatgaccccgatgatggaggatgctgacacagcaagactctccaaatgctcctttggcaggtgccgagagagaatctccacagttttcccttgagaagggcacaggtacagctctattccatctgcaggttcagctaaccctactctttcatctgaaatatacgagtcaattgtctgcagaagaatagacaaatttaatgatcaaatccacaaacattcattaagctagctcctgaaggaaggtctttctctgaaagaaaaagggctacgatagaaaaacctgcaagagatgttggcgaccactctcatgagaaccttccttccaacacaactcagttacctatgaacaaagttggacatattcaattactatcctatcaacaccagcatgaaccataatctgtgatgacaaaagcgcactaactatagtttgaggcatttagttaaataaaggatagatcgagtaacaactcccaaacagagtgatacttctagatgctaagcatacaatcataagaagcatttcaaaagttaagacttaaaatacatgcaagagatcatgtcaagagttgttttttttgtctgtaacaattgttttcttttctggctgacacatgctccaattcatagctttttgttttcttggcaaatttagcatataagtaccaacatttttcaaacatcctgacccagacctcagacatttaaacatattagttagttttcaacaggaaaaatgcaagattaccattatagcacggctcctagatttgggaagctgttcaacaaactcttgaaaggcactaagtttgactctccccttgatttcaacaaagctccgccattcttttactggtggcttttcaccactgcaaagtgaaattttaatacatgtcatcacaaatacaaaaataaaatacagaataaacacatatcaacactatctttcaggtagagtggatcatgtgtacttggacagtagcagggcattctgggccacaacaatgaagaaccagttgtaaattgttatcaacattaattaaatcagcaaactttgcaaaagggatgatttagatcagtattaactaacaagacataaatcgaacaaatacacaagtatacaagttcccatcagaaagaggtgaagtagccaagctggaccctcaatgacatacacctacttaatgcactctctgcggaatcaagagaagtacactgaagcatgtcacatttggcagtgcttgctaattataaattattactcttagcagttctcacatgaagatatatttatatacttgcatgccatgagctatcagtttttacttattacttaatttgatgctagatgtctagcttctaaacctaaagtaatttaggtagagcaagaccttgagcctcttgagaaaccaatagaaacaaggaatcaaacaacagcagctagcttcaccagatgaggaagaaagacttccataactcacttgcctgaggcgcgaaagaactgagatcttcaacgaaagccccccaatttcattgacccttacttaatgaccagtgatggcgatttatgcttttattgcctcccaaacttatcattcttactcaagcttaagaccaggacagaatagttggagtataaataaataaagttatcatacgagtcttggacatatgcaagttgtgtgtgtgttttgccaaggagtgcatatgccatatagttcaacaagtatctttctgaaggaacagacaatcaatttccaaaatacgaccaagcgaatacaatgtagaagatgaaattgcagaatacagttcagtaaaagctttgtgcaaaagaagatgtacgtgttctgtaaagcactaatctgcttttaataaattaaaactaagacaaaggcatcgaagagaatgtgtcaaatcatcatggtatgctaacagaaacgattgtatattggtaattcaaaggaaaaggctgcagatgaaacaaaccttttgaagatggcaacgacatttgtgagcgaagacatggtaagttgaattgcaccctcccatatactttcacgtatcataggaagagtagttgccatattatgcacagtagagtcacgattcagcacattttcagtagttgtttgtttgacttcaacactatctggggaggattttatcagctttccttcacgctgctcaacagggcccaaatttgaacccacctcatctttgggtgactctaacttggactcagatttatcctgcgaagatggcaggtcagcttcagatacaatcttctctgctgcagaaactttaacttcttcctcaggaagttccgcagattctgcagtagtgtcagcttcgtctcgatcatctgaatcttcttctggcgtcccagctgagagattttcaaaaggtggttcagaatctaaaccttgcatgaattcatctagtgaagggatcggtggaaggttttcagtgtctttcaagtcatccaccataagttcttgcataaggtcacttttctcattatcaacatattctaaatcatcttgtggatcgttcttgcctgccccattatcttcatcttgtgaagtcccatcaggtgcatgcctgcagatcgactctagaggatccctgttttatcatctgtactttctttatcgtctgatttggtctgatcttcaggggcttttgatggaacttgagtaagaagattacctccaagctcaacctccactgagataccatctgtttcttctacttcaacttgaaattctcctttgtgtgttttcctaaccaaacgtctaacatcaacctcggtactaggaaggacaaccatttgtgctagttcttcagctttagctaaccgccactccgatagctccttggaagcaagttcctccgcagtcattgaacagaggcgatcaggtgtaatatctccagacaataccctctctcttaactcaggattacttttatcttttagattaaatagaagagatctacctttctccttatacttcttattaactccaccaaatagtttgaacagctcctcttcaaccctaactgctaaatcatctgccttctgaataatgctatccttatctatcgcttcctcatcattggcagacttcattcttttggactcagattctgagagagtgtctgcaacaacagggtcaatgtcagaagccctggacctttttaaattaggttgtgtggcaggttcaggaaccccagcatcaaagtcagaaacccaacaaagtccatgaccttgcaagagttcatcagcaacaactgtatattgtcccaacatttcatcttgtaaagaagcattctctggttgttgctggatgtccgcgtttaatggtgtggctatgttcgaaactaaatcactgtttaacttctcatcttcagcacgcctctcagcaccaacacttgtcaatacttccgacttggctgcactcatgccttgggatgtggtggccacttgatctgcatctacatccatctctttcttttggtctgcagacccatcaggctgcacatcagaagattgattcttactctgatcagaatctgttctcagagcagcagaaagtgactccctgaactttgatctcacagattccaattgctgagtttgaacctttgatggtgtctccttctgtgcagaacgtttgttcgatgactgtgactgtgtagatttcagtatttgaacctttggagaagcaattgtcggttgcagtttcttgccagcaggagagtgttgtgatccaaccattgttggcaaagatgttcgaatacttagcacttgctggggtggcctcaatgatactctgcttagagaatgtgcccctgaagaacgcggagtctctggcctagaagcaccaatttggaccgattgttgactcataggaacaataaaatacgaactaattggaacagaagctcccatagaaaacattggctgtgcaccccagtcagcaggcaaagatggataaaacatagacggatactcagcctgattaggttgaatatttgaagaaggcaatggttgagaacccatgttagttgacatgggtgtctgcccttgatttgacaactccattatgcaactatttcaaaaactcccaagatccttgacgagaaatagttgtgttgcttagaacagttaatacatatatctgaaatagatatgaagcaatggaggtcttagaaccgtaaacgggaaaggagtaaatacaaactgtggaggacatcaaaatagatgctccctgggccagtatacatagatttaagaattaaaaaaaatattgaattagaatttcgtaaaaaagcaatccctatgtaaaaatgatacatcccacatgagtatgaatattattatggtggaaaattgaatttattagaaaagtacgcacacagattccattcatgataagtattctgaagaggtgtccgcattaatcagttctagattaacacaacaatagtctaacagtaaaaagaaaaacaatccagaatacaatcgtgatacaacaaaatgccaacatggctgttcatacgcatacagtaaaacataatcctccacagcgcattgacctagagtgaagaaatgaattaacgtttgattagcaattgctaggaaatgcaccaggcggtgatagcagtgaaaataggaggcatgtgaatgaagtaacactaacagatctcaatacagcttaacaaagcaaaccctagagctataacattcgtctacatcgaaccaatatcaaggaacacccaaccatcatcatcaaatctaaaagggcacaacgcccagagaagggacgataacctcgctccgtagacgaatcccccccggcagcgcagacccaacccaaccaaaccctaaacgtctccctccacgtatccgacgatcccaatcactcaaacccaacgaacaaatccctcgctcacaccgagccgcggcaatcacgaagcaaacacgccgacaaaaaaaaaaaagaactacacgcatcgatcgcacgaatcatctggagctcagaagcgcccggcggaagagggatccacttttacctaggcgccgggcggcgacggcgacggcggcgagagggaagggggggggggggttgggagatttgcggggaaggtgggggattcgatttgggggtttagggttagctatgggcaggggcagaggtcacggattgtgcgcttcgggtttccatttggttcgtctcgtctcgtccccgcgcgaggtggtgaggtgaacggctgctgcgtggtggatggatggatgaggtgggtgatgactgggtgagtggggtgaggccgccaccaacgtcgcaagtcgcgactcatctcccgtcatccgtctccttcctacccacgtcgcgtgcggtgcgggtgcgggtgtttctcgtgttgggccgtgtctacattggggccttttgtgggaacaagtctattgttgactccgtttctctagctccaaatcnaatgtcttccccccccccccccacaccgtaaaactgagtataactatgacatctctcccatcaacggaaatcggtataaatcgactcctttaacggtacgagaactgacgcctggagaaagagagatgggggaggggagaggtgatggtgatgagatgaggatgacatgtgggtcccgctacttactcggtgaatcaacctcgatcaacgtaccatgtcagcagaaaccactttgcaaaccgttgaaggagttgattttcaccggtttttcaagatggaggatgtgttatatccagtttagcagttgccggttaagggaggcgatttaatcaggagcaagacatgagagaggcacaatagacttatttccgctttatcatgtgttcgatgggacgtgattttgtggtttgggcctcttgttgtggtttgtggtttgtggctgtgccctgaacctttggcacaatagtaaaggtccatttgataggacactggctctcagatcctctctggtggagttggagcctatagatctttacttttacaaattaaagtgaaggattcaccccacaaagtacatactaggaggggtgaaaccactttcctagcttcatatagctctaccaaataggcctgtagtagcaaatttggtaggatagaatcttaggggtgcaagcggaccgatccgtgagtttaaataaataataatttatggtttttcgcgtcgcggtccggcttgccgcatttaaatatacaagtggatcgatctataaaccaatttataagtcaaattcatagttaacccgctagtcaaaccggcgggttacgcactatttttgcctataagtggtttcgcgggtaaacccacttacacccctagaatagatgcttttagaaagaagcaaatcttcatattgtagggggaaaaaatggcaccatccaaaccagcgcttagtctaatcactgcttcctctctaacgcatgatatttacaagatctagacactccttggaagaaacaaattttatagtattttcaagggtgttgaattgattcacatgaaaaatcctgtaaaatttatatgttccagcccccataaaatcatcttaggattttcggagcccacggatcatccaaaaatccgcccatacaatggatctccttttctatgttggacatgcaatcctaacaaattattttctctctccatgtgctcataaaaatatatatcttgtgtttgttctgttgttagattttaggaatcatactgttgaaacatctctgtattatagttccaagagtaattttacggtccttaaggaggtaccatgaagtaccgttttttctattgtaaatttggtacctcatggtacctaggtactgcgaggtatcatgaggtaccaaaatttaagtgtaaattttgatacctcatgatacctcctcaaggacagtagaattgctctagttccaaattgtgtcctgcaaactatttccaggcatcatcactgtgtagaaggataagaatacactggcccaatgtagtagctgttcctggtaaggcctcctctccaccaatcaactccagaatccatccaaacttactacatactgttaagtagctcaattgtctctccaaatcaatcagcttggatgatgagcttcaaaaggacaggacagggacacttggaattctgttccctgatcacctgataccctgatatccaaagatgctaatctatacattaggtttccaaccatggctgtgctgtttaactctgtttatgctttcctgatcaaaagcttgacagtagaattcatgtttgtaacttgtaaaaaataactggtgtttacaaaaccactaactctctaaaaaaaagaaatttatatttagaattatctgcttaaatcatgtagttcaggaattcggtaagacgatttcaagtatttgcaagaacagcttgatgggagttgcttaatgcttttgtatgggatgatgcaattcctatgaaaatcttgtagaaaacttccaaggaaagacttagctactattgccagttcaacgtactctgacaaaaaaaatagtaatataaagataatctgcaatcaaatattctcagttggcgaacgcctgaacgggatatgctgatgcaaaagatatatattctccgaactcagatcatcttatggaaaaaaagaactgatttgccatatgattggttgcttcaaacctctaattgtgtgacacattgccccatagtgcttgatgtgccattgagatgatgtttacatccaatatatggattattggatgctggggcataaacaatgagtcactgaaaacaacatcttctgaaaatgtcaaaataatatttacaatcggtatgtaaattcaacttcaattgagctattctatctctaactttgaatcatgcacgcctggtttaaagagattaattgaactgtggttcattttgcttggatatgataccaatgagctatcactaattcggtggcaggtcaccttaatgaatattaaccatggattgtgattgatgaattattagaagtttagaacagtctaactaatctaaaatctgcacctgaatggatcaatggaaggataagggctagccacttttatggtctgaaattgatatgttttcgcactaactgcagatatatattagcctgcatctttacattcccataaaccatatattattatattttggagtcagtatgaatgcaaaatctgtgatatgatataggagtatatatacttttttcaaaagtagtttttctacctctgcacatcttcttacacattaatcttcagaagctgaatcttaagcctgtaaaatatttgactacaattactacttttttttactgttaaatatttgatacaccaaactgaagcactacagttactatctaagggcctattcggtttggaggatttacgcgagaattttggaggaattgaactgtcctgtgaaaattctgtaaaattcctacattccgaagatggctaggttccttgtggtggaaccagtccacctgggttcaaatcctagatttgacacgggtgctcgcatttacggttaattattcttttagtaatagaccatgtacctatcaacagcgatgcgtctgtggtaactttgttaatctcaagatacgttgacttagtcttccggaggtgctcatatggatagggtgtgtgtgcgtttatagggatgagtgtgcgcacgttatgggcacctacattcatactatgtttctaaaaagaagttgatggagaaaaaaaatggtgcactgaatgcggtcgtattggctttgtattttggtgttgagtcccttccatacaagaactaatggacacttcttttgcagtttcaaaccaatgttgcattgttcaacatacactgttttagtcccatctgttgcaagaaccaatgcagatcactgctgcagcaactgaagcatccgaaggggttagccatatccatcaaaccatcagcatcactatcacagtaacagttcagagcatcttcagaggcatctcctaatcctagctatatatgctccttttctagctgaaaattggtggggaacacgatgaccacgacgcgatcgtattagtacacaaatcaaaagagaaataattaaacaatggtgcactatcagtagctgttaactgaaacagtctgctctgaattctgaagattgcaaggggttaggtagagctctaggcctctagcctagccagcctttctcttcccttctccttatataccacactagaacacaggagcaagaacaagccacaccattgctcatcacctctccatctttagtttgaagtatctcagttttgcgattctcctcgctgttcaccgcgaataatcaagcatcgattgacgacgacgatggacgaaccatcgcagggcggtgaccagaagctgtcggccatggagcatgtcaagaaacgccatgaagagaagggcttcctctatgcctggtttgtacagaaacacaacactctgcatctgcatgcatgatcatactgcaagttcttgctgcatgcagtagcttcagttcagtaccagtgctttagctctgaactctgaacttctgaatgcatctcagcatgtgaactctgtatcagactgcatctgcaacgatgtggcactgcaagaacaatcacacatgcatacatgatgattaattggttgccgttaatttgggtgtcggatttattttttttttccttttttgcagcttgttcatgctgtgctgctgcttctgctgctacgaaacctgcgagcactgcctcgagtgcttctgctgctgctgcaagaaggacaactgatagagatcaagatcgatttcctggatttgttagcgaattgttcgtcgaaataataaaaggctagcttggtgtgattcttctcggttttaatttgtgtgttaactatgcgttaaccgtggtgagctagctaatagttatgtactccatgctgtgactatgagtgagcgagtgaattgcaggtggattgtggttgtaagtttgtaagctggatttctgatttttcatgtcagttcattgttgtagtacaaattcttgtgtaaacataagtgtaggtgattcatgttgcagttatccagttatttcttctgcttgcataaactgatacacagaagttcagattagacgggaagatatgcagaactaaataactgtagagttcagtggatcatgaaggcatcttgtttgtgatgaattatttttgcctttcttttctttctccctatcttcagttttgcattgcgagaatagaaagcaaaggagaaaatgaaaaaaaatgttcaaatgttataaaaaaaattctccaattcaaatttggaaaaagctctaaaatttgaaacaaattttcagcaggttattgcaacgatttactttattgtacagataaattttaaaaatagcttaaaacaattggtataaacaaaagattatttttttgggtgaaatgtattttgagagatgtgaaacaattaatccatcataggataatcgatggatgtgtaaagaaatggacaagagcaaaaagctcttatgctaagttggggtcggggagactggggagcttctcgttgttatagcttctctcagaattagaagctcccctatacagtttagtttttggtccacattatgagaagccgtagttgtataatctagaaagtgaactagaagtcagaagttgaaaaacccatctttttcatattctcagaaactggctgccaaccagttgtttctcaaaatcttaaactccccaaacaggcctgagagtgatcccacgcctatttcttatccaacggtggttagatcattaaagatatttttttttgtcagaaaggggaaaattgaaaagtttatatgtactcaattttgtctgttatactaaaattctatctgtcacactatgagtccagctatatttttttataattttatctaattaaattaaactttttttatacatgccacactatattttttttttataattttctctaattaaattaaactatgagtacttaaaagccctgaaatctgaacccaacccaggcgcgaaatccgaggtgccccgcgaccgcgctgaccggcggcgatgccgatccggcggccggcccacgggcggatcgtggccgccgccgcccgcgttactccggcgcttggtcggcgtggctctgggtaacgatcctgtaaccctacttctcctcagagtcagatccatcccgcgcctaatcttcctgcgggtgtatgttgccatcgcgaattaccagtctatagttgctgtatgaatgtgggaggcgatcttgttgatctgtacttccatcgattgtttagtgctgggtagttggatgatcccctgcaaaatgtgcctgtttctgtacctgagctagtgcggctggaggggaattgtttggggatttctgagttgcgctgaatttggtggtgcgattgctgtttatcaccatttccacttgtgcttttgttgtggaacactttggcaattttgacaaaatcttccgaggattaccaagagtccaatgtcaattttggaggattacattgtttcgtgaaaacaacgactaatctaaatcaacaatttatttctcacagtcagttaaccatcgatattgctgcaaaaaaaaaagttgactatcgattctatggatctgttttcgacttattgttagttaacaatgccatacttttgtatagagaagtcccccctcccccggtttttaagcaactaggccatgttgtttttttgcctaagagaaactatcacatgttgaaatgtgcaatatagttgttgaacagtcatctttctttcccttggttgggccaaattgattgacagacaaaggccgctcaataaatggcacaagttattttgtgaatatgactgcaataatccctgatgcagtccatgctctgtacattcttgtaaaccagaggtttgctggatgtctgttcaaaagtttgtgtcgaagtatagttgcttttggaatgttatttttatatgacaatctggcctgtccttgctggatgtctgtttaaaactttgtctcaaagtatagtttgcttttggaatgttattttcatatgacaatcagtcttgactataaaattcgtttcttatgcaaaattgcaaacctttatcgatattctttaagcctcccaaattatccaatagttaaatatatggcacaccttagaagcttcaatagttggatatctgaatttgtctttggttgtcaatacttttgctgtcctgctgtctagaaatgtgagtcacgtctcatttaaaattcgcatcaaggttatttttaatccaaatggtaatatgttatcacaataatcgtaaattattaattatatgctgaacacacaacatcatcagcaatcttgaattattgattatatcagttcctaatgctagtgtttgtagtagatttctaaagtttctactgttttcagcattatatagcagtgccatcttttttttttcacattaatgtttcatttgctgctttttgaaggcagtgagattcaattgaacaaatacttgacaatattatggaaaaaattacatcatggaactattgcatatttttacagtttacatacatgcctcttatctgtttgataaatgccaaactgaacagatagagatgtcaattgcctacgaatgaaacaaatactgaatacattctctcctcatttacagtgctgtgtgccagtactcaacagcaaacttatccaaacttgaatcaagatgagatggtgctcttatcttctttggaaattgaagactttgatggagaaggcaaagacgaacgcgaagagagcagcaaacccaacaacggcagttgctacataacctaagtagtcatgcctaaacccaaagtatcgtctgatgtaatcttgcaccacttccccgtcctccagtgtagagtttgtgatatcaccatattgtgaggcaacaagtccgtacagtgtccatgccactgggcatgcccaggaataccacctccaccatattggtatcctctgcaaaccagccatgtatatttcagcatcaacagtatagaaaaaagacttaaaggttggtatggacaatgaatgaatatcagatacttactggtcgggggattaggaagccggcaaagatattccatatgcaatagaatgcagtagagactatggcagcaatgtcgctgtttggtgtcatggcgactgccatcatcccatagaatgtgaagtacatgaaggtgaagaacatgaagaacatgtaccagaagaatttttcaactgtccagtcaaagccaatcaggctgtagacgatcagaccatacacgacagtctggaggaagatgtgtggtatctcaataagaacctgttgaaaggataaattgttagatttttttccgtataataaaggaagcacactgcaattgttttttgtttaaatatgcagctatgaccatttacctgcgcaaatgcatatggtagagcggagtacattccagcggccttttctcggtagaacactgttcgctcaacgtctacaattggttggacagtctggccgttttgaattccaatgaaaaggactgctgcatacatggatcccaaagagttgaacagatccaatctcttgtttctgtaggcaagataagcacaggtaagtttctttctcacaacatgccaacatagatcaagttaattgggtttgttagcaaagatacttacattttcttccctaggttcaagaatatagtgccgaaaatgagggctataactgttgtgaagaagattctagttgctgtatacgacggatttctccagtatgatttgtgctgcttccacaggcaagccatgcattgtgtgaagaagggctgtgaaaattgagttgggaagtgtaggtccgttgatccaggtggaggtgtgcttaattcacttatcaatgttttattcctcctgcaatggtgcaattgaatcagtgatataacacagaaaaagcagaaaaagaacattttggggggcttttgtcatgaaacatactggtatagatcagaattcctgtatacttcagcaaagttgatgccaaggatatcttcttgggctagggtggtaacctccaacatccatgttgcaggattgtaaccatccttgattttcctcactccttgtataccctaaatttggagcagcgagcaaggttaccatgcatgtcttaagttggaaatttggtgttcacttcagtatttaagtatcgaggctcacctcaaagtaattgatgagatggcatgagttgtgtcccagggggcccacatatatttcttcacctcctcgtttcatcagaaacagctgcagaagttcaagaatagcctgttagtgttcgtatgagaagggcatccaagaattgtgcaattttggcccttgcttcaacttacctcatcaaaagcttcaaatatgtcaatgctgggctggtgaattgtgcagacaacagttcttcctgtgtctactgtgtttctaactgttctcatcacaattgcagctgcccttgcatctagtcctgaagttggttcatccatgaatatgatggatgggttggcaacaagctcaacggcaatagtgagcctcttcctctgttcggtggataaaccattcactcctggcagtcccaccagtgctcccctcagtgatgtcagctcaacaagttccatgacttcttccacaaacatctgcatccgtgaagtgagtcagcatcacaatgcaaaatgtgtaatgagctagcagagtaaaggctgtttgactaacctttcttgcttctgagtctacttcagagggtaaccggagccatgctgagtacagaagggactcgtaaacagtgacatgtggagagtggatatcattttgctcacagtaaccagcaatccgagcaaaggtctcttgcttctttgggtatccagagatggagatgtctccttcaatgtaaccgcctgttttccttcccgccagcacatccattagagttgttttaccagctccgctaacacccatcagtgctgtaaggactcctggcctgaaagctccgcttacacctttcagcagcagtagccgatcttcagtaacacctttatctttcatttcctgtcaaaaattgtgcatcgggattagcataatagcatttggtggtatatttgttacacacagggaggcttccaatgcttgcttacctgaggcatatccacagagtatctgatattgtcgaaggtgatcgacagaggagtaaatggaagtaccattcctctcttcctggtgtcagctcctgtaatctctcctcttcctgcatttgctatacttgttaaaaggacacaacaaaatggcatatcttgttcaatgccataatacagaggaatgtactaaaaagactgaccatcagaaggtgaattctgggaatctgttccaagagtcagcagctcaacattttctccggtacggtttacatgtttttccctcaattcctcttcagaaacaacagcctgaccttttccaagtgctgcagtcataatatggtgtcaatgccaaataaatgatgtttgaatatgctaatctatgtgtttcagagctgagatgatactcacggtcaagccattcaaggaacagaatgaagaggatgttgaagagcatgatgtatccaagtaatgcgccaacgccaatccagtaccagtttgcatcgacaaatatgccacgtaccttaaggacttggacaccaagcgtgtcgttgctttgtgtcggatcaacaacctgcgcaaagattaggttgcttctgagttatctaaatccaaacttagattgtcaggtttgagttggtgcaggagacactgcattaccttgttccagctgtggccaaggaactcattaactgctatggcattctgtgcatacatcagaggagaggaccagtagccccaaatccaccatttcttgatgttttctgcaaaaggagaactcagtacaatgctcttgttactactggaacaatatatgagttacttggcatacctctagatatcaagaaaccaccgagaaccagaagaataagctgagcaaatgacccaaacgtgtctgcaacaaccatctctcttcctagtgcagcgagaagccggaagagaccggacgccatctggctgatcagtaccagcagcacataatggcggaagaatctctctatgtttggatcgaagcccatgacatagtatgtcatgcaaatccacacagcacattctaagaatgatattgggattttgagcacccatgtaggtaatgcatacgcccatgatggatagaaaagcaggtccctctgcttatagaatatcggcagctttgcaatgctcatggcgagctccgcaaatccattgaacaaatgtgtgactaatccaaggaacatagcacccaggaagatcgcaccatcttctacactgcgtcgatgcatctttgtacgcaggaagaccgtcattccgatgcttccaaggattatgagctggtacagatgtacctttcgtcagattttatttatggtcccgaagtagagagaaaaaattcaagatgcgagatacatacctggagaattttgaagatgtaaacaaatgaattcctcttcatcagcagccactccctcgagaagcatgccttggtaagctccatcttgctgatgccatacctggaagttgtgagagcagcaggatggttcctggttcggtcaaagggcaccctgagctctgagcccagattacgcccaacatggaattccttgaaggcctccgaaaagtcgttcaccgagatgtaccggtatggttcatctctgcggcaccagtactgatgctgatccttcctcgatgtaacctgtgcattcagaatgaacactgtcaaatttgagttcctagtccaacatgcagggaagattactctgctggatcactcacttcttgcaagaagtctgcaacacctttcctctccggacatttgaagcccattgcctcaaagaactcgaggatgttttctcgaggtccctggtatacgatttggccctcggagaggagaacaatgtcatcaaagaggtcatacgtctcaggtgcaggctgaagcaacgcgatgagcgcggttcctcctaagatgtggacagattgcctgagggagttgacgatctggtatgttgtggagctgtccaaaccggtggagatctcatccatgaacagagcctttgctggaccgacaagcatctcacctacgtaaattcagtggattgagaggtcagatttttttcactatgatcgaagaacactgtcatgcctagttctttgttgactgcagattgcacataccagttgtgacacgtttcttttgtcctcctgagatacctctgatcatagcgtctccaaccattgtatcagcgcagatttccagacccagaatctgcaatagcaacttaattagttctagtcatgtatatttcttctttttttctctattttcctgtagtgtgttgtactcactttgagaatgtaatctgtgaccacgctttcctgaccttccacggagatggcctgtttgcacaagggaacaacaatttgagcacttcttgtatacttttccaaaaaaaaaaagaaaaaaaaggaaggcttgtgctttgaataaactagcattttaccttcatgtaaacatcaatatcaggatctggtttaatgctggcttctttctcccttcttgacagttcagtaagcatgtctgcgtgataacaaaaccaccataagaataacttcaccaaaagcgaaacaaattgctctgcactttcagtgcagcatgctgcgtaccgtaacgagttccaactccttgacatcttgcagagaaggccagtgtctccctcacagtcatctcgccgatgtgaagatcatgctgcccgatgtaagccgatgtcctctgagggacaaattcgtccatgtcatgcccattgtaagtcactcttcctgatacctgagcatttcaaaattcaaattcagccatgttacaacttttgcgactaatctttcccatgtgataatttttgtccgaaaacacgggaatactcggaaattaacaagaaacatgtgaagatgtggttaccttcagtgttgagtccagtttccctgccagagctaggagcaggctggttttcccagaaccaggagggccaagcaacagagacatcctgaacaaatttcacattattaagctccaacctttcatcaaaatatgataatccgacacatgaacagttcttgattttcctcacctgccgggtctgatgattccactgatgtcatgaaggatggagataggcctcttcccgctcgaaacgatccgcatcgcgctcagcacatcctgatgatccaaacagttcaacaagaatcagaagctgcaggacgagcttaacaacatctgaacttggaaactctttcagctcctccatgatgatcatggatgatccaaatgcgtaccatgattttgttggagaagaagttggtgaacgttgggattccccggttgccgacgtatgcctccgcgtcgatgctaaggttctcaaacctcacttcaatcgtcgggttgtcaatcccaactctgcaaatcaaatcatcacaagttcaaatttcaaaaccacccagaattaactctcaaaaacaaagacaaacaaagaaggaaaagaagccatgactgatcacttttcccccactatctttcagttgctactgatgatgaacaccttttgtgtctgaaatttgaatttgatcgagaagaagaggaagtgaatggaattgagcctcaccgctccatccggtcgcggagcttgaggaggaagcgctcgttgtcctcctcggcggtgcggacgaggcgctcgatgaggttcctcctctcctgcagcccgagccccccgatgtccacctcctccacgccgccggcggtgaggatgcccttccgcatccggtcgtacgtcgggagcttctcgatcgccgcccacttgagcgcctcctcgtcgtcctcctccctcaccgacctcccgaacgcgtcgctcctccccgacgtccccctccacgacgacgccgtccgccgcacgctcccgccgccgctcgccacgctccccatcctcactatatccatcttctccgatcacctcctctcaactccgatcacctcctctcaactccgatctctccttcgatcgatccgcccttgcttgcagctgcagctttttgctgctgctcgagtggagaagatgacgagaaagaagcgagggtttgtgttggttggaggagacggtgatgggggtggtatatatacctcgccacccacgcgcgcctcttaattacatattaatcggagattagcgaggtgattgatgattagtatagctaattactagatttagtcgaaatggcgggctcgctggtcatgacgcagccgcttgtttcgaattttttttaatttttttaatgcggtctcgagcgtggatagtttgaccggccggtcggttcgcgccgaaacgtcttgaccggttcggggtcaggtccgcctcgtctgacccgggcactagggggcatcggggtcatcgtggccgttggtgggaggatctgcgggtgggattgttccacgtgtcgccgggattcgcggtgttggggtacctcccgcgtacggcaagggggtgcgtttagtattagtggtgcgagtgaagtcagctatgcaggtaaacgtcaattagtggctgcatgctgtagtgtttattactactagcttggtatgtagattatcacgtccatgaacagcgacaatgttgccagatatcgtgatgatcaaaacaaaaggaaaaagtgtgggcctgagaactacagcatgcaatttggatgtgttggaattaatactcttatgtgccgaatggttgaatggatgaatagttgaataatttttagcaattattcgagagtacaaataaatgaaataaattaacaatggatttaatatgtttcttggaaatttatatataggaaaattcatgcatgtttcttgcgaagcgtgcacatctctcctatcatttcattaagtacaaaagaatacgcaggttacaaatctcagcatctatatttggagggggttcattgatttttattaaatagaaaaaagagaactgtacatggcgaaaagaaagagaaaaggtacaggctaaggacccttggtccaagctaactaagggtgtgtttagttccacgccaaaattgaaagtttgattaaaattgaaaattcgaagaaaaaagttgaatgtttatatgtgtagaaaagttttaatgtgatgaaaaagttgaaagtttgaaggaaaagttggaaactaaacaagggctaatgtgtaagccggcgaactgatttttcactctcttgtactctcccctagctgctgttcctgctagcgaacacctgtgatcaaaaggcaaactgaacaccaaaataactgatcggcgatcggtttgtacggcaaaaacaaaaggagaaacagggtagaccatctacgaagggggagtagacagtagactacttcatctgcaggcaacaagaaatcaacggcggcgtgcgcgaggtctggtcagtcgccaccccagatcggacggccacggttcgtcttctagacgaccagctgtatgacatagccgatcttcaagccttcgttgaaaaggataacgtttcttatatttaatttcttaacgattccgttaataatactatatcgcttgccaaagttaacaaagtcagaatccagtggcaatcgagagcatcacgaactctggactctgaagtctgaaccagtcagcagtggcttgcggccagttaataataacaacacttttcctcgcaaacaaaatataatgataataatgctaatcctttctgtctggtcaggtcaggtcaaagatggccagctcttgcgttgtactcgaccattgttttttcaaggatttgtgggagaatttctctggagaaaacaatgtgatagtagtagctttagatgagatttaactgttttggtcgtggaagtcgtgcttcgacggggacggtgacggacggccacgggattcacgggcggccggcgagccgccgccgttcgttcgttcgcactgccggcctcttaattcgcttccattagtttctggtcgccgaaccggtgtcgtgcacgttgcaccaacattgcgaagtctgcttccagctgcattggagattcggagtcgtcttccaaaatagttttcatcacgataggagcatacggttttagcttttgctgatgtagttttgcttggagaaaacatagtacaagaactgtgctgctcctagaaacgtgaaaagggaatagcactacggcacacattcgtggacgtgcaatagttgaaaaatatgtgttggtgtactagcccagttgaactatgcagggagctagtggcacacagactgttcaagtggttcacaacattattcttaagaaaaaaaagagagctttagaccgcacgtgatgatacgaaacccattccaaaaccagtggcctatgcagagacacctctagaaaacaaagaggttctggacaaatttcaaagtcagataactgctcgagttggcatggtacggacagcatacacattatcacttgtcaaagtcaggcaagaattcctcgggctaataatctacaccgacaaaagttcacactaaacaatctgcagactaatacatggtttcctagccttcacttacatgaatcacttgttacagttcttcatggtatattgtacttctaggaaagttagcaccatgataaactaataataccggttttgtgatgtgcagattttcatgctacgccattctcatacattgaaccatctttggttgtggcttcttcaccaatgtcaacctcacccattgcatcgtcaataagagactgtaatacagaaagagacagcagttcaattatatagcaggtcaaacaactcccaagaaatacaaactaagctaacgcattacttcatgaaatcatgagtatctccacagactctgggcacgactacaagagcatgcaggtactgcacccaggattactgaaattcaataaagggtactctagggaatcaaaagaaatcatatgttgagcaaataacctggagctccttttcagacatcttcaccctgtcattgtagtcttgaagttgcagaaaacatttgtacagctgcatttaatattttcaaagtacagaatgtgatttgtcttggttatccgttgcttattttcataaagcagcagctagcatgtgagcaaaataccacatgtacctttgtaacaaccaattgtcgttctgaagaaactttccgtgcagcagacaattcatcctctaacttctgtatttttgtatttaaaaatagtttgtcagaaaaaaataaacccgagtattggacaaggataagcacttgcaaatttaaaaaataacagtgcgaaagatgctaaaaaggattccagtatcaggatacacagatcacctgggatctcttttgcaaatctgcaatgtgttgttcctttgctgcaactttatctttgatctgactaacctgtaataggacagcgttcaaactattttttcataatatgagaagcaaacagaacaaagaacactatataacaattgtaaatgctaaagttagtagccagataaatatgtggtctaatgcactagcaccatgagtagtgacaaaatcctagcatgctcctagttgactatctgttggtgttcaagcaatttaggcatgttgcatcaaatgtatcttatgagacaatgttagctttgctgactcagattttatgaactagctttgattatccaaataatgactaataaaatagagcatagctgaaaaagaaaaagagtacctcattttcaaggtcctcgcgcatttgaattgctttgttcaactgtcgttttgcctgataaatgcatgaaaagaaagaaaggagaaatgagaaacccaacaaaaattagaagcaatagaataaatggttagaaaagctcatagacaaatttccatttgaagtaacagaacaaagagagatgtatttacatcactgtgaagatcatcactggaaactgatagatccctgctatcatgatcttttggacggctgtacagaagaagtcaggaaagtaaagagatgactcaatcctaacttctctactacttggtagcaagcaaaaatattaatcatatacaaattttgtttcaaagcagacacagcagaaggtaatagactgtagacattacatgaagactcgaaactcaccagtgctctttgtaaattttgcaccagccaacataagtacataacagatgtcataccagtaaatgagatttggctggcaaatttcaagtatgacatacgaaagtacactctattttattgcgcagataacagaaagacaaccctggatccaggctcgctatttatggtttcatatctcagttcagatccagcagaacacttgtttaaagtgctaatcacggcgacaaggcacatacgataatttcagttttaaatcctcagcatactcaatatgtgaaacccattcagttggtatgtgtgctgttagtcttgatcactgtggggtaaacttaattgcaatgtgccaatgtctatccccatcaccccctaggagatagcaaaggtgtcaacccaatttaatctacaatcagccacttgcagttgaaatcaagactgacagatgacatatgcaggtaaaagcaacttacaagactcaatatatctgcaagtcactactcactacaaaggtgcattcagcatttcagctgcacaaattctaacaaatttggacaagactgaccatcaactttaaattcagggagtagtcaattagtaaattaacaattgcaaatttacattattgataaaaatgaatatacagtataaattattgggtaagttggcaaaataataataataataagaagaagaagaatagaacaattggttttcgtggttgaaactttactaaggacaccaggatcctatccagatttatcaaaaaatatgccacatcaatagtcctaaaaactaaataacaccactaaagaaattacaaccttctgacacaattacatgcatcaaccagaaatatattttttgtggaaattcaactcagatgccttgcaacttcaattaagcttcatgccttcatcacaatacaaatatcttccctagaatatatatatacatgatctatttccacccaagtgcatgattagcaatattaacagagctaaaatacaatgagaagataatacctgaacctttttcttgatcgctgctccttttctttctctctttcactatcatagtctttagagttttctttttctctgtcattatccgaatcaacattatgcatttctgctgcacggtcgtagtctctacgcctttcatccccatgatcttgatccatgggatagtcaatttcttgatcaaagcctctaggttcgtaaaatctgtctctatcacggtcacgagatctatcactatccctgtcatggtagggatctctgtcacggtcatagctcctttctctatcccttctgtcccaataagcatcccttgcgcttccaggttctcgccgaaaaccttcacgcccgaattctcgggcacctctagtacgcacttcattcactctaacaacacgtctatttattctctgttgcaaacaaaaatgtaattaatacaagagataataaaaggtgttaagttccagataggagcataccttgccgtccatgcctgagatagcatgctgtgcagcatcagcatgagtgaaagtaacaaaaccgtaacacttgcctctgactctctgatcatttatcacctgcaaaggtcagaaagagattcctctgtactctcacataatttgaatcttatctgacaggtaactactttaagagggaaaaaatagtgcattgactgcttcaaagcaaaaatccttttctgttattgtatcggcaaactcgggaactaaaactttaaacccatctttggcattgcagtaatgccatgcctcctccacttgaaccagaaacaatataaccacatctatcacttgcattattgaacctctcattctactaggtattaaatcaagtaccaataacacaaaaaaaggaacgcatccaaactaatatccaaagggaaccctgaatccttctagtgtaaatttaccctaaaaactaatttgaaatatgagctacttgcctccctattcatcttagcagcaaaataagtgactgtgtgactgaaccaagtagcatgtcactacatattcaccttcatttcccccctcccgctttagataatacaactatctccccaccaaatcccgagccctcactccagagtcccaattacccagccactccatgtctcgcattaggacgtagatccaaataaaaaccctaaaacaaacaacgcccttgttgaacccagctatctcgaccaccaaaacgagtctcgcgacatctcgcgtgcttttacatcacagcgggcagcagcaaaacaaaccctagaaaaaaaaataaacaagccgattgacctcggagctcggaccaaacaaccgtcaacagctaaaactcctcaacgccgcaaacccctgcgacgggagagcgggacgggatagcggtggggggcgcgcggcgtgggaagtagggaagggaaccttgacggagacgatggtgccgaatcggccgaaggcgtcgcggagcatgtcctcgttggcctcgtacggcaggccgccgacgtagaccgaggtctcctcgttcaccgccgccgacatctcgccgccggcgacgacgacgacgacgacgcgggctagggttttgggtttacctccgctccctcccctctctctctttctctctctcgcggagacgaggagtcgacgagcgagcggaatgggtggggaggctgtcggatctgacgccgcgcgtggtgatggtggtggtgggctggcggcatccacaatccagatccgtgtgtcccctcgtgaccaatccccgtcgtccccgttccgatcgtgggttttttctacgtgggccggatcaaagatcaggcccatctcgtttggaaggatcgcggctttcaatacaggttggagtaggtctattttccatacttcaactattgccccttagttgaatcacattactctaccacaaaaccgggtacatcacatactacaactaccaaaactgaatccctcagcggtttggccgatggttttctcctacatgatgccaaataattaataaaaaacttaatgagacccacatgtcaatcagataaaagttagtaaacgcatagtgggcccacatgtaagtattctctccctttacccctccatcttcatctctcatattttccacgccggtgccaagagtgacgacgtccttgatctcgaccccagaaccagcgcgggtcgccgtcgatgagtcccgccgagctggcatgcctatccaccatcatccccgatgagcccctctgagacagcacaccatcccctttcctgaattgttgtctccttaagctgcgcaacacttagtggcaccttggctaccagggttcgcagcaatggaggtgaaggcagagctcattggaaggaggcaccaacaaaccttggtggcgagaatagaagcttggaaaggccacgtcagcggcactccagcttcatctatgtgcttagtgacgaggggtggccgcagatgcccaaacctagcccaagctcctctacttcgttggccacgcccaaacttccacgtctctctatcgctatccgacgtcctcttcctaagatgctcaatgcggccgatggcccgtgcttcctctgcctcttcctcgacttttgcactccgccaccagcccaccgaccgccgctaacatgcactgcctgccatgtcattgggcgcctcgtgcgtccttgctctcgtgaagagataaggggtgagaagaagtgatgagagatagagagaatgacacgtgggtcttaatgggtctttttttacattttttcaagagcgatttacttgtgggcccttttttttattttgggttgactgtgatgctatttaaacgccgtatagacgtcacgccagataaagaccagtttaacatgccatgtaatcgccacatcatccaaaaccaccttgcaaaccaccaaagtagttaatttacaccggttttaaatagttgaggtagactttatacccggttgtgtggttgagggatgccatttgaaggagaacgatagtccaaggagactttattccatactagcttgactcatgtgcgggccatctaaattgggctcgagaacgggatcgcagctttcgtgcgggcccatattagttggactggaatggaacttcggctcacgtttggcccatgctgtttgggccagaacgggatcggatctgacgtgaggccgtaacggaactgtcgctaacgaatgtacgggcccaaatgagaggcatatcatgcggttgtgggacgacggcggccgacggcaggggagcgagcgccggcgacggcgtcgaccgagaggtggaaccgccggtgaccattggactgcgctgacctcaccggctccggcagttcttcgctggctggcagcccgagtcttctgaagttctgataccaacactttgtcttgtagtaaacatcagcatagatgtcacaactctagtatagctaaatttaaaggttgcaaggccggaaaaaaaacatggatagctactattgtaaagattcaaaaacttctccaacgtttacttccagatcagacaacgtcctagtctggaaaatccgacgaaaagttttggtcctttcctgaaggttgcaggttgcagcacgaaataaacatttgcaaattgcaagcatcggccactagtagatgcaaaatgagttgaggaaccggaatttccacaaaattgtaattaccaaaaaggcagtttcatatctatgggatggaacaacagacagctacagatattctcaagcaaagaactaaagacaattctcaaggtgaagtcaaaatatacatgctacaacaacacaaaaaaaatggcctgcttatttttcttaccactctgctgctttcctcagcaacaacccagggcaggccaaactaagcagcttttgattccacggaagacttatactaactaaatttgcaaggcaaagaacttattgagattgttgaccagacttctccgaggtcgtactctcaggttcctgagacactttgatggccgaaccattcgcagagttctcactggctagagtttcttggagagaaccatttcctgacccaacaacttgagcagttgtttcgaccgtctttgctttcagcattttctccttctcaagctcttgctttgccagtggggagaactgtgagtcaagggaccttacagcacccaaccaggcaagaacaattaccaatagaattcctcccaggtagggtgtagaatttgcgagagatccaaatgataagatcatgaactgctggatcaaggcgcctccagacttccccaatgggttgcagaccacatcaattgctgccttacctttgacctgaaatcatgaatagaaggcacacatgagaagaaaatttcagaaccgcgtgaaaattttgaatcttatatcagccttaaaatttgacaggccatacgttcttaatggtgagataatgtgtgaataatattggactgcaactatagtggatttgtacatcacaaatgttacggttagcacttagaaaaaaaaagcacaataaatttgatagacaaatgcattccagtcacaatcaacaaattaatcagattattgtagaactagcaattttgatatgtatgcattctactatcagcctatcaggtgtcagggactatcctcatagtaacccaacccatcttgtaatagcaagtgcatcaaccatctggtgaggtactatcaaacatgcctagcacagttttctgaattccaacagaactagtgggtagcagggtttatctgtttaatactaccatatgttttctgacattagagcaactggcctgattaattatatcaagataggaattttggagactaaccttcatgtcctcgtccaaaggaatgtatgccatttccttacaagggtcaaacaaactgtacttcgcactcttactgaaaatgttctgcattgccccaacatagaccgcagcaagcaaaggtgtcattccaagtgtggccataagaggagtcaatggctcaccgaataaaatcagtgagaagaatccaactccagtgagaagcaacactgcaggggtgattgtagctgcgactccccacccaaacttcctaagaattactctccctaacaacatcattgtaaatgtggctatgccagtagcagtcgagaaatcccccatgaatgaagaatattcattagggcttgggtactgcaacagaaaatagagttaataaccactcatattatcaccaaacaattgcacatctggcaatgtggatgaacttacttgtgccttcagttttgacttccatgtcacctccacaaggttaatgcttataccataagcaacgaccagggtggcaagatccctcacataccgagatgacacaagcaccttcaaactctctcccatactcagctttggcttatcctgcagggtcatgtttgaagcaccataaatgaaagctcaataaacagaagttgcaaaccatagaacccataagaaaaccgaccttcttcttccgctcgacgactggcgcagctgatttatcaattacaaacttgtttactccccagtagatgccggcaatcacaaggcccagcaaaaccactatgctcatcatgcccctcaatgaaatcgcccatccgtccacccctggacccaaattctgcctcatgtttgagaagtatttcactgtgcgacccgagaagatgagtgccacattggccccaagcccgaacagtgggtaaaactctttggcctcttcaaccgtagtaatctgcaatcgttaaatgcactgagaatttgtgtacgtagccaattgttttgaagtgagaatctacacaaatttaaacatgacccgttcagctattcacaaatgtttagaacaacaatgtcctacaaccaactgacaattttgtaatttcgtagaccaacatcactgtcagttattgccgatatttcaggagaatagtttgcaaacttcaattgctgctactaaatccgagaggaaagatttgattgtacctgattggcgaatccccagaagagcacggagatgacgacgctgccccagagctcggccatgacatagaagaggcagaagctccagacgcggaggatggcgacggggcccaggaagctgggccccagcgcggcgaggaggcggtcggcgagcgcggtggggtggatggcgtcgcgcatggggtagagcaggtagccgaaggcgccgaagaaggcgatgaaggggaagatgacggtgtagaagagggcctccttggagagcacgtcggcgagcttggtgtagagcagcatgaacccgatggccatggggaggttgacccacgtcttgaggaacgggatgatctccgcgctgctgcccttggcggtgacgacgagcacgtccttggtgtcccgcaggatggtgtagttgaagaggatgcagaagaacatgagccccagcggcacgatcttcttcagcgtcttcgtctccacgcccaggaacttgggcgaggccgaccccaccggctccggtgccgccgccgacgcggcggcggcgcggagaggcgggagggaagggcggagcgggagcgcggcggggaggcggagcggggtcggcgtggggaggtggagcccgagccggagtggggtggcggcgacgctgccccgccgctggcggaggaggtgcggcggcgcggccgggtggtggcggtggtgggcgacggcgaaggggacgcggaggcggtggcttgcgacgaggccggactccatggcggcggcggcggcggaggtggggaaatatcttggaggtggtggggggaaaggagataaggtcggggcgctcggcaaagcgggggtttggggaaggggaggggtgtgtcttatactactactccggtgagattaggaggtggggaggaagacgacagcagtggggagagtgggaggggccgtgtggctggcttagtgctgagattagcctaacgaaccttcttcgctaatctgaggaggggagacgcggacttgggagtgtatattcagtgtactgaattttttttcctctagaaaagttatactaccaggctgtagtaaaaagacaaccaatttattttagaaaaaaacgaaactgatttgaattctagtagaatttaattttagttgtttatttaaggcccagtattgggtgcttaagattctaaaaatctgctggtcggtatccagcttatgagaatatggaaaagctgggttttcttgcttctgggttgtagtttattttttggattttataactacagattctcagaatctgggtgataatctggactgtttgagagaactggagattctggtaaaatctgcaacaactagaaaatcccctcaaacaggcgcttagccgtttctgtttaagctctcttctcatcatggttaagaaaacaaataaaataattttttttgtaaaactacagatagtttagtaaaattattatgagactatagatagatttattaatttatagtatcacaaaactaaatgaacaaatttattagaaagctataaatttaagcaattgtatatagaaactatatattcagtgtcatttttttcctcgcaacacggagcatcgattttctcggagaattacacattttaaaattttactatgttaataggtatagggatagcacatctaaaatttattgttttatgaagataatactaaatgtatgctttcgagtaacaatagttttatgttaccatggtttaaatatgttgttttatgataattttgttaaagtatatgtagtttttgaaaattattttaaaacatatgtttaaattatccctaaaaatatatgagggtttgtactatgtatttcacaaaatattcttaaaaaccaaaatttttaaattcaagtcaaaatgatgctgatcaatatcttaaagcaaagcgtaataaacgcaacacacaatatacaggtatcacataatttactgggtgtggttgttgaatcacgcttggccttattgtaagtagaatgatgcatagaaacaacagttgacacgacaatgatctccagtaaactccacgttgattatgaacaacacttgaaaaacaaataaaataacggtttcgtatgatcgggatattaatttgagttacattcggactaaagagagattcagccatataaaaagataaatataattcctcatttggattaccataataaatataatggatgcactcaatatgattagggatgttgagggtagatggtttttctataataaaaaaaagatgaatctagagaaattggatgtattagttaattgtatacatgcatgtctttttattatgaaaaaaaagatggttacatcctatattttgaagtaaagaaagtaatagattgttatattttaggacaaaataagtatttttttaaaaagaaaagggcgaataaaaaatatcagtaaagtaaaatggcctcctgaggtagatactacaagtcttgacaagaggttaattggtactactactacttgctacagtaggggccagtagcagtggatcattttgcatgatttgctacagcctacaggatgagtagcagtagtagtagtacgttccatgccaaaccgatcgatccgtgcgtgcctacaccccagaagggtctgaggagagtgagaggacgggaaacgcatgggaatgggatgcgcccgccccgcccccggtccctggtcgcaggcgatcaacgttccatcctcacgtcgcgacgagcgagcagcacactgtacacacactgatactgatacaaaacgctccgatgctcgcacctgcaggatcgaaaagtttgttgggcgccaccaccgctgtcgcgtgaccctccctccgctccgattgacggccaggaaatgcccggcgcgacgcgatgccccctttgctctcgtctcgtccgccaccgcgacgtcgtcgtgtccgtccttcccacgtgactccgcccccgcccggtggcccctcgcctcctcacggccgtccattcgctcgcagcgccctcgtgctagctgccggggggccttggacaaatactgggacggagtacgggaaaacgcactgattctgccgtcgaatcgcgtgcgtatctgcatctgcatatatcgggccgctctttctgggactgggtgattaatctcgtgtcgtgtcagcttaactagtggcctggtctagtgcatgggatgatgataattccgaggtacgccctgtttagttctaatttttttttcaaactttcaacttttcattacatcaaacctttcatatacatataacttttttaccacatcatatcaatttcaatcaaacttttaaattttagtgtgaactaaacataaacatagtcgtagatggcgtgtggggtggggtttattagtgataaaaaccccttttggctttacgcgcgtgagtgccacgggactctcgggctcggctcgtgtaagctgtacgtagcgtgcaaaatatctctctccctctctcgatcgatcgcctcgtgtcattttcagtttgctccctttttccggcgacgcacgcacacgctcctcatttcgtacggggaaagctcgtggcttatagctattttgcatgcactggccggttgctggcacagtggcgctccacacgtatccgaagttctaaaccaactagaaaggtagcccgcgcacatgcgtgggcaccttctcgtataatatgagtaaaattttattatgaatatttatatgtaggtggctttttattaaaatatcttgtattatattctaaactaaaattaaatttattttgtgtgctttgaaaagctttttatatttttataattatccttgcaacatataaattctaaaataaaattacttgaaatcatgtggttttgaattgatgagaaactattgtgtcgaaacaatggaggtggttcctatgataaaatttagggtattttaactcgccaaaaggatagtttacaacctcaaaacaaattcaataatatcatttttttgtttgattgtattttaaaattatatatatatatatatatatatatatatatatattcattctaaccgtccttgtaaaatgtttcaatttttctatcaagtattggttttaaatccagcaacatttgttcaattttcaatttatttcatgcctatttttattttttttcttttggatagtttcattctatgaatcatccttgaaatgatttgatctttgcaatttgggacgaaaatataagaacacataacctagtatggggtaaaggtatacgttctaaattttctctcctgaaatatcaaagtaatggtcataatgtatttagtgaatcatcactaaagtgtattgtcttataaaaaaaggaactgacttgatttattgctaaagccactgcaaggttgttccatagttaaaatccttagatacaacctacatgcttatcgatatgatgttcaaccaaccacacctttattttcaccctattgtctatattgctagatgaatacctgctatgattagtgacttcgtagatcatatgtgtaattcgaacgctatgatcatctttcttaaaaatatttatctatgtactaaaaactttattttgaaagtaccaaggtcaatttgtataggcatgtcaagagaaattaattaagttggcagaaagtctttagatgcctaacatgatataagtaataaatggaggtccatttgtaattttttcccatatagataattttaattttaattatcaaggagataaaaaatagagagaagaatggcgcacgctgtacatgggcaggaagggagggaggtttgggatgtttttctaaatgattaatctaacagactaaaataatgtgtcagatgtttatgtcgaaaccgatggtcggatgttttgttttcttgtcagaattttattaggattttctttgatttaagagaataacataatatcttaagagcatttataagatgtgtaatcgactttttaacaccgtatgccgcaaaggagggagggaagaaggtttagggtgttctttttttttaaaaaaaaatagatctaatgacctaatataatgtgtcaattaatccattgaaaaaatgtgtccatcgatttatgtcatatctaatggttggggttttttttcccaaaatttctaagatttttctctaatttaagaatgccatatagcagcttagaggcattaataatatatttaatggattttaacaccgcacggggatggggagggaggcaggaagagaggtttgggttttttcttattaaaaacctaacaaatcgatagccaaatgttttgttgtttttttaatattttctagtattttatttaatttaatagcaccacgtggcattttagaggcatttgtaggatatttagagtcacagagcgagagctgctagacctaataggtggaggtctctttgtgatttttttaatgtaaaaataattttgattataatttcttatgaacatagctcgttggtaagtacgtgacgggaggttcggaatgcgtgctttttttttaaaaaaaaatctaaccttctaagataaaaataatagatcaccgatttaaataaaaatcgatggttggattagagtgccacttggcgacctaggagcgttcgtaaggtaccacttggcgaattaaaagtatttttaagatatttaatgaaattttattatataattgtctttttttttgaaatttaagattttattttatttaagtatgtgatatagtagcttagaggtgtttataaaatgtttaatggattttaacactgcacaggggtggggagggagggacagaggtttgggatttttttattaaaaaatctaacaacttaaatccatcaatttaagtagaaatcgatggtccgtcgctttgtattttttaagattttttaatactttctctaatttaatagtaccacgtagcgatttagaaatagggagagctgctagtcctattagttggtctatttatgtttttttacctgtaaaagtatttttgtttttattttctcattaagtagaaaataacacatgaatgaaaatatggaaagacaacagggaagtacgtacagtacatacgcacgtacgttcggcattacgtacgttggttccgtatatgatgttccggatgttcttttttctttataaaatagatctaactaaatccaaccattcaaaataatgggtccaccaacataagtaaaaatagatggtcagatttttcttatttattatggtgccacttggcgatttgagagtgtttatagggtgccacttggcggtttgagagtgtttataggaaaatataaatattggcaccatccggcctaactgcctaacgacctaggagcgtttaatggacttttagtatataatagatagatagataaatattggcaccatccggcctaactgcctaaacaagtgcgaacttgtctaactgtcatgaccacgggctttaatacttcgtttgggg

SEQ ID NO: 6127 - DNA, 883 bp, Oryza sativa
cggaaagcataggaggatagaactccataactcgataggtacttttgtactcagattatgtcgcaagcaatcaagataaatattataaaaaatatgatataacatctgtagcccccgactcactactcaatggaagaccaattggtgtagtgaggcagaggaaaaggaaaaatatcatataaagaataaaataaatgatgacttagctttgtaatattccccttggtgatggcagaagtggccaatgtgggaacaaagtcgtccatcaataacaatgaagacaccagtcggcggcgacgaaggcggtcgacggtgaaagcgaagatgcccactaatggaggcataataggtcagccgtgtaagcggaaacaccagtcgacggcaacgaaggtgagccaacggtgaggatgtagacattcaacaacggcggcataataggccagccgtgtaggcggaggcaccactcggcggcgacggaggcaggccggcggtgaagtcgtagacgcccaacagcggcggcataataggccagccgtgtaggcggaggcaccactcggcggcgacggaggcaggccggcggtgaagtcgtagacgcccaacagcggcggcataataggccagccgtgtaggcgaaggcaccactcggcggcgacggaggcaggccggcggtgaagtcgttgacgcccaacagcggcggcataataggccagccgtgtaggcagaggtaccactcggcggcgacggaggcaggccggcggtgaagtcgtagacgcccaacagtggcggcataataggccagccgtgcaggcggaagcaccactcggcggcgacggaggcaggccggcggtgaagtcgtagacgcccaacagcggcgggtaccgag

SEQ ID NO: 6128 - DNA, 704 bp, Oryza sativa
ccggcccggcgcgcgcgcgcgcgcgtgccaatccgacccccacctcaactggtcaacagggagcctccaataattccctatttatgttgagatattcctcgcttaaatcctgaggtggtattattatccttaacacttattatgggcctttgagatttaataggataagttgggcctaacccaattattctaacaatccccaccaaatttcaaggctcataagaaatgttctcaatgttgtgcctgtttgatataccagggttttggtggagactgttaagttgaacttccacctaggaaatgagctacatcagaccacaactgaacaatggactatgccttgaattgtcagttttgtgttatcaggtttcactcagaaccttgactggtactgggctgccgttcgcatcccctctgtttggagcatataagtcaaactccaggcctttcataaatatctagagattgtccaaacctcatagactgtgactagcagtcgaactcatataggtgtgttccttctaagatgttctgcaggtcaacatctctgcttggaaaagccactcggatcacattaaggcatgagccatcctaccatgcaggaaagaagagaagcacattatgaaaatgagcccttttcaagggtctcttctctcagtcacacaatagtttgtttcgctatccaaattcacgggatctccgat

SEQ ID NO: 6129 - DNA, 5836 bp, Oryza sativa
ggggaagtgaataacatgcatgtctcgctcatctgctgtgcctggctctatgtgttgattaagtagggtgatttgtacttttgtagtatctggagttgacaatgtgcttgttggtataatacccgggtgtggttgaatatctcctttgagctgtgatgaagctgtgcagtttggaatcatagcataagtgaataatgttgagacaccagtgtatactttgcccggatttgttcagtaatctccgtgaccgtagcccactgttacttttgttgcagccatttttcagattaggagcagtggggacatgcttccatgttggtgtttcttggttgcagcgaaatgtggttttgtatgtagttgtttctgagccagaagtagtatggccccctgtttctcctgaaaacattttacatgtgaagaaaagccaatgttgtgcatgcttagatctcttatacttagtcttacttgttctctttgcatggcaacaatatgctccatgcctctagacattggccttccctaatgtctttacttcagttccataaaagaatgtcttaagttatctataacttctatgcttttctctggccagttagtacatgcatatgttctgaccattctggtcatgtagcacaccactttatatgctttccttctacaaattgcctgtaggggttaagaacaagatagattcatttacgaaaatattttgcggcctactatttttttttgcccaaggacaaacaaactggtgtttttttatcttctggaccttgatagatgaattgtgtcttgtgaagtaaatgatcactttgcaacttaatgaatggggaagaattgtggcaatgcctgattgataatagatacttagcagaacacattgttgccgtttttttaatggagttatcagttttggaggttaagtaagaatggtgacaatgtcttatagttacttaatagatacttaccagaaaaccttgaagccgtttatttacggagttatggaggttgattcaaacttctttttaattactgtaagttgtgagttcctaagagcacaagattttgggaggacttgtggctgggcccagaaactttacaatttgaccttcatcaagcagactttggttgctgaagttttttaattgcatgttacgtagaatcaaatttagaagatatctagcacataaaactttgcagatgtggaaacagatccgagatatatgtggcagtgtgggtcagtaaatttgaatattgtcagataggctggtcttaggttgaactccagaaagaattttacagtaaagttcctctatggaatcagaaaggtgaaatctatggggttttttttcaataaactttgtggacatggaaatcccccttaaaattgagctttttctttagttggtgatgatttgttccattgtaactaaaaatattcttttgtggatatgtgagaaggagagagcatagatcaattagatgttttcttttactcttgtgttttacctagactattgtgatataagtttgttactttttaatagtaatgacagatcatcttcagttcaacatctgtttgaagtttgagtgaccaaaattgaaggaaaaactagaaaaaacgatgattgacgtgccccaggggaggggggttagctactgtgatttgatccatttagataactgcagtaatggttcatgtttccaggagaaagaagaagataatttctggatgggccaaagctaattgagatggtgacgaccgaggtgtttctaccatgaaagttccaaccatgaagagggtagaaacctcaagtgccatgaatggaagttcgagctgaaatgggaagtgatatgtctaactgacaataggactgccctaggcactaaagggcaaggaacaagggagtagtacatggaatgtttgtgttgaataaggaggtgtttgggtgagagggactaaataagtccctccctaggcactactccaaggaagttggaactagtaactatatccacagctgtatatggaaagtctttggtctctgcagaggaccaaaatctgtacaaggattgtgtgggtgggggttcagtttagtctctctccctctctcttttttgtttttcagtttttgaacaggagttttaagccctgtttggcaaatgctctctgttttaactgctatgcaagccattttcatgcctgttgtgcagcttcaggttttcactgttttattgttcaggatttatgtagacaacctcctgagaaagtgtaaaatgttgtcacttaaccttgtaccctgttcttagagctaatatatcctagtatattttttttattttctaaaaatagtaaattcacagaactacaaatactttaagtaaactatcccaagactagatattttatatgttttattataaaaaaatatataaatttagcattgaatttatcataaaactacatattttaacttttgtgaaaaatatatttattattaaatttatcacaaaactactgattaatcattgacttcatcacaaagctacatatttacaagttccatcatgataaaaatactaggatggaacctctaactatgttgtttcgtgataaattaggtgtcaaaaatctgtagtttgcaatagtatggcttgataacctgtcggtgttaaacgtttagttttctgtgacaacgctagaatttgtactagtaactatagatatttttgtaaaactatcataaagctacaaattaaaggagcatttttttcatggaaatatatgtgccattcaattataaattatattggaaaaacgtgtataaatccaggctatgaaagagccccattgattggcttgataagccaaaacaaaagccaaaatttgaacttttaaacttgaatttaaagttgattttaagacattttcaacgtcatttatttttagcattggcttttagatcattatgaacaaatatataaaaaattatctataatttagtttttatttcttaataaaccgttttgatttattagtagtaggatatatgggtaaccaattaggctctcaagattactataagtaataagtctactttgcctccctcaactcatgctcctagttgaattgcatccctcaaccgcaaaaccggatataacccgtcctccaacggtcaaaaccattgcaaatcgacttctcggacggtttcggaggcagttttgtttgacatggcaattaacttgctgagtcatcaagtgggacccacttgtcaacagcctatatctcatcccatcttctcccacacctccccccctctctctctcttaactcttcctcttcttgtcaccttccatcagcagagaggaggggaggagctcgtccgccggccgcggcgcgcgtggggaggagattcgtcggtcggcagcacgcgaggaaggagctcgacggccagccgtgcgcggggaggagctcctagccattgacggacgccgaggcccacgggcggagctacagtaataaggctggtgtcaggtgacaccaataactttcggcaaaacctaaggcaaaactgtttatccatatgttattacactatgatctaagtataattagtgtactatgacaccgatagacacgctatgacaccaacgaatcgattttcattcgtccctgccgaggccgtggaggttctcgaagccgtcgtcaaaggcaacgcgtgggcgccgccgccgctgccagccgtcgcgctgtcgacgagagcttcaaggcgatgcgcatgcaggacatcgtcagggatgcgatcaagctaggattccagcgtgcggacttcgacgacgtgatccgctcattctgctggtactactcgtcgttcttctccaagcaggccgccgccacggcagtggcgccgcccaaggacgacgaacagggcaagaaaaccggcgccaccatctcctacgagctcacgctcctggattgcctgcatgccaaccttgtgccgccgtcggagggagccgccactgggggcggaggggtgaaaggcggcaagacgtcgaggatccggacggcgaacgagctccgccgctctggcattcgtctcatggccatggaggaaggctgcgcgtggtccagttcagcgaggacaccatgacgctgcgaggtgaggaggagcaaggcgagcaggacgaggccaattaccatgcccatggccaccgccgcgcaccaccaccaagccaagctgactcagcaccttccctacaagacactgacatgtggggcccacgcgctgactcagccagtcaacgggtccaaaatgacacgccggacgaaaccacctcccaacccaaaccacccgaggagtcggtttgcaatggttttggaagttggagaacggtttatatccggttatgtggttgagggatgagatttagacaggggtatatgagtcgagggaggcaaggtagacttattccttactactactatagtacaatacaactatagggccatcaggttaagtcttttccaaagaaaaaggcccatcaccatcaggtaacttactcctcgtccgtccgtgtggggactcttcttcgtcctcaccaaacaaaccctagcctcttcataatcggagaaaaagaaagagaaaaccctaaggctctctcccctccggcggcgacaggacgggttctcgatcagggttgccagcgaacacgtctacggtacactcttcgatcgcctcgattctttcttccgattcttcgacgaaatcgcattgtatggccacctaatcttacctgtgtccctttctttctgtgttcttcttcttcatgggcgtcaagatggcggatgaaagcgagcggagcggtatggtaatcgacgacgtcggcggcggactgaatcttccaataattgttgcaggcaagcgtaagcgggagctcacatgggaagagaaggcgttgacagttcttgatattgtcgggtcccaacagcaccccgcatgccaacctgccgagcgtgattgcagcctcatagactcggagaaagattactcatgtgagtgtatatataatccacaactaatcgatcgatcattcatcattcatgtacatctgttctgctttgttcactcgtttgcgtcagtcagtatatccctcttaattggtttttttttcttgtttgttggatgggaaacatcaaaaccaaaactttgcttgttttgcagctatggccggctgccaggccggagaacacgctagtatatttggcattgacaagaatggggatgattctgatgaaccgtgtgctaaggatgatgccaagcaaagtgatgtggctcctctgaaggaggaggagaattgggagctggacagtgaaccagagctcacatgggatgagaaggtggttgaagttctaaacatagttcgacgccgagagatcaccgaatataaccccaagcagttttgctcaattcctactcgattttgtgcctacaacatagccttctttgacctggacaaagagtgtgagtacatccatccatttgtttgttataatatcatccttgttccttgttcattctttgattattgtacatgtcttaaaaaaatttactttcctggtttgatttatgtctctggcttgattttgcagcaaagcttgcacgtggaccacctataagtactagctttcccgactactgggggagatggactctgtcaatgtgaatgcaatcaaggtggccgagtctgatgtgggttaccctatcagggttttggcactgtgctggccaggatgagtacgatttcaggtgtgtctatttgttcaggcgtgacagga

SEQ ID NO: 6130 - DNA, 2095 bp, Oryza sativa
aacgtacatgatcccagagcactaccgatgcactggattaacaaaatagtataacaggtaaaagtaccaggatcttgggatatggaaactaaataagtaaatcaaatctcacaaaaaaaaggggaagtcatggattgattgatgttccaacagtaactgtcctgaccctcttagacagcaggaatggactaccaggcaatcagattcagtggatatatgatattgacagcaaggtttaagatctggcagtagggattttaatggccaggaaacaggatttctatcgtatcaggcatttcaccagccattatggaactatgcaaccgtccacatttcacttaacaatgtgagcctaattaacaggtcatttatagtgtagaatatcagacagcggattgaaaaggcaatggcatatggatttgaacaataaatagtattaatctagcaaggaggaggaacgaatcagtaacataccggcgaggtgatgatctgtggattgttcctgtcacgcctgaacaaatagacacacctgaaatcgtactcatccctggccagcacagtgccaaataccctgatagggtaacccacatcagactcggccaccttgattgcaatcacattgacagagtccatctcccaccagtagtcggggaaagctagtgacttgataggtggtccacgtgcaagctttgctgcaaaatcaagccagagacataaatcaaaccaggaaagtaaatttttttaagacatgtacaataatcaaagaatgaacaaggaacaaggatgatattataacaaacaaatggatggatgtactcacactctttgtccaggtcaaagaaggctatgttgtaggcacaaaatcgagtaggaattgagcaaaactgcttggggttatattcggtgatctctcggcgtcgaactatgtttagaacttcaaccaccttctcatcccatgtgagctctggttcactgtccagctcccaattctcctcctccttcagaggagccacatcactttgcttggcatcatccttagcacacggttcatcagaatcatccccattcttgtcaatgccaaatatactagcgtgttctccggcctggcagccggccatagctgcaaaacaagcaaagttttggttttgatgtttcccatccaacaaacaaaaaaaaaatactgcctccgtctcatattataagactttctagcattacccatattcatatagatattaatgaatctaaacacatacatatatttagattcattaacatatatatgaatgaatgaatacaatgctagaaagtcttataatataaaacggaggaagtaccaattaagagggatatactgactgatgcaaacgagtgaacaaagcagaacagatgtacatgaatgatgaatgatcgatcgattagttgtggattatatatacactcacatgagtaatctttctccgagtctatgaggctgcaatcacgctcggcaggaatatcaagaactgtcaacgccgccttctcttcccatgtgatctcccgcttacgcttgcctgcaacaattgcaagattcagtccgccgccgccgacgtcgtcgattaccataccgcccctctcgctttcgtccgccatcttgacgctcatgcagaagaagaacacggaaagaaagggacacaggtgagattaggtgcccatacaatgcgatttcgtcgaatcggaagagagaatcgaggcgatcgaggagtgtaccgtagacgtgttcgctggcagccctgatcgccccgtcgccgccggaggggagagagccttagggttttctctttctgtttccccgattatgaagaggctagggtttgtttggtgaggacgaacggcttgtttggcaacttgagggaagggaattgggagtttacaccaaggaattaatggtgagattaagatgggaatttgatttttcatcccagtctcttgtttggtagaggtggtggaaattgatagggagtttagttggtgattagatcattaatgaaaatggatggctgagatttgtttagacgaagtaaaggaggaattccctcctaattacctgccccta

SEQ ID NO: 6131 - DNA, 2001 bp, Oryza sativa
caatcaatacaattcggcgcatcgccacacatttatacttttctactttatttaccatctggcggaacttggcacctgacacagggctgcatcggttttcgatctccggcgaaggggcaagtccaatgtttcgccggcccaagcaattgtctagtctacgtcggcgtcgttcaagactgcatcagtacgttcgacctcttggattgctccggtttggatgatatatttgtctgcctatttatcatatgtcttagttaatctagtcttagtatctcaatttagctctatcagttgtttctcgctttagggttcctgtcggtaccggctaaattgttttactagattagattagctaagacatctaccacccaaaaattagtcaaaggcttgattgtctagatattatgtttctattcatacttagtgctgcataagttaagtttgatctactaagtcgtgtttaaaaccataatccctagcctgctttttgactgccaataagtgtttcatcggggtttcagccaatgagttatctagacgttgcatcagcttacaaggattgcatacatattggatttagccgatggcaacaaagattttactgattatctaatcttgtggatttaatgctatcggacctccagccgatgtatgctttaaccttcggatcgatgcttatttaccatatcattattagccgaatggtttctactggactatattattgctatattatattatcatcaaccgattgcctttatattgttgtttacatcaagtgtcagattctacattggatatatagtcgatagctcaaaaccctatcgctatcggctgacataggcatgggctagaattactccatcggcttgtcagccgatcggctcattgatatgctatttgtatattttgtcagttgcagagtcaaactgactggcagacccgcatctcatcgtcctttggatatgcactggaactaagcagatctcccaggccagtgtgtgttttttgcgtcaacagcggcacgggcaagggataaggcggcggaggatgacgacaacaacgccggccctgtggacaacgctgagtctaggttcttcgacctggacagtgtggaggaggtgacctagccaccaccgccgccgcgtcgaggccgtgctggacgtgccaggtgaggccgtcctcccttgttgtggatattatgggtaccccatacccatacggcatggttatccgactagtcataggggataacttatatctatggaatatgtaacagatcatgacttgggtgttacgtttccttgtatattacggaacggcctaaagtcctggtttgataatattgtaaagtagatttaggaaaccgataccgtattggttaaggtttctatcttgtaatcctgccccccatcctatataaggtgggcaggaggccctctagggggcatatgagacaacctgatcgtcagatctatactacacccggcggattcaaatccccaaacaggagtagggtattacctctcattgagagggcctgaacctgtctaaatcctttgtctctgcatccatccacttttaggtctcgtgcgctaccccgttttattattgccgaaatcatgtttcgacagttgtattcctctcgtgcctccactgctgctcgatggagtggaggagtggtggcagcatgaagggcgcgacgccagcgcggtggatgatcctggcaggtggggcgtggtcgccggcacatatccctaccgaccgccgccgctcctctctgcgcacctcccatctcctcgcgcagcctcctgttaacagcggatttgaaggagttaatttggtttccaaggccaatgcagcgcatcggctgagagccgtatcgatcgatacaaaattagactcggttagccgatatggaaaagatagcagatacagacagtttccgactataagtcgagctcggatcaaggatttaaagatattgccaaacaaggagtt

SEQ ID NO: 6132 - DNA, 5724 bp, Oryza sativa
taagcagcagtttccagcccatttaggaatgggctgtgatcaactgcctgctaggactaatgtacttaggtgatcagtccattttacaacatgtggcaaaagctattgttttgtgaacttgggagcttttagtaatgaatacatgcttgacatatattcatcaattgtggttgctcaggatatacccttgtggtctaccacagtaagtgttcctatgtaattatttgtgtggtttgcttagtttgcatatgtctttgcatcatgtgctctctgatctatatgattattatttcctgaaaaatttaacaagtaccgtagcaccagaagttctctttatgaatgcatggagatgttattttggttatcgaagatttggttgggattattttatacttttattgtttatttggggttggtttagttctgaactaaatcgtacacaaatcttattttgtaggatattttgaaccacatgtcagatattcttttaagactatattttgatgaaaataaataaaaggaagcatgccaaaacagcatgagggtgtatagtaatctggtagtaataaactattattggattttcacaggaggaaatttggattgtcgtaaatgttcagatatgctattttatctgggaagaaataaagttctgcttgagttgtgctttaaccagaaggaatttgtagttgtaaatttaaaaaaccaaaatcaggggcgggctatccattcaggcttacctggatttctttgccctctgggacctactttcctcgatacagcttgagcccgcggtggctgacgcggcggtctggtggccggcgaagaacggaaccttctccgtcaagtcagcctactcgttgctatccgctggtcgtactcgatgtttgctgggcaagattatttggaagtcacgcgcaccggaatgctgcaaattctttatgttctgcgccatgaagaatgcctgccttacggctgataatttgcaacggcgtggatggcatctggctccaatctgccatctttgctccaaagatatcgaatcttgcacccacatcttccttaactgcgccttctcccatgaagtttgggggctagttaggggcaggattggcctccttcatgcagtgccagatgatgacttgcccacttggtggtgtgccgcgcgcaaggtggttaccaagaaggagaggaaaacctttgacgcgggcgtgattttggtgacttggctgatctggaaggaacggaacgctcgcgtgttcgatggccgagcctcgtcaccggcctgcctattcgcgacgatcaaggatgaatgggaaatgtggctggcggcgggtttgatccctcctccgtgagaaggcttgttgtagctctgttgggagaggttttttgtgtgtttgctccccatctcctttgagcgacggctttttctgcctctcttagggatgtggtcctgcttgtaacaaataatgtacattctttgctctatcttaatatacttcggccggcatctttgccggcccggtgaaaaaaaaccaacaaaagtttaatgtcttcaaattctgaaaaatactatccaacgactgtaaaatgcatattgttttgtggatggattgtcctacaatgggtaaaccaaactatttttgtgaatctgtggtctataactcccttctttcatgtttatatgttaaaaggagttgcatccagcttacaattttccttgttattgcttatgctattacattaccttttgcagcatctcatctatattattgcaggaattatatgcaaagttaaacgtcatgcgagcactgtggcatatatgttaatttgttagtaggggaaaggtttgctacattcctactgatgcggtttacagaaacagtcatactgtgtctgtcagaggaccagagattttgggaagagattgaagagggaccaagggctatgggtccccttggactttcagcaggtgagctcctctttttcttcttctgatcttatgacaccaactatcattcttattattttcaccttcctttacagttctacctggatatgcaatttgtgattcttttcgggcaaggccgtctcttatctccggtctccgcacatacatcaagtaatactgaaaatcgttgatagagtgatggcggcattttctgttactggaatgaaccctgataggttatattatactttcaaggttaataaaccttttcgacccaactgttttcagtacaaagtgctgtaatgtttatgcactttgtgctgcaatagcaagcaggagcatatgcatgtgttttgctccatttgttacacttctattatagatttttcacatgtcagaaattggatgatgtaggatatattaattatgaaattcctggttttgtctaaaaatgtcgctggcctttaaaccgaagacgatgatgaggaacacccgcttattcctggttttttgtctaaattggatgcgtccttccaagcaaacaattgccgaaaaaacacgttgtggtcgataatgttgccaagcaacatacaaccatctctgcacagggtaatcgcaaaagcaaacatgctgatgtggtaatgccagttatcaatgtatttgatgtagtaggtacatgtgttgggtttgaatgtttctcttacaaacaattaatacagtgatgcaatacttgttacaacagcctctaaactttcaatcttctacattacaacacagccttacacccttgtgttgcatattgcaatggcaggaaaaagaatagccagatatgagcttacaggcaaacagaaattaccaagtggagtacaatttcaacggcacaaaagttaacaccaataatatatatttcagtgtacgaacactagatcgatccatgttcattacacacaggactgccaacacattaagcaataaacaaacaagtttcgtgggaattcgggaaaacatgccccattttacagcctataacaaagatacttcgctagagatgtatgcgccacatataattcacccagagtttcacatactatcaccataaaatatttccaaatctcccaatacgctcccacattttccgattgtagtgttctatgattccaatccacctaaccttcacttgcagcacataagggcctttcttccgagtacattcttcattacgatgccctagaacaaacttaaaacatgcaacttcactgccaccctcaaacacacaaactttgagcaccagcttgtgtttacacacgacagctactatattacgagttaatgtaacacgtccatcattcctaacagttgtctctgtcccttccactctactgtcatataagatgatctcattttcaacattcccagtagtccaagcacttactgtaccggtgaaatttgacagcccctccaagaaattgacagcaagggtagcttgcacagcataaggaacaggtgtatagataaacgccactctactcatgaaactttctagttctaaagtcttgagtggcttttcataagcgacggcatcatgttctatgaaacctttgctgaaatctttgtcagtagccccatcccccttaatcttcaaattgaactcaaaatacatggatcctttggtagcaagccctctctttgggcctgtaagagttagtgtatcctcctgcacgtacatcgatttaatgaaaagcatgtcacttataattcagacgatgtcaagaatataatgtgttcgagaagaggaacgaatcggatacagaccggcgaggtgctgagttggggatggtcctatcacgcctgaacaaatagacacatctgtagtcctgcttatccctcgccagcacagttccaaagatgctgatggggtaacctgaatcagactcggtgaccttgattgcaatgacattaacagagccttccaacatcacaaacttggaggaagggatagtgcgaatcggagacccaggactaatttttgctgcaaaaatagggccagaaacagaaatcaaacaagaacattattattactacacatgacatcgatctagagactcaacagatagggaggaagaagtttttacaagtatatattgcttgaatttacatgtattcataggaataaacggatcgagaactaattagacaagtgaatgaaatgatacgtgcaaatttagaaatttagaataagtgaaaggatactcacactctttgtcgtggtcaaagaatgccatgttgcagaaacagaaactgacccgggtaggggtaaattcttttaacttggggtcgtattcagttaactgatagcggcgaacgatgtcaagaacgctcaccaccttctcctcccatgtcaactcctgtccaaaatccaggaacttcttcttcacctttcccacctgctgctgctttttcagagttggctgctgcttctcctccttcccagcagccataccacctccatgctcctcctccttctccatggtgaccttcttggttagttcacccatcttgccaatgctgtcatcgccacagctataaattcagaagagaagcaaaaattgcaatatttagatttgttcttttatgcatcgcataccaagaggaagaggggatcgatcgaggaggcgagcgtaccgtacgtggtgcgagtgcgatctcctcgaaccctagcacgccgcaaccgagaagtcgatcgatcgccgccgctgcggtgaaaggggttttctttatataggcccatcaggttaagtcttttccaaagaaaaaggcccatcaggtaacctactcttccggtctgtttggttggagagagtttttaggagggattaggagtttagagggatgagtctattaactgttttgtttggttgggggacatgggaattttggtgggatggggatggggatggggaattgaggaatgaattccctccttttcaatacctgggtaggggcaggtaattaggagggaattcctcctttacttcgtctaaacaaatctcagccatccattttcattaatgatctaatcaccaactaaactccctatcaatttccaccacctctaccaaacaagagactgggatgaaaaatcaaattcccatcttaatctcaccattaattccttggtgtaaactcccaattcccttccctcaagttgccaaacaagccgttcgtcctcaccaaacaaaccctagcctcttcataatcggggaaacagaaagagaaaaccctaaggctctctcccctccggcggcgacggggcgatcagggctgccagcgaacacgtctacggtacactcctcgatcgcctcgattctctcttccgattcgacgaaatcgcattgtatgggcacctaatctcacctgtgtccctttctttccgtgttcttcttctgcatgagcgtcaagatgcggacgaaagcgagaggggcggtatggtaatcgacgacgtcggcggcggcggactgaatcttgcaattgttgcaggcaagcgtaagcgggagatcacatgggaagagaaggcggcgttgacagttcttgatattcctgccgagcgtgattgcagcctcatagactcggagaaagattactcatgtgagtgtatatataatccacaactaatcgatcgatcattcatcattcatgtacatctgttctgctttgttcactcgtttgcatcagtcagtatatccctcttaattggtacttcctccgttttatat

SEQ ID NO: 6133 - DNA, 1608 bp, Oryza sativa
catctctcatttattgcttgctgatatggttttattctttcagtcctaccttcaaaataatttaacaactcaatgagctaggaaaacttaatcctaacactgacctcttccagtttcctttttcttccctagttgacatgcttcaatatccatgatgtttcaaagttgcacaacagtagtataagaactaagaagcctttcttagcaaatcagcagccaagacaacatgttccaacaggagcctactatagttgattcatagtacattgtgtgtgtgggtaccacataaaccaagaatgtagtgtgacattgctgccttaagcgcttccaattttttttaattaatggaaagcaaagctacatttggtcaaaatattttgtaaaaactatatgaacagcaaatgagatggttctcttcaaaagaatcttaggttccagtcaaccaaagaaataactagcaagcatccacaggaacatcaatacatcattgatcttcattatcaatatggaactaaaattgatattgactgaattgtacatatgtacaacatgccaacctctaaaccaaataacaagtctaagaggtgcacaaagttaaaaagtaagtcaaattgtatgtaaatgcctatagaaattgtgggaaaagacccaagttaatcaaattgacagttaaaaggtcaaatggaagggacaagaagaggcacatacttgtgatctgctactaacaattcatcctctgcaacctttagcaaataccatggaaatgctattgaatctgcaacaacttttttcactcaagcctagtttatcaacaatcaaactccagatgcctctaacatcctccttcccaatcccagatctgcttttctaacagtgcggtctctgcagaagaatcagacatgagggtttgaatctgatgcattagtacatgaccgttctgggtagctgtaaattttctcaagtactaaaaggcagggaaagaaggaaaatgtatgattatatgcacgcaaaacatatgaacatatagtacgcttataaatcacaaaatctattgctagtgaaaaggtcatacttcctttccaaaacaaaagaaagggatagacccttttatggttaattacctctgatcttcagcagcattataaatgacgcattagtgcttaagaacttgacagattcaaattaaccatcttcaaagcaaatgaattatcaaatctgcaaaagaaaattctgattatcatcccgcatggattgaggcctacagcgaacaaagataagcttcaaaatttaaacacaacagaaacagaaagccatacatcaattatgaccctatggtggttactgtatgagatgaaactgtgatctccatcttcatcaaccaatacgcaagctgaagcacatgatgagcgcacaacataggttcaatagaacaggaaatttagagatgcaagatacaatttatagcattacaaatatagatacagcatgtttaatcatcacaaaatcacaatccccaaatgattggggttttttttctttgcggggaatccacaaatgattaaaacaacttgtaaattttgcgcaagctagaaatcaccaagcttgcat

SEQ ID NO: 6134 - DNA, 4118 bp, Oryza sativa
gctaagtgtagtggaatttgcattcgtgactgttcaatatgccgttgaagctacccttgcggtgaaaatgttagggggggcatctgttttcactggtagagtgactgcttggactactggaaatgatgaagatgaaatagttctctatgacagtgaagttgcagacactcggacagagattacagctgatggatctgttcagctaaatcgtggtttagtagttgtcccattggataaggagctggtgctcaatatttgtgtgtttgagggtgaagatgaagctcaaagctttgagttcattctagggcactatgatgaagaatttacctgcaagcaaggctgttatgagtttcaagttaatattatttggacggcagtaaagactcggcgacggcccaatatgtggaagcgcattggttgcattgtactgttactttgaaggctgtaaaaagggtgcacttatcagagtcatatatgatcggtgcactcaaaacatatctatctatccataaaatttcctaagaatattctcttagatatgtattgctagtctcagtctgtaaatgatgatcacgcttatcttaattagacacatgcatgcgtggtattccctccgtttcaggttataagacgttttaactttggtcgaagtcaaactgctttaaatttggtcaagcttgtagaaaaaaaatagtgacattttcaactcaagataaatttattataaaaatgtattcaattattgattcgatgaaactaatttagtattataaatattattatatttatttataaacctagttaaacttgaaataatttgactttgaccatagtcaaaacgtcttatgacctaaaacagagagattaatatctgagatgcagtgacagttgccaccctcctgccctgaacctaatccagcggccatacaattgctacgtcgtctctcgagtcaagaagttcaccataggaactggatggcattgcgcacgctctctatctaagcctgtttttttttaactacttcactgcagagtatatatttttgttataaaaagaaatcttatattagattgcttaaactaattgttttcagcatggcagacaggtcaaagcctgctgccctctgaagttttcgtttgccatcccaacacaaaaagcgaactcatgcaatttgaatcagatttgataaggaagttaaagtgaactttttatttttaaattttacaaataaactctctcaaaaacttatttccacgaacttttggtcacgccagacagactatcttaacccaacgtggcaatattgtttcaccacgccatcttaactggggtgccaaaacaaaatgctgttttaccacgttagacggggtttggcgtagtgaaaaagatttattttttggaaacaaattttacgagagtttattttaaaaattaaaaaaatcaaaaaatcaaaaaatgataacaaattgtctcacgagtgatccgatccaaccaagtagtttagtccgttatgttcttccgccacatcacaataattatattaccctagttttcctttccctctctctgcgggcggcggccacatctccctggtacgcgcgcgcacatcgatcccctctttttttttttttttgacgctgcatcgatcccctcttcttccgaattcgatgcaatcgcctcttcttctttttttgttcatttatctccatcatatcgcgcatcagcagcaacgctcgcagatggcggagggcggcaacgacggttcggttgcgggggatcggctcatggttgcaacaatcaagcgcaagcgggagcttgccgaataagatggagattcttcttccccttgtagcgctaatcgatccctcgacatggaggtagtggaggagaaattgtattgctcttatggtgagtactagtgtacattattattattccataattaattcgtcaatatatctatcattcagataactcagacattacaattagtatatgtgtattgattatgtgagcagcctgatatatatgtatagtttaccctgtttgattcctgattacttgcttggttgctgctggatggatgtaacatatataagataataagaattacaaattataagataaacacatcaccttgagcgcgcggcacatgtcgttctaacctgagctgcagcgacgacgacgacagagagacaattgaaacaatgttcaaggaacttccaattggaaaccccaccataagcatggatgaggatgtggtttacttgctctctataactagccccatgaaaacggataggttagaagttgtgtttgctgtcccccgcaaaaaaaaaaaaaaagaagaagttgtgtttgctgttgatgtgaggaagggtatgcttcaaggattagctaagcttgatgttcgcccgaagaacttggctatcatggtcactttatggaccagtgagatttgtaggtatctagtctgaggaatattattacaggtaacttaattctctacgctggtaattaactttattgtgtgtttttatgcgtgatcaatatgtgtgagtatgaatgccatgcttgccatttttaagatctagggaattgttgtgttggtaattttctggtttcagtagggtctagagcttaattcagaagccatggcttgatgacagtgttatgccacaaaaagattgaatccatctcaaaatacaccaatccgttacaaaaagattgaatcttgttggctacattgttcttgattagtgagacagtctgatgtgcagatgcacaataatgttctctcatttgaagaaaagaacaaatcatgtactttactcgcttggaaccattagttgagttgtattttctatttatgcaaacccaactttgatggtaaaatacttaaaattattatatgtacgtagtatgtgctccctttataaatatttaatgcagttgattttgatcataaagtttgatcatttatcatatttaaaagtttagtgtaaaaatatgcaaaaatatcatgtttaaagtacctttaacaataaaacaagtcaaaaaaaataattgtatttttttaataagataaattatcaaattttgttgtcaaagtcaactgcgttatgaccagaggaaagtacccgaatctcttaacatacagttggcattgtcttaattgtattggacttgtcgagtttggtgttttttgcgggcatttctgacatgattttccctaatctatttacaggaggaaccattaactttgacaggacctaataatcgagtacttggtacactatacagaattgagttacatttaaagattagagacgatggtggtgttgaccaagatttctgcgagaaggcgagaacacaatgcatcagctataaatttttagtgaaagtagccacaaaatgtccggaccagtatgtgaacaagtataatcgagtggcaaattgatcttctgtatctgctataaaattatgtagctctgtgatggaaagcttgaaggagctcacaattccagtcaaatttctagtaaaaaaagaaaaggaaaactaaaaaaaaagtttaaactcaaagcccactagtaaatactactaatacaactaaggcccatattgggccgcccatcacggcccacgaacagcaacctaatcctcgcgctggaagagacgagacaatacgccacgcgccgcctgagccctcgcgtcgcgacaccgctcgccgcggcggcgctgctcctctccggcgaccacgcgaggagggagaagaggaggaagaaggcgagaagggagcgagctggaagagcgggagagggggacatctaggtcgtcgacggcctcatcaatggggtggggcatgccgacgcggccaccggcgacgtcgacgccgtcgcgggtgcaggcgctgtacgagctctgcaagcgcaccttcccatcgccgtcctccgtcgccgcgtcctcctcaccgtcgtccccgccgcccgaccacgccatccgcgccatctcctctctgatgggtaggtgacctgacctgacctgacccgccgcccaatcttgtttttgttcttggttcagagttcggactgcaaattgattgctctttcctctgcaa

SEQ ID NO: 6135 - DNA, 11098 bp, Oryza sativa
tggcaatccgacccccacctcaactggtcaacagggagcctccaataattccctatttatgttgagatattcctcgcttaaatcctgaggtggtattattatccttaacacttattatgggcctttgagatttaataggataagttgggcctaacccaattattctaacaatccccaccaaatttcaaggctcataagaaatgttctcaatgttgtgcctgtttgatataccagggttttggtggagactgttaagttgaacttccacctaagaaatgagctacatcagaccacaactgaacaatggactatgccttgaattgtcagttttgtgttatcaagtttcactcagaaccttgactggtactgggctgccgttcgcatcccctctgtttggagcatataagtcaaactccaggcctttcataaatatctagagattgtccaaacctcatagactgtgactagcagtcgaactcatataggtgtgttccttctaagatgttctgcaggtcaacatctctgcttggaaaagccactcggatcacattaaggcatgagccatcctaccatgcaggaaagaagagaagcacattatgaaaatgagcccttttcaagggtctcttctctcagtcacacaatagtttgtttcgctatccaaattcacgggatctccgatcacaatggacaggtttccactattatgcaaccttaggtgggtatcaagcccatttccctcgatgcactgtctatcacattatgtggtagccccttggtaaactgatctgctagatttctagccgtttggacatagtccaatgctatcactccggagtttttctgctttctgacagacttcagtcttcttttaacatgcctgaatgacttcatgttgtccttcgaactgttcactttaataatcactgtttgattatcacagttcatcaggattgctggtactggtttttcaaccaccggcaagtccatcaggagctcacgaagccattcggcctcaattgtcgcagtatctactgctgtaagttctgcttccattgttgacctcgttaagatggtctgcttgcaagacttctaggaaacagcgccacctccaagtgtgaacacatatccacttgtggcttttatctcatcagcatcagatatccagtttgagtcactatacccttctagtacttttggatacccggtatagtgaattccatagctcatagtgccctttagatagcgcattactctttctagagcctgccaatgatcatctcccggatttgagacaaaccggctcagcttgcttacagcaaatgagatgttaggcctcgttgcgctagccaagtacatcaatgaaccaatgatttgagagtatctcagttgatcccttgctattcttcggtttttccttaatagcacgctgggatcataaggagtaggagctggcttgcagtcactatatccaaagcgactcaaaaccttgtccacatagtgggattgcacaagtgtaatcccaccctcatctcctctttgtagtttgatgttaagaataacatcagcctctcccaaatccttcatttcaaaactcttggacagatagtctttgacctcctcaatcacattaaggctggtcccaaagatcaatatgtcatcgacatataagcataagatcaccccttctcccccaccatagcgatagtatacacatttgtcagcttcgttcacaacaaagcctgcagatgtaagcgtggtgtcaaacttctcatgccattgcttaggtgcgtgcttgaggccatacaaggatttcaatagtttacacaccattccctcctgaccttatagtacatacccgtctggttgatccatatagatctcctcctctagctctccgtttaggaaagctgtcttaacgtccatctgatggacgagaagaccaagagaggctgccagagcaagtagtactcgaatcgtgtcaagcgagcacctggtgagtatgtgtcgaagaagtcctcgcctccttttgggtatacacttgcctggagcccttgccttgtacttttcgattgtaccatcaggcctaagctttttcttgagaacccatttgcatcctacgggcttgcacccatatggacgctcaacgacttcccaagtaccattagacataatcgagtccatttcactgcgtactgcttccttccagtagtcagcgtcaggagatgaatatgtctcttctatggttcttggggtgtcatccacgaggtatacaatgtagtcatctccaaaggattttgcaaccctttgtctcttactcttgcgagtatctacaatgttgtcctcctcaggattttccttaggcgtttgatcattgtgttctatcggtgccaagtgctcatggggcatgacagtttctttactagaagtgctaggtgtatgtttcataggaaattcattctcaaagaatgtagcacctctggactcaagaattgtaccaacatgcatgtcaggtactccagagtttactattaagaatctataaaccacactgtggatagcataaccaaggaacacacaatcaacagtatttggtccaaatttccactttttggctataggtacatttaccttggccaaacagccccatgtttgtaggtatgagagatttaatttcttcctttcccattcctcgaatggtgttacttcctttcattggaattttattcaggacatgatacgcattcaaaactgcctcaccccaccattccttggaaagccctgcagtgtctaacatagcattcaccccatctcagttagagtacggttctttctttcggccaccccatttgattggggtgaatagggaggcgtcctctcatgaataattccaaactcttcgcaaaaggatgcaaactcattggaaaaatactccccacctctatcagacctcaaccgtttgattttcctttcaagttggttttctacctcagctttatagattttaaagtaatacaatgcctcatcctttgttttcaatagatacacatagcaaaatctagtgcaattatctatcagtgtcatgaaatatttctttccccctttagtcaacacgccgttcatttcgcacaaatcggaatgaacaagttctagaggtgccaaattcctcgcctcagatgccttgtgaggcttgcgaggttgtttcgattgaacgcaagtatggcacttggaacctttgaccaaagtgaattttggaattaaactcaggttagctaagcgcgtcatacaaccgaaattcacatgacagagtcgcgaatgccacacattagactaatcattctcgctaatatggttcacagcattatgattattacacatgtcattcaaagaaaagcggaacaagcctccgctatcataacattttccaacaaaagtcccatatttaggtacgacacatttattggacttaaacacaagtctaaaaccttctctacacaatagagagccgctaactagattcttctttattgaagggacatgctgcacgttcttcagctgcacggtctttcccgaagtaaactttagatcgaccataccaacaccatgaacagccgcaagcgacccgtttcccatcaacaaggaggaacctctcccgacctggtaagaagaaaacagagaaatgtcagcacatacatgaatattagcaccagtgtccacccaccaatcaggtgaatgaaaaacagagagaactgtagataatattttaccgtaccccgatgttcctccgccctcgctaatgaccatgttggcagactttctgtctttgcgctcaggacagtccttggcccaatgcccagacttgtcacacacaaagcagtctacctttgcctttcccttgtctttcttcttaaaattggttgtagccttggatttgacatcaggcttaactttcttgttatcgtgggatgcatgagggttcttcttctgtaccatattggcactagaacctccctcaacctttttgccccggacgtcctttgccctcgccttctcctcaacacccaaagagccaatgagatcagaaacactgaactcttgtctcttgtgctttagagaagtggcaaagtccgaccaagaaggtggtagtttggcaataatgccacccgccacaaacttgtccggcaactcacagttgttgttctcaagttccttaaccagcatctgaatctcatgagcttgttctactacagaacggtcatcgaccatcttgtagtcatagaactgctccatgacatatagctcactgtcggcgtcagaaactccgaacttggcctcaagagcatcccacatgtccttcccagaaggcatgtgcatgtatacgtccactatgttgtcagcgagtacactgatcaatgttccacggaacaggcaatctgaagcctcgaacttagcctcttcctcaggagaaagaggtggttcacttcgtttgccccgtgaaacatagaagcactgcatcgctgtcaaccacaatagtgcacgtgctttccatcttttatagtttgaaccatcaaaagcatgtggtttcagtgcagcagcaaagccaactaccgaaaatgacctatcaagtttttggattgttggaaatatagtcattaatcggcatattttaatccaaaatgttaaagcaataatcatggcataagcagtgtagggcgatcttaacataaccagtagcatactatgcgcatcatgaatgtcaggaacaggaacataacagtaacgcatagaggcatcatgaagaacaggaacaagaacatagcgcacatagtatagcgatagcgctaataatggaacaggaatagcgctaacaatgggaacaggaggagaagattataccccgagaatggccctctgctggatggtgaggcagaattgcctccgttgttgttgtcgttcacggcacctcctcctggcgcactagctccggctcctgttggcggcgcaccacctccgccatctcctccagcagcggcggcaactccagacatcgcgatgagcagtcgtgtgggaggcactccccaaaaacctgatcacccgcctacccggtgcagatctcaggcgaaggtgtggtttcggaggcactgctccttccaatctctcgtgcgcgcaagagatcagaagcgaggaagcgagagcaactcaggcggagaaggagaaaccaacaccggaaaagaagcgatgaaaacggatcgcactcgcggcctccttatctatcaggagaaagaacgtggatgcgctgttgcggagggaatcgtgggaacgtgggttagtggctgcaaaaggatagcgacgtgacgtgacgtgacgcatgcacgcagccagccacgccacgcctcgcctcgcccagcccacgcccacggcctcggcccggcgcgcgcgtgtggcaatccgacccccacctcaactggtcaacagggagcctccaataactccctatttaggttgagatattcctcgcttaaatcctgaggtggtattattatccttaacacttattatgggcctttgagatttaataggataagttgggcatagcccaattattctaacatcttcaacttccacataaccttatttttcactatataaccattgtttagcaaggctaaatacataaaatggacccaaaaaatactattgtgatgaagattttatctaaatgtctttatgatcatttagattagtatgcacaatcttaacatgccaaagaactagatagatttttatatatcattgacaatcttacccagttatcccagaagagaaacattattgaccgttattatatcaaaaagtttggggtctgactcaactgtagtaagggatgagaacggtataaaagcccccgaccgtatcgaccatcaattccgttttatacggactgtttaatttgtttctgcggactgtttaattttggattgcccggaagtgaaaaggtaacgatgtataggtgtttttctgaccgttttaacggtataccattttgtggaatttccggagaaattactgtataaaatcgataacccatcaagatatacaaagaattaactataaatcttgtgtgttctaattgtcgatgcattaaggatttagatcccatcctaaaattttatacaatgtcacatcgaatgtttaaacacctgtataaagtattaaaataactagttgcacaaattgtgactaatttgtgagacaaatattttaagcctaattgctacattgtcacggttatggataccacatacctaatagcagttgactagatcttggcaggacccaccacataccatgtcttgtatggacattgacctcagatatggatgaagttccggataagaaaagacaaccagagttctacatggaaacgataaggactacttagattgtatccatattggtctccctagttctacttggacaaggggacacatatgggtataaatacaagaccccctaggaggagaggggagacggacaatatagacgccacaaagccacaagccaatacaagccaacatacgccaagacaagtcgccggatatcgacatcagagatatgcctggattgaccctatccggtacctacagaggccggccatagggatctagtgctatctctgatctcgtcgggcactgattcgaggaggaagactaccctgttgtcgactacgtgatgatacttcagtcccgctatgtcgacaacagttagataggctaccccaaatattggactggtgtgattatggtgaataagaacaataccggcttcggtcaacgggatgtagggttattacttgccaatttaggggccagaacttgtataaaaatcactgtctccatctcttttacctcagtcttgcgtatatcctagtaccaacgatccctataccatgcaaataccggaatcgcgacatcaaacgtcgacatacataatttaataatgtggtgctacagtaaacatttgctaatggcgtgttaattaggcttaataaattggtatcgcggtttactgacggattatgtaattatttttttattagtgcccgaacatcccacgcgacaccctatataatatccgatgtgacacgccaaaactttacacccctaatatcgttaggattaggatgtattcaaatatcgttgtttccgaggctctattccgataattccgtttctggtattttaagatgttttgatagtattgatatcgttatggtctctgactctaccacacccatttcgttttgaagaaaaaaagagtaaataaatgttttgagcgtttttccggcatttttcgccgcaagttatactgcgatatgataaaattttgggaatggtttagctagatacgtggtgaagactgaagcgaagtgcccgggttgaattagactagacaagtagacagcctacgtcacgtactagcagtagtgtgcttatttattattactccccttgtttaaactaatgacgttagtctaactactgtacattaaataatcatcatgcataagacccaggttacgtattcgttcatgcattgcaaacttttgctcagtcgacataagtgaagattcttttttgaacaagcacattctccacggaggtaataaagattaactaccacgagttggctaaaagccccatggaagaatatagtagaatctcaattcccagaatatgtatattgctgatgatgttggtttgcaatgatcatcaggagatatatatagagggagaggggggaaagatccttacaaaaatgactgatatcaatgtacatgtcttgtcaaaagaacagagataccagcatatggctaactgaaacatattaattaagaccaacttagctactccaggactcctacacaaacagaatgtccaaaatggcatgtagggtttctccacgcgaaaagatcagctggtctccagctactccagttacacgtccttgacatgcttctgtgctggttgaggcacccatgccgctctgtacttgagtacccgcagtttttcagcaatctgagcaaaagttagttcacagccaactggaagctcctgtgtgaacaaagcacgagagtacttgccccattcgttgaactcacaggaaaatttcttaggaaccttcttctcagacttagctgtaggaggtgcagagaaagtgcctaaaacccatcgctgcaagagcgggaagcggatggattctgagatggtcacgaccggcagactcaatgggcctgacccaagttcttccttcaggcgcttctgtctgaccaactcttctgccatgagtagggattggtgacaattcttgaatgcccttctgcctacttcaatgttatggccacctacatcattataacttgtgctaatattgttcatattaaataccccttccttctccttcttggagtagtgcagttgagaacgcggaggcagactctcttcagcgtcgctcatcctataccattttcctgtcacagtaagaagacaacatagtacattataattggggaacacatgcatgctggtatctactagtagaagctaagataataaccaccgacttgtgagctagttaaactggtggtacaggatgcagaggaatattcacagtacacattgggcaggtatgtgcaccctcattgggcaggtatgtgcacccttctaactgatgctaatatgctaccaccaaccaattaaaagcaagtctggattttggaaaagaaaatacatgcatgtcagactgtttttatcctaatgcaataaaacaacagcagaaaaaggcaactactagaagtgcatgttttgtagtctagttaagcagttgttgataatataatcatcggtaatattgtgcgaaaaccaactgaagcaagtagctagtgattttgaaacatgctaatgtatacaaaagaagtacagaacgatatatactataaggggaaaaaaactgtagcaatatgtagaactatcagaatacatgctaatttgtagtgcagttaatgtgcatgaagggcaacaaaattccatggatggaaaaacccaaactgttggtctatttgagtagttgcattgcatggcattctgtattttacatttgtaaacatgttctcacactttcaaaaccatagaagcaaggcaaagttcatctctttagagttctcatcccccctcacaaaattttagctagttataacacataatagattaaaattttgatgtgaagttacaaaatagatttagtgtatgatgtgaaattacagattgtattcataataacaacatgcaacgatacgatggtgtattgattcttaacccacaggaaattgtgctacataagtgttaacatggtgatttttcttatcagaatacatcataaggcatactaggacaaggaaaaaaatgcgtgtgaacatgcgcatgttaatgatctagctaggcatgatctaagtctagctttggattacaaatgataattttaaatatcttccttatctaaaaaattactcttgataaaacttatcatgtcaaatattgcagatatcacagattcagttgccacagcaagagtttttcgtgttgtgaacagttggcacataaggtgctgcaaaccccaatgttcatattttctccctctctatcctatcattcccttccggcgtcccacaggccacaaacacaaccttctcctcctctgtaagcagctagcatcaatctctgatcctcccttaattatcaagaatggaaatgcatttgcatttagcaaagaatcttacctttagcatgaaaggcctcaaagtagaggtctttccatcggaacaggagtgttacgatttcctcatctggactgctcttggtcggcttcaacttcaccagaaaagtcccacctttgggcgtgtagagtctctcagcaaccttggagaagagctttttgcctttgctattggacggagcttcctgtatgattatctgttctaatcttgttggaatggcgtcctccatgagcttcttgtagctttcaggcaaatcattcagcacgagatcgaattcatctgatgcagggggcttgacaagaaacaacaagcaaggagaggaaaaaaaaaagatcatttttttcatttgaaatccccatgatctttgaagaaccaaagtcatggcgcacgacacacaaacaggaataaggagtgttgagattccgtacctccttcactggctgttctttctttggggccatggcgattcatagaagatgcttttcttgttcttggaagggggttttgaagcgagcaggtgggggttgaagggtttttgaagcagaggatcggagcagaaggccaatgtatcttgccggtggccaaggcttctcctacttggacatctccctcctcctcctcgcagtcatggcggacgtatgtatcactggagaggaggagtaggcggaggcgcgcggcgggggcggagctcttgagcaatggagacttgggagaagagaggcatttctgggtggtcaggtgatcaggtcgacaggtcttatatttctttaatatttttctattgttcctccctcgggttccactttttgttttcttttttgtcgtatagtactcctcctcctaagagagagagttagagagcgagagagacacacacacacatagagagttccaaagtaccaaaccctcgccgccggggatgtcgccgtcgacgccccacccgggccgcgcgccggctggccgttctccgggactcttgggcacttacctccatccagctccagcctctcgcgcagccgtccattcattcaacgccagtatgtgagtgagttcgagtacgccaaccatgactaaattatccatatctctagctagtgaatgctactctctgatctcgatctactccttgttactggttgtgtcttagttggaacgattgtgctaacacgaccacccgatttgatttgtatgcgtgtatttttttttttttgggggggggggttgtatttgcattaattctacgtaggagctgaggatcgcagattaatt

SEQ ID NO: 6136 - DNA, 953 bp, Oryza sativa
taaaaaaaagttttaaactcaaagcccgttagtaaatactactaatacaactaaggcccatattgggccgcccatcacggcccacgaacagcaacctaatcctcgcgctggaagagacgagacaatacgccacgcgccgcctgagccctcgcgtcgcgacaccgctcgccgcggcggcgctgctcctctccggcgaccacgcgaggagggagaagaggaggaagaaggcgagaagggagcgagctggaagagcgggagagggggacatctaggtcgtcgacggcctcatcaatggggtggggcatgccgacgcggccaccggcgacgtcgacgccgtcgcgggtgcaggcgctgtacgagctctgcaagcgcaccttcccatcgccgtcctccgtcgccgcgtcctcctcaccgtcgtccccgccgcccgaccacgccatccgcgccatctcctctctgatgggtaggtgacctgacctgacctgacccgccgcccaatcttgtttttgttcttggttcagagttcggactgcaaattgattgctctttcctctgcaaaatcgttcgtatgctgatgtattgaggaattggatgtgatttttgtgttcagatacaataactcctgttgatgttggactcagagatgataatctcgaggatggaagagggtttgggttctttgaatcaaacttcctgaagaattcagcgagggttgctagatgggcgcaacccatcacttatctgcatgtctacgagtgtgacgccttctctgtatgtggatgctcaacttggtcatcttcttgtattgtaacacttctgtgaaagagtagaatttaatgaatacttgtatatcttctctgctaacctgcaattgtttcctgtatgttccatagattggaatattctgcttaccaacgtcggcggtcattcctctccatgatcatccgggaatg

SEQ ID NO: 6137 - DNA, 5796 bp, Oryza sativa
attcattcatatatatgttaatgaatctaaatatatgtatgtgtttagattcattaatatctatatgaatatgggtaatgctagaaagtcttataatatgagacggaggcagtattttttttttgtttgttggatgggaaacatcaaaaccaaaactttgcttgttttgcagctatggctggctgccaggccggagaacacgctagtatatttggcattgacaagaatggggatgattctgatgaaccgtgtgctaaggatgatgccaatcaaagtgatatggctgctctgaaggaggaggaggagaattgggagctggacagtgaaccagagctcacatgggatgagaaggtggttcaagttctaaacatggttcgacaccgagagatcaccgaatataaccccaagcagttttgctcaattcctactcgattttgtgcctacaacatagccttctttgacctggacaaagagtgtgagtacatccatccactgttagggttttctataggatcgtctagccttagatctagtcgggtagagctcttgggtggatgaacaaatatggatgaaacaacagagagggaagtgagagggtttagggatacgactggttgacgttgaggaggaggaagaggcgccggccatcgtcgttgttgtcgcgcttgacgtggacggcggcgacgatggtcatgacggcggcggtcgtaggcgaggacgacgaggcgtggcgcggcgtgatgcttcccgtcactggctgcgccccctcgatcagttagggttttgtgggtggagttggcggtggcagtgaacctcgtatcgtgtgccccctcggcctccacccctgtttatatggcgcagggtgacaggggcccaccagccaatgggctgggcgccccccgatcagggcacgggtcaaggtccctttgtgccgttgggctcaaggggagggagatctatctaacattctcccccttgatctcactatttcttttagcctttttctattccatcacagatttgcacatagagcatgtttcatcgtcacggttaatcgccgatggattcgacagccactatacacatctctattatactttaacttttgggccctgtagtccaggattcataaggcttcccttaaacccatgccggctacatgttccttgaacacattgggtggtaggtctttcgtgagcggatccgcgagcatcctttctgttctaatgtgctcgagactgattgtttgatcccggactttgttcttcacaacatagtactttatgtcaatgtgtttggcagcaccacttgactgattgttgtgagcgtacattactgtaggtttgttatcgcggtataactttagtactcttcctgtccatagctcatacggtgttttgggcaccgatttgcttgaaactctgttgaggatatgaatggcggtttttaacgcctccatccataaacccaatggtagggtggagtagctcatcatgctgcgcaccatatccataagggtacggttacgcctttcagctaccccattctgtttaggttcgcccggtgttgaatagtgggctactattccattctctagcaagaaccttgcaaaaggtccagggacttgcccataaggcgtatgccgaccatagtactccccccatggttagatcttactattttaaactttatatcatgctgattttcaacttcagctttgaatatcttaaatttatccaatgcttctgatctttctttaattggataaatataaccataatgggagtaatcgtctgtgaatgttatgaacgagtcatagccatccacacttttcacaggaaatggaccacaaatatctgtatgaatgatctccaaaattcccgcgcttcgttttgcaccctttttgatgctctttacaaattttcctttaatgcattctatgcattgttctaaatctgagaactccaatggaggaagaatatcactcttaactagtctctcaattctccccctcgaaatatggcctaaacgatagtgccataatttcgatgagacatcaggagttctctttcttttcttgttttcttttgtcaacgaggacacaacattcacattctcagaaagagataacaaataaagctcatcttgcaacacaacaaagaattgggctcaatcccagagtgtgacaccgtctctgagtacctcgaaagaataaagagccagtttactggttcttcaaagacttatgcgacacagctgataaagcagcttgtgacagagaggtaccatgggggtggtgtaagagaccacattcttaggatgagcaacatggcttccaagttgaagccaatggatttgggtatcacagatgactttctggtccatctggttatggcctcattgccaaagcattttgacaactttattgtcaacttcaacataagtctagagaaatggaattttgaaaagctcatcgctaattgtgtgcaagaggaggaaagaatcaaagagtccaatggtggctctattaactatgttaaagataacaagaaaaagagccacaaaccatcccctcaaaagggaaatagcctcagcatctgcctcagcaacaacatttcactgttgaaaaggatcagtgtctccactgcaagaagacatgacattacaagaaagattgtcctgacttcctgaaaatgatcatggcaaagaaaggtgagaacattattacatttgtaaatgaatctcattatgttggttattttagatccacatggtggattgattctggagtaactattcatgcgtgtaattgtttaaagggattccgttcgacgaggactacgcaaagaaacaaaagatccattagagttgccaatggagttgaagcaaaagtagaagctgttggagtctttgcctagagctcccgattggcttcacacttttacttcgagatgttttttatgtaatttaataagtgtatcgaaataggattttgatggatatgattgccattttggaaatggcaaatgtgaactatggtataataatgcatgtattggtcttgctgtgttgcaagatgagctttatttgttatcttttgctgagaatgttaatgttgtgtcctcattgacaaaaggaaacaagaaaagaaagagaactcctgatgtctcatcgaaattatggcactgtcgtttaggccatatttcgagggggagaattatgactagttaagaatgacattcttcctctattggagttctcagatttagaacaatgcatagaatgcattaaaggaaaatttgtgagtggaattggcggcggcagcgaacctcgtatcgtgtgccgccccggcctccacccctgtttatatggcacggggtgacgggggcctaccagccaatgggctgggcgccctcgatcagggcgcgggtcaaggtccccttgtgccgttgggctcaagggggagagagatctatcaaacatccatttgttataatatcatccttgtttcttgttcattctttgactattgtacatgtcttaaaaaaatttactttcctggtttgatttatgtctctggcttgattttgcagcaaagcttgcacgtggaccacctatcaagtcgctagctttccctgactactggtgggagatggactctgtcaatgtgattgcaatcaaggtgaccgagtctgatgtgggttaccctatcagggtatttggcactgtgctggccagggatgagtatgatttcaggtgtgtctatctgttcaggcgtgacaggaacaatccccagatcatcacctcgccggtatgttactgattcgttcctcctccttgctagattaatactatttactgttcaaatccaaatgccattgcctttacaatccgctgtctgatattctacactataaatgacctgttaattaggctcacattgttaagtgaaatgtagacggttgcatagttccataatggctggtgaaacgcctgatacgatagaaatcctgtttcctggacattaaaatccctactgccagatcttaaaccttgctgtcaatatcatatatccaccgaatctgattgcctggtagtccattcctgctgtctaagagggtcaggacagttactgttggaacatcaatcaatccatgacttccccttttttgtgagatttgatttacttaattagtttctatatcccaagatcctggtacttttacctgttatactattttgttaatccagtgcaacggtagtgctctgggatcatgtacgttttgtactggaaaaagtggaaacaaaagaatttatattggcatgttgctcatttgaacgtgggaatttgaaatgcaattcacaggctgtttcatatacctaaaattattatctgtatgtattatgtacccaaatttctcttaacatattgttggcactgtctgaactgtattcgacttatcgagcctggtgtttttggtggcatttttgacatgatttcccctaatctatttacaggaggacacactaactctgacaggacctaatcgagcgctgggtgcaacagacaaaatgtatttcgagttcaatttgaagattagagacgatggcgatgtcgacaaagatttctgcaaaggtgtgcgagaacacaatgccatctgctatacaaagcagccgatgactttatcgctagagagctgcctgagtacaattgattttgtgtatagtcctgttcaattagctgtggaagcttctgttgcagtcaaaattaagggggttgtatccacgtttttcactggcaaagtgactgcttggactactggagatgatcagaacaaaatcatcctgtatgacagtgaagtggaaggcagcaacagagttgttggagctgatggatcagtcgatctgactcgctgtttcgtagccgtcaatttggatgatgaactggtgctcaatgtctgtgtttctgaaggagctggctcaatctttgagctcgttcttggacacaatgatgaagaatgtgtccgtgagcaaggtccctatgaactgcaggtgaatgttgtttggacagctgcctttaagcatcgacagcgcagaaaattgtttgagcgtatcggtgacttccgcgtgttaaggtgatatgatgtagtatgaagatttatatgggggaagttgttacatctcaagcagttctatcttgttatatagatcatattttttgttcagctgagtttaactcgtgcttaactgaaaatctgcctgcaagacttatatgtactggtagactggtagtctattttgccgggtcggccaaaagttggctgaccaatttcattaagattgggaagaaaatacagtgtgaaaggttacaacgacattagtacaatgtcgtggcggctagagaacccggatcatctatcccaccatcttgtgcagttagccagaagatctctaggcgtttctccgtattaattaagctcacatatatcacactaaaaaattgtcaaaaaataaatcagtatatcttgtaaaaattgtaaagctatagatcaatatatgatatatatctttttcacaaatatacaagttaaaattcaatctatataagtagaaacaaaaatatcacatttgtgaactacacattctatttatagttaaatttgtcaattttttctacttgtataagttgaatttgaacatgtatgtttgtgaagtaacatatcacatattaatctatcttactccctccgtcctataatataaaaagttttagggttgtacacggttattaagaaa

SEQ ID NO: 6138 - DNA, 3429 bp, Oryza sativa
ccgttggctcaccttcgttgccgtcgactggtgtttccgcttacacggctgacctattatgcctccattagtgggcatcttcgctttcaccgtcgaccgccttcgtcgccgccgactggtgtcttcattgttattgatggacgactttgttcccacattggccacttctgccatcaccaaggggaatattacaaagctaagtcatcatttattttattctttatatgatatttttccttttcctctgcctcactacaccaattggtcttccattgagtagtgagtcgggggctacagatgttatatcatattttttataatatttatcttgattgcttgcgacataatctgagtacaaaagtacctatcgagttatggagttctatcctcctatgctttccgtttggtttgccaatggatggttgcctttgggccgattcctagcacccgggggctcgttggatggaccgagtaacgcaaggtgctaagtattattcggaataaatcaaaagcatagagacgagataaatttattttctgctcttaataattgcaaaagtacccgagtagtaaattctgatccgtgaaactttgttccattaatgacgaactcatgtcactcatatgcatgtttgggaagtgcctaggccgactcccggtgcttgatggttatgactagtcggacagagtgtttaaacgtacagagtcatctgctcggggaaatcaaaattgacaagaggagaaatacatatttataaatattttaaaatacttgattttttctcaagtattatatttatatcagatactactcatcctatatgtttgttctgcaggatccagatccagatatgcataaaagggattcatggctttaagcttatctcttacgctccaggaatggatcagtcagaacatcaccgaccggccgcctcgcccgccgccgactggtgcttccgcctgcacggctggcctttatgccgccgttgttgggcgtctacgtcttcaccgaccggcttgccttcgccgccgccgactggtgtttccgcctgcacggctggcctttatgccgccgttgttgggcgtctatgtcttcaccgaccggcttgccttcgccgccgccgactggtgtttccgcctgcacggctggcctttatgccgccgttgttgggcgtctacgtcttcgccgaccggccgcctcgtccgccgccgactggtgcttccgcctgcacggctgacttattatgccgccgttgttgggcgtctacgtcttcaccgaccggccgcttcgcccgccgccgactggtgtttccgcctgcacggctagcctattatgctgccgttgttgggcgtctacgtcttcaccgaccggccgcttcgaccgccgtcgactggtgtttccgcctgcacggctagcctattatgctgccgttgttgggcgtctacgtcttcaccgaccggccgccgcatccgccgctgactggtatcaccgcctgcacggctggcctgttataacgccaactgatgctatcttcttcacggctggctacatcgctgtcactactaataggcatcagtatcttcaacacaagctgcctacgtttgccatggctgccgactggtttcttcacttccatggctgcatgattctgccagtgttgattggccttaccatcttcatcgccggtcgtctcgtctgctgctgactagtgccctcgcctctacatctggtttatacagctaccactactgatggacatcatcatcttccgtcgccgactgattatgccgccgccgactggtgcttttatcttcacaactgcgcgtcttcgctaccggtttgcttctgttgccgccgactcgtgttcacttcatcacggcaacacaactttgtcatcatggtggagcgacttcatctttattatcttcggtaccagcaaactctattgctgctacttcacaagttttgctacatcaccaaccatgacgttgttgtgaatctcgacatctcggcaggcgatgccgtgttattttactacaacaagtggctctccaacattcatgatttctacttggacatcttcaacacatatcttaaatcaagcaataactattcgacgacaagatgctacagttctcgactctatgttcagttgtttcccaactaatcaaagagtcgggggctacacaaatacaaggctcaaaatttgacaaattttatgtcaagctgaagaaattaattcatcaaccaacgagtcaactccaggagtcattatcttcatctttgattcagagcagacattctacttcaacaacttgaaatattttggtttggacgagttggacaacaacatcaactctcctccaagtgaagcatctacaatagctataacattaatttgatggactattgtcactgacatcatcaccagcacttctgcttcatcgaccctgacatctctgctgttgctaatggatgattatgttttcgccgacttattatttcaccttcacggttgacctactatgcaaatgctgatgagcgtctttgtcattatcattggttgctacactgctattggctggatcaccgacatcgtcatcttcatcatgtcggttgcgtttgtcgtcgtcaactacacaactttatcgctgagcgccttcatattcattgctggctgatctgactgctgccgactggtttcttcgcctccacggctgtgcaacttcatcacttttgattggtaccactatcttcactaccaccaatatttttgccacctctgctggtcaatattatctctgtatttgtcgtcttgtctctatgccaattgcgtcagctaccatcaatgaacaattgtgactacgtgctcaggggcttactagctcagacacaagtatcataccttcaatttggacttgctctggatatatgcaatatgaattcgtgattatgggtctattttctatgctcaaagactggactatttattattccccgtaagggttatcaactgaatacttgcgccagtcgggattcaattgttacatctattttggagtatcccataagggataatcactcagatcagaagcgattgatatgagctatacttggtctatatcacccgttccaaatttattactcggaagcatgttacatgcgtcatcctttaaagggtgtcgaaggcatattttttggcctaggcctaatatgtctgcagcccatattttcaggtgtggcctgtcacgttcttatagggacttaggcactttttgcttaggccaaagtgcgcgtgatcaagtgcccaataccttaaaatccttttataccgcagttactcaactttttaggagttggtacaatgcatcttaaaaggtgtcaaacagtaaagctttatataactggcccgctgacttttttatata

SEQ ID NO: 6139 - DNA, 2477 bp, Oryza sativa
aaatgggggggcggggaggacgctgtgtcggcgacgcggtgggggaggacggcgatgggcgacgcggtggaggaggtcggcgatggcggcactggggttgacggcgtggtgggggagcgacggcgatggcggcgctggggtcggcggcgtggtgggggagcgacgcggtgggggagcgacggcaatggcggcgctgtatcggcgacgcggtgggggaggacggggatgggcgacggcggtggatgcgatggatgcggccgcggcggtggatgcgatggatgcgggcgctaccccccgatgcgtgaggatgagccgaggagttgggtggggaacgttgcgccgttggatttagcgatccgatggctcgtactccgcgtatctgccagggttggagtcaccgccaccgatacgaaattttaaaatagtagagatatagtaatatttttgacccaaaacaaaaaatattaaaatatatttaatgttacatttaatgaaaccagtttagcgttatagatagtgttattttttttctaaaactttattaaaaataatagatgcttgaaaagaatttaaagtgtcttgcaatacgaaacagtgggaataaataagttggaccgggcatgaatcggcttaatattatcatcaattctctggtgtaaactctcaatcctcttccctcaaggtaccaaacaagccataggcagactttacagcctccacgacacctcgacggcggcacgtggtacaccgtctccaccctcgatctccggccaccggtgcacgctaccggcggcgagctcgtcagctgggaattcgacctccacctctacaaatccacctcccattccaacgggtggatcaccaagcggttatgtctaaaggagttcgtcagagacaaggctatccctctacccaaatccgtcgacaggctgtaccacgagaccggcaagagaccatcgccgtcggcggcgaggccggcaccgtcgcgtttatgatctctctggcgcggcgtcttcctcgtcgacgagctccccgtgctctgggacatcccgctgacggcgccggcgaaggggaattggaataacttcctctaccaattcgatcctactccctccgtttcatactataagactttctagtattgtccacattcatataaatgctaatgaatatgggcaatgctagaaagtcttataatatgaaacggaggaagtagctatttccgcgacgtcaccgtgtctcgaaacagacaagtatgttgagatggaaatctggtcacgaacagagccaatgaataataatcctaccccagtttcttacgtggattgggtgcgcgatctcaataaaccgaagaaattcaaagaaatcgatcgtggatggaaggctacaacatatagcatgccaatgccggtgaattgttcttcttcgtgctgctgtgatgatgattggcagattgactgtgaaatcgatgataattaaacacatcagcttaagcgacagctgtcgttctaatctgagctgcagcgacgacgacgaaaacagagagacaattgaaacaatattcaaaaaacttccaattggaaaccccaccataattaagcatggatgaagatgtgattttcttgctttctataactagccccatgaaaacggataggttggaagttgtgtttgctgttgatgtgaggaagggcatgcttcaaggattagcaaagcttgatgttcgaccgaagaacttggctatcatggtcaccttatgcaccagcgagatttgcaggtatctagcctgatgaatattattacaggtaacttaattctctacgctggtaattaactttattgtgtgtttttatgcgtgatcaatatgtgtgattatgaatgccatgcttgccaattaagatctagggaattattgtgttggtaattttctggtttcagtagggtctagagcttaattcagaagccatggcttgatgacagtgttatgccacaaaaagattgtatctgtctcgaagtacaccaatccgttacattctgtttgcccccttaattaacaatcctcttttgttggctacattgttcttaattagtgagacagtctgatgtgcagatgcacaataatgttctctcatttgaagaaaagaacaataatgcacaataatgctactttactcgcttggatccattttagttgagttgtatttactatttatgcaaacccaactttgatggtaaaatacctaaaattattatatgtacgtagtatgtgccccctccagttataaatatttaatgcagttgattttgatcataaagcttgatcatttatcatatttaaaagtttagtgtaaaaatatgcaaaaatatcatgtttaaagtacctttaacaataaaataagtcataaaaaaattagtgtactttttttaataagacaaattatcaaattttgttgtcaaagtcaactgcggtatgacca

SEQ ID NO: 6140 - DNA, 3884 bp, Oryza sativa
aaccatgccgtgtgggtatggggtacccataatctccacagtagcccctgagaccttcacagtcggaaagataaccttctctcgaactagattactccaaagtcgagtgcttcaatcatcttcgccatgatctcccgagtacttttaccaaatctgaagactgtggagggctgaaaaatatagtcaggtgtatcgactagatgcacctaataggtgtaacccccgactatgtggttaatcgaacaaaccaaacatatagtcaaggaatagataatccaaccaaccgagtggttttgataattatagtcaaccaagcgacttaatatcaatatatagcatatgcggtgtgaatcctccaaattacatgatccgagtgatataccaactgctttgtaaaatatgatgagtgatatagcaaaatagctataaagaagcttgtatattgtgaataaagaaatttccaaagtattgggcatacgccatgcgcacactgctttaacagatgtgcttaagtccctagaagacacatggtttcaccacacctggaaatatatggcatatgtggtgtaaaatccgaataaataaactcataaaggatttaccaaccgcctagaaaatgaccacaatatataatcagcctaagccataatattggtcaataaaaatgcacacttacgtggcaaaaagcaatgatattgtatccaatcaattgcttaaaaacccaaacagcaccttgacttatatataaaaaagtcagcgggacagctatataaagctttactgtttgacaccttttaagatgcattgtaccaactcctaaaaagttaagtaactgcggtataaaaggattttaaggtattgggcacttgatcacgcgcactttggcctaagcaaaaagtgcctaagtccctaaaagaacgtgacaggccacacctgaaaatatgggctgcagacatattaggcctaggccaaaaaatatgccttcgacaccctttaaaggatgacgcatgtgacatgctcccgagtaacaaatcttctgggtaatatagaccaagtgtagctcatatgaatagcttctgatctgaatgactatcccttatgggatactccaaaataaatataataattgaatcccgactggcgcaagtattcagttgatagcctttacggggaataataattggtccagtctttgagcatagaagatagactcatgactatgaatccatgtggaatgtatccggaacaagtcccaattggagatataatcctcacgcttgagttgatgagcccctgagcatatagtttgtccttctgtcatagtcaaaattgtctattggcaatagctgacgcagtcggcatggagatgaaatgaccaacatgaagacgaaattgctcatcagaagtaacggaagatgtcagtggtagtaaaaaacagtgacaccaatcaaaggtaatgaagttgcataaccatggaggcgaagaaacagtcggtgatgacaaaagcaaaccgacgatgaagacgtagacgcgcatcaacagtgatggcgaaatccaccaatcatgaagatgaagaaaatagttgacgacgacaaacgcaaccgacatgatgaagatgacgatgtcggtgatccagccaatagcagtgtagcaaccaatgataatgacaaagacgctcatcagcatttgcatagtaggtcaaccgtcaaggtgaaataataagtcggcgaaaacataatcatccattagcaacagcagagatgtcagggtcgatgaagcagaggtgctggtgatgatgtcagtgacaataatccatcaaattggtgttatagctgttgcagatgcttcacttggaggaaagtagatgatgttgtccaactcgtcgaaactgagctgattggttgataactctgctctaaagcaaagacgaagataatgactcctggaattgactcgttggctgattaattgattgcttcatcttgtcgaattttgagagtcttgtatttgtgtagcccccgactctttggttagttgggaaacaactgaacatagagtcgagaattatagcttcttgtcgtcgagtaatcattgcttgattgaagatatgtgttgaagatgtccaagtagaaatccggtagtgaagacgcgcagttgtgaagataaaagcaccagtcggcggcggcataatcagtcggcgacggaagatgatgatgtccatcagtagtggtagctgtataaaccagatgtagaggcgagggcactagtcagcagcagacgagacgaccggcgatgaagatggtaaggccaatcaacactggcagaatcatgcagccatggaagtgaagaaaccagtcggcagccatggcaaacgtaggcagcttgtgttgaagatactgatgcctattagtagtgacagcgatgtagccagccgtgaagaagatagcatcagttggcgttataacaggccagccgtgcaggcggtgacaccagtcagcggcggatgcggcggccggtcggtgaagtcgtagacgcccaacagcggcggcataataggccagccgtgtaggcggaggcaccactcggcggcgacggaggcaggccggcggtgaagtcgtagacgcccaacagcggcggcataataggccagccgtgtaggcggaggcaccaatcggcggcgacggaggcaggccggcggtgaagtcgtagacgcccaacagcggcggcataataggccagccgtgtaggcggaggcaccactcggcggcgacggaggcaggccggcggtgaagtcgtagacgcccaacagcggcggcataataggccagccgtgtaggcggaggcaccactcggcggcgacggaggcaggccggcggtgaagtcgtagacgcccaacagcggcggcataataggccagccgtgtaggcggaggcaccaatcggcggcgacggaggcaggccggcggtgaagtcgtagacgcccaacagcggcggcataataggccagccgtgtaggcggaggcaccactcggcggcgacggaggcaggccggcggtgaagtcgtagacgcccaacagcggcggcataataggccagccgtgtaggcggaggcaccactcggcggcgacggaggcaggccggcggtgaagtcgtagacgcccaacagcggcggcataataggccagccgtgtaggcggaggcaccactcggcggcgacggaggcaggccggtggtgaagtcgacgatgcccatcaacggtggtgtgaccaaccgaccgtataggcggggacaccagtcggcggcgacggaggcaggccggtggtgaagtcgtagacgcccaacagcggcggcataataggccagccgtgtaggcggaggcaccaatcggcggcgacggaggcaggccggcggtgaagtcgtagacgctcaacagcggcggcctaataggccagccgtgtaggcggcggcaccactcggcggcgacggaggcaggccggcggtgaagtcgtagacgcccaacagcggcggcataataggccagccgtgtaggcggaggcaccactcggcggcgacggaggcaggccggcggtgaagtcgtagacgcccaacagcggcggcataataggccagccgtgtaggcggaggcaccaatcggcggcgacggaggcaggccggcggtgaagtcgcagacgcccaacagcggcggcataataggccagccgtgtaggcggaggcaccactcggcggcgacggaggcaggccggcggtgaagtcgtagacgcccaacagcggcggcataataggccagccgtgtagcggaggcacaccaggcatgcacggaggcaggccggcggtgaggggatcctctagagtcgacctgcaggc

SEQ ID NO: 6141 - DNA, 9246 bp, Oryza sativa
ggggttaggccacgtgggtgatcgtgtctgcctcaagtctctaagtcatgatactcccggtcccatgtcaccgacagaatatatatcaaatcagtaattaaatatattttcataataaatttgtcttgggttgaaaatattattacttttttttataaatttggtcaaataaacttaaaacagtttgactttaacctaagtcaaaacatcctataacttgaaacggagggagtactcctactccactaatatactccttacgtcctaaaatataagcattaagatctcggcatgatcttcaagatgcttatgcttctttgaccaacaatatctacaaaagtaaaatgttttaaataaagagagttcatattatgatagttcgtttaatgataaatatgataacatcaaatttacatgattaatctttttaattttttttattaatagttaaaattttaaaagtttgatttataccatactaaaaatacttatattttggaacgaggacgggggagtacgcacttgatggagctgtacgtgcttcgagcggctatgaagacgtaatattatttgctccgatcttaaataacaaatattaaataagatatcattaaactcttgaaacattaactactacttttcatataatgaaaggttaatatagtgatactacttacgttttaaggtaaaatatacgtatgtaattatttttgtcaactatgaatttgagaagttactgccgatcaacgttttaaattttgaacaaattttgtcctaaacttaaatatttataaacaaagggagtatatttaattaaaagataagtccatttgatcctaattactacacttgtctaaaatacacctttcaactttaaaaccgataccccttctcgtcaaatttcaaaaccatttattttattccctcaattaaatcctgatgtttcttttgagaggcactcaagtcgggttccactgagcgatttattttttcttaaaaagaatgtgtgcctcacatggacagaaaccggctagcgcctagcctctctttctctccgacctgtatgtaccattgaaaaagttcactttgactctcttttaacttgatcaaatctgattcatatccattaaccataaaactggatatgacgacttctctaactattgaaaccgtcaaaaacgatgggaggccacttcgctgttggcgctggtgcggaaagggctgggatgggagagagagagaggagaaccacttcaccgctccccgtcatcatcctgacaccctgttgcgcttacgccgagaagaagaaagagggagagagggggagagagagaagagggagagaggttactagagagaagggatgacaggtacaagaaaacaccatatttatatggacttagtgcttctttaatcatttgtatttagaattttttgttagttagtgtttattattatgtttatatatggtaaaatggtaaatttgaaattataaaggtgaaataaacatgttaaggagtcagctcgtgagccaagcctagttaggcttttagctcattaaggttaatgaggtgaggttgttactgttatagataagacatacctaatatttttatgttagacttagcaggacccaccgtatattaagtcttgtacagaatcaagcctcacacatgtaagatgttttaaataaggaaagagaagcagagtcctacttaggcatgacaaggactactcggatcgtacttggcaccctagttatgattggacaaggggacacctaatgatataaatacaaaacgccacaggtgaagaggagagatgtgaagacatgccaatacagatttagacaattcaaggaaagcctagacaaacctaatatggagtcatagaggtcaacgagagggatctaggcgacctccaatctcaccaagttcatattcgaggaagcgtactatactagctgtcgaccacatgtgagagctctatgccgctaagctgaccaagactagattagattatcccaaatttagtactcgtgtgatactgatatatataaaggcaacactgacttcagccaataggaatagggctattaggggacccgaacctatataaaaacttgtccatatcggacacgacttaaactttacaaaaataaacacaccagcccattacgaactctaacatagatttctaaaactcataaaagaaaactgactcttatcctaattaatagatacgattgtctaaaacaaactccttgtttggcaatatctttaaatccttgatccgagctcgacttatagtcggaaactgtctgtatctgctatcttttccatatcggctaaccgagtctaattttgtatcgatcgatacggctctcagccgatgcgctgcattggccttggaaaccaaattaactccttcaaatccgctgttaacaggaggctgcgcgaggagatgggaggtgcgcagagaggagcggcggcggtcggtagggatatgtgccggcgaccacgccccacctgccaggatcatccaccgcgctggcgtcgcgccctccatgctgccaccactcctccactccatcgagcagcagtggaggcacgagaggaatacaagtgtcgaaacatgatttcggcaataataaaacggggtagcgcacgagacctaaaagtggatggatgcagagacaaaggatttagacaggttcaggccctctcaatgagaggtaataccctactcctgtttggggatttgaatccgccgggtgtagtatagatctgacgatcagtttgtctcatatgccccctagagggcctcctgcccaccttatataggatggggggcaggattacaagatagaaaccttaaccaatacggtatcggtttcctaaatctactttacaatattatcaaaccaggactttaggccgttccgtaatatacaaggaaacgtaacacccaagtcatgatctgttacatattccatagatataagttatcccctatgactagtcggataaccatgccgtatgggtatggggtacccataatatccacagtagcccctgagaccttcgtagtcgaaaagataatcttctctcgaatcagattactccaaagccgagtgcttcaatcatctttgtcatggtctcccgagtacttttaccaaatctgaagactgtggagggctggaaaataaagtcaggtgcaccgactagatgcacctaataggtgtagcccccgacaatgtggttaattgaacaaaccaagcatatagtcaaggaataaataatccaaccaaccgagtggttttgataatcgtaatcaaccaagtgacttgatatcaatatatagcatatgcggtgtgaaccctccaaataacatgatccgagtgatataccaactgctttgtaaaatatgatgagtgatatagcaaaatagctataaagaagcttgtatattgtgaataaagaaatttccaaagtattgggcatacgccatgcgcacactgctttaacagatgtgcttaagtccctagaagacacatggtttcaccacacctggaaatatatggcatatgtggtgtaaaatccgagtaaataaactcataaaggatttaccaaccgcctagaaaaagaccacaatatatagtcagcctaagccataatattggtcaataaaaatgcacacttacgtggcaaaaagcaatgatattgtatccaatcaattgcttaaaaacccaaacagcaccatgactatataaaaaagtcagcgggccagctatataaagctttactgtttgacaccttttaagatgcattgtaccaactcctaaaaagttgagtaactgcggtataaaaggattttaaggtattgggcacttgatcacgcgcactttggcctaagcaaaaagtgcctaagtccctataagaacgtgacaggccacacctgaaaatatgggctgcagacatattaggcctaggccaaaaaatatgccttcgacaccctttaaaggatgacgcatgtaacatgcttccgagtaataaatttggaacgggtgatatagaccaagtatagctcatatcaatcgcttctgatctgagtgattatcccttatgggatactccaaaatagatgtaacaattgaatcccgactggcgcaagtattcagttgataacccttacggggaataataaatagtccagtctttgagcatagaaaatagacccataatcacgaattcatattgcatatatccagagcaagtccaaattgaaggtatgatacttgtgtctgagctagtaagcccctgagcacgtagtcacaattgttcattgatggtagctgacgcaattggcatagagacaagacgacaaatacagagataatattgaccagcagaggtggcaaaaatattggtggtagtgaagatagtggtaccaatcaaaagtgatgaagttgcacagccgtggaggcgaagaaaccagtcggcagcagtcagatcagccagcaatgaatatgaaggcgctcagcgataaagttgtgtagttgacgacgacaaacgcaaccgacatgatgaagatgacgatgtcggtgatccagccaatagcagtgtagcaaccaatgataatgacaaagacgctcatcagcatttgcatagtaggtcaaccgtgaaggtgaaataataagtcggcgaaaacataatcatccattagcaacagcagagatgtcagggtcgatgaagcagaagtgctggtgatgatgtcagtgacaatagtccatcaaattaatgttatagctattgtagatgcttcacttggaggagagttgatgttgttgtccaactcgtccaaaccaaaatatttcaagttgttgaagtagaatgtctgctctgaatcaaagatgaagataatgactcctggagttgactcgttggttgatgaattaatttcttcagcttgacataaaatttgtcaaattttgagccttgtatttgtgtagcccccgactctttgattagttgggaaacaactgaacatagagtcgagaactgtagcatcttgtcgtcgaatagttattgcttgatttaagatatgtgttgaagatgtccaagtagaaatcatgaatgttggagagccacttgttgtagtaaaataacacggcatcgcctgccgagatgtcgagattcacaacaacgtcatggttggtgatgtagcaaaacttgtgaagtagcagcaatagagtttgctggtaccgaagataataaagatgaagtcgctccaccatgatgacaaagttgtgttgccgtgatgaagtgaacacgagtcggcggcaacagaagcaaaccggtagcgaagacgcgcagttgtgaagataaaagcaccagtcggcggcggcataatcagtcggcgacggaagatgatgatgtccatcagtagtggtagctgtataaaccagatgtagaggcgaggacactagtcagcagcagacgagacgaccagcgatgaagatggtaaggccaatcaacactggcagaatcatgcagccatggaagtgaagaaaccagtcggcagccatggcaaacgtaggcagcttgtgttgaagatactgatgcctattagtagtgacagcgatgtagccagccgtgaagaagatagcatcagttggcgttagaacaggccagccgtgcaggcggtgataccagtcagcggcggatgcggcggccggtcggtgaagacgtagacgcccaacaacggcagcataataggctagccgtgcaggcggaaacaccagtcgacggcgggcgaggcggccggtcggtgaagacgtagacgcccaacaacggcagcataataggccagccgtgcaggcggaaacaccagtcggcggcgggcgaggcggccggtcggtgaagacgtagacgcccaacaacggcggcataataggccagccgtgcaggcggaaacaccagtcggcggcgggcgaggcggccggtcggtgaagacgtagacgcccaacaacggcggcataataggccagccgtgcaggcggagacaccagtcggcggcgggcgaggcggccggtcggtgaagacgtagacgcccaacaacggcggcataataggccagccgtgcaggcggaaacaccagtcggcggcgggcgaggcaagccggtcggtgaagacgtagacgcccaacaacggcagcataataggccagccgtgcaggcggagacaccagtcggcggcgggcgaggcggccggtcggtgaagacgtagacgcccaacaacggcggcataataggccagccgtgcaggcggaagcaccagtcggcggcggcgaaggcaagccggtcggtgaagacgtagacgcccaacaacggcggcataaaggccagccgtgcaggcggaaacaccagtcggcggcggcaaaggcaagccggtcggtgaagacgtagacgcccaacaacggcggcataaaggccagccatgcaggcggaaacaccattcggcggcggcgaaggcaagccggtcggtgaagacgtagacgcccaacaacggcggcataaaggccagccgtgcaggcggaagcaccagtcggcggcgggcgaggcggccggtcggtgatgttctgactgatccattcctggagcgtaagagataagcttaaagccatgaatcccttttatgcatatctggatctggatcctgcagaacaaacatataggatgagtagtatctgatataaatataatacttgagaaaaaatcaagtattttaaaatatttataaatatgtatttctcctcttgtcaattttgatttccccgagcagatgactctgtacatttaaacactctgtccgactagtcatagcccacaagcatcgggagtcggcctaggcatttcccaaacatgcatatgagtgatatgagttcgtcattaatggaacaaagtttcacggatcagaatttactactcgggtacttttgcaattattaagagcagaaaataaatttatctcgtctctatgcttttgatttattccgaataatacttagcaccttgcgttactcggtccatcgaacgagcccccgggtgctaggaatcggcccaaaggcaaccatccaatggcaaaccaaacggaaagcataggaagatagaactccataactcgataggtacttttgtactcagattatgtcgcaagcaatcaagataaatattataaaaaatatgatataacatctatagccctcgactcactactcaatggaagaccaattggtgtagtgaggcagaggaaaaggaaaaatatcatataaagaataaaataaatgatgacttagctttgtaatattccccttggtgatggcagaagtgaccaatgtgggaacaaagtcgtccatcaataacaatgaagacaccagtcggcggcgacggaggcaggccggcggtgaagtcgtagacgcccaacagcggcggcataataggccagccgtgtaggcggaggcaccactcggcggcgacggaggcaggccggcggtgaagtcgtagacgcccaacagcggcggcataataggccagccgtgtaggcggaggcaccactcggcggcgacggaggcaagccggcggtgaagtcgtagacgcccaacagcggcggcataataggccagccgtgtaggcggaggcaccactcggcggcgacggaggcaagccggcggtgaagtcgtagacgcccaacagcggcggcataataggccagccgtgtaggcggaggcaccactcggcggcgacggaggcaggccggcggtgaagtcgtagacgcccaacagcggcggcataataggccagccgtgcaggcggaaacaccagtcggcggcggacgagacggccggtcggtgaagatgtagacgcccaacaacggtggtgtgaccaaccaaccatataggcgaagacaccagtcggcggcgacggaggcaggccggcggtgaagtcgtagacgcccaacaacggtggtgtgaccaaccaaccatataggcaaagacaccagtcggcggcgacggaggcaggccggcggtgaagtcgtagacgcccaacagcggcggcataataggccagccgtgtaggcggaggcaccaatcggcggcgacggaggcaggccggcggtgaagtcgtagacgcccaacagcggcggcataacaggccagccgtgtaggcggaggcaccaatcggcggcgacggaggcaggccggcggcgtgaagtcgtagacgcccaacagcggcggcataataggccagccgtgtaggcggaggcaccactcggcggcgacggaggcaggccggcggtgaagtcgtagacgcccaacagcggcggcataatagaccagccgtgtaggcggaggcaccaatcggcggcgacggaggcaagccagtggtgaagacgatgtcgctatcggcaacggcggcggcacacaccaaccgtggcagcgaggccgcaagcagtgaatgattgtttgatctcgactgccatccaatgcatgcgaacaaccatcgctccagcatacatgtagattaaatcgacgtatacacgtgcttgctcctggtggccgagtatattcctgtgtcctgtgccaatctagcagcacgtccatctgcatggaagggaagagaggagcactcggacacggcaagaggcacccgagtggccgagtaggcgacgatggcggccgtgtcgtgatctcaaccagcatgtgaaaaacaacaaaaattgccaggaaatcaaaacggccggcggggattagggattaattaataatcaatctaataaaaattaaattggaacagccaacccaagttgtacggcgtggcttggatacgtcgtgcgcgtcgatcagcttgggtcgcaatgcctcgatcagcagtagccggcggaagccatcaacggccctgcgacctcggagagtcggcagcatgtagatgaccgaccggggcagctgtaaagcctaatgataacagctcggaggcgaccgactacggagacggtggagccggtcggcgctgacggatatagccggcagtagatacggccggcggtgtacatgcaagacagatagcaacaaaataattgctggttagaatcaactagtaaacagattaactctgtagatgtaatgtgcatggtggttggatcgtgcatgtatgttgatcagttgaatcaactcatgcagtgttttctc

SEQ ID NO: 6142 - DNA, 13916 bp, Oryza sativa
  unsure (1)..(13916): unsure at all n locations
acgcccaacagcggggggataataggccacccgtgtaggcggaggcaccaatcggcgttgatggaggcagtccggcggtgaagtcgcacacgcccaacagcggcggcataataggccagccgtgtaggcggaggcaccactcggcggcgacggaggcaggccggcggtgaagttgtagacgcccaacagcggcggcataataggccagccgtgtaggcggaggcaccactcggcggcgacggaggcaggccggcggtgaagtcgtagacgcccaacagcggcggcataataggccagccgtgtaggcggaggcaccactcggcggcgacggaggcaggccggtggtgaagtcgacgatgcccatcaacggtggtgtgaccaaccgaccgtataggcggggacaccagtcggcggcgacggaggcaggccggtggtgaagtcgtagacgcccaacagcggcggcataataggccagccgtgtaggcggaggcaccaatcggcggcgacggaggcaggccggcggtgaagtcgtagacgcccaacagcggcggcataataggccagccgtgtaggcggcggcaccaatcggcggcgacggaggcaggccggcggtgaagtcgtagacgcccaacagcggcggcataataggccagccgtgtaggcggaggcaccaatcggcggcgacggaggcaggccggcggtgaagtcgcagacgcccaacagcggcggcataataggccagccgtgtaggcggaggcaccactcggcggcgacggaggcaggccggcggtgaagtcgtagacgcccaacagcggcggcataataggccagccgtgtaggcggaggcaccactcggcgacgacggaggcaagccggcggtgaagtcgtagacgcccaacagcggcggcataataggccagccgtgtaggcggaggcaccaatcggcggcgacggaggcaggccggcggtgaagatgacgatgcccatcaacggtggtgtgaccaaccgaccgtataggcggggacaccagtcggcggcgacggaggcaggtcggtggtgaagtcgtagacgcccaacagcggcggcttaataggccagccatgtagacggaaacaccagtcggcaagagtagtgccgcggcgttacatgcaaacagcagaaaataccaagagagattaatctgacatttagagatcaatctaataaacaacaataagttgaaaaggaaaaaacccggcgaagtcggagattaaaaggaaaaaactcgccgagattgatctcttcgactgactccgagacggagcggaggaggcggaggtcgcagtcgcgggcggcgttggtgtccatcagcacgacgcaggacggcaggaaggcatcggcgtggctgcagccgtctcctatgcatccgattagatcggttttggcatgcttcgtgtttgtagatccatcttgcaacaccatggcatcctcgttgggtagattggaccagtaggcttggtggtggacgaggacgaccatcaaatccgtcgagctgtcgttgccccgtcgttgccgtcgtgctgatgcgaacaagatcaggcagagaatagcagcgacgattcgtcttgttgaagtcgtcggcggcgaggaatcaaggagctcccaaagcgaagacgaagccggcgactcataaagtttattccatcgcactcgtcgtcaggaaactcggcgtttacccctacctggcgcgccaactgtcgaaacatgatttcggcaataataaaacggggtagcgcacgagacctaaaagtggatggatgcagagacaaaggatttagacaggttcaggccctctcaatgagaggtaataccctactcctgtttggggatttgaatccgccgggtgtagtatagatctgacgatcaggttgtctcatatgccccctagagggcctcctgcccaccttatataggatggggggcaggattacaagatagaaaccttaaccaatacggtatcggtttcctaaatctactttacaatattatcaaaccaggactttaggccgttccgtaatatacaaggaaacgtaacacccaagtcatgatctgttacatattccatagatataagttatcccctatgactagtcggataaccatgccgtatgggtatggggtacccataatatccacaacaagggaggacggcctcacctggcacgtccagcacggcctcgacgcggcggcggtggtggctaggtcacctcctccacactgtccaggtcgaagaacctagactcagcgttgtccacagggccggcgttgttgtcgtcatcctccgccgccttatcccttgcccgtgccgctgttgacgcaaaaaacacacactggcctgggagatctgcttagttccagtgcatatccaaaggacgatgagatgcgggtctgccagtcagtttgactctgcaactgacaaaatatacaaatagcatatcaatgagccgatcggctgacaagccgatggagtaattctagcccatgcctatgtcagccgatagcgatagggttttgagctatcgactatatatccaatgtagaatctgacacttgatgtaaacaacaatataaaggcaatcggttgatgataatataatatagcaataatatagtccagtagaaaccattcggctaataatgatatggtaaataagcatcgatccgaaggttaaagcatacatcggctggaggtccgatagcattaaatccacaagattagataatcagtaaaatctttgttgccatcggctaaatccaatatgtatgcaatccttgtaagctgatgcaacgtctagataactcattggctgaaaccccgatgaaacacttattggcagtcaaaaagcaggctagggattatggttttaaacacgacttagtagatcaaacttaacttatgcagcactaagtatgaatagaaacataatatctagacaatcaagcctttgactaatttttgggtggtagatgtcttagctaatctaatctagtaaaacaatttagccggtaccgacaggaaccctaaagcgagaaacaactgatagagctaaattgagatactaagactagattaactaagacatatgataaataggcagacaaatatatcatccaaaccggagcaatccaagaggtcgaacgtactgatgcagtcttgaacgacgccgacgtagactagacaattgcctgggccggcgaaacattggacttgccccttcgccggagatcgaaaaccgatgcagccctgtgtcaggtgccaagttccgccagatggtaaataaagtagaaaagtataaatgtgtggcgatgcgccgaattgtattgattgtgagatattttacaatgaccccgggtgtacatatttatacccatggggagatactagtcattgtaggacaagaaagaaactttcttaaagataaaaggaaaatataaagtccttataggacactaaacacactttcctaaagataaaaggaaactaacaaattattcctaattaatagataacttgctatgccgcatcattcttgaactcggtcacttttagataaatagatcaatttccttaaccgaatatagcaggaatccgactattggcgatgcgataattctcctaggggcttaccaaatttcaccgttaatagccgcaaccgccgcatgctggagctatgcgtggagcgccaccacggtggactggtcggcaagcgccttcgcctgccacgccaccgcctccgcccttagctgcacgacacactccaactcggtgccgtgccgcgtgacattcaaggcctccgcctccttctccctcattcggcgtgcctccgctcctctcctgcgcgccacccatctccttgccggcctctccaccccgcctctttcgagaaccctcccccacctttgactcctacgacgaggatgcgcggtatggagtaggaggtggaggggacgaggagctcgctcgccgctgcccctttgctccgcccatcgcccaccccgctcgtcgcttgctctggccttctccttgcaaggaaaagagaggatagagagaagcagagagtagcgaggatgacatgtgaggccacatgggcctcaccattgtttttattgttttgtgtgtgtaactaatatgtgggcccatgatttttttatttttctggatcaaattgtcacgtaagtgtcacgtcaatgctatataggatgaaaaccttgttaaaagatctatgtaggttccatattagccaagcccgggtcaatactactgagggatctcatttgcatggctttgtaagttaaggatgtgttgtatctggttttctggattgtttgcatgattttgtaattgtgttgtatccggttttccggattgaggacgaaaatgcgataaatggagggacctattgtgaacttattcggcctccaaaactagaaagccgtaacgtgccaaacgggcccaggaaaggaaggagggtatgcctttagagaatctggcctgtccgagagagacggaatagcccatctgacatctttgccaaaccctaaccgcctctggctcggcggcggcggcggcggctcgtccccgaagagcagccggagttggagaggatcggtgttcccgctacggtatgtacgctctctcacgccaatcaatcctctatattcggatgcaattcccaatgcaattgtgaacgttcagaatttttagattaccctcagtcttatatcatctcatctggcagcggcggcaaagatcgatggtggacacggatgagcggtggcgcgctgcggtgattggcggtggtggagatgctgctactgcgacggagcctagtctgcccgccgcgataacgcggcgtctgcgggagctcgcatgggaggacaaggacaaggagaaggctcgcacggtcgttgatctagtcgactccgaaacccctatcgaatgcgatcacgaagagggtcatctttgccctagtccctgctccgacattccttctagtaagtatttacctcaggaaatatccctctccgtttgttcattgttttgccggatacatgatttttttttttcaaaattccctagtggttgcagctagcggtggtggtggtggcaatgaagagatgggcaaggtgaattgtaatgagaagcacacatatggtgaggagaaggagaaggagaaggagaaggtggtggagactaagtcggagctgaagcctaaaccgaggaggaagaattgggaggaggaggagctcacatgggaggagaaggtgttgaaggttcttcacatggttcgtatatgggaggtgactgaattcgaccccaagatggagtggtttgagcctacccgcctttgcctcttcaacaccgccttcttcgacctcgacaaagagtgtgagtacatgcattcaccatgcatcaatcccttaacctcaattccttgtatatgatctaattcaacttaacattcgtatgcggcctctctatccattcatcacatttgttgatggatttattttagtgtgtaaaaaccatacatattcttttgtctgattgaagtctcatgtctctgattttacagctaaggctgggcttgggccaccgattcactcgctcacttcctctgattatcgccatttggagacctccatgaatatcatttcaatcaaggttgtcgaatctgacgtgggttaccctatcagcatcttcggcaccgtgttagcgagagatcagtatgactataggtgtgtgtatttgttcaggcgtagcagggacgatccccagatcatcacctcaccggtttgtattcgattcgtcctccctcttactacactgccattcactactcaatagcatatttccttatttttatgagattagactgtttctgtcaatatgttctggttttaagttttaccgggatggaataatggaaaccatctacgtggtcaaaacaaccgtataaaagttcagggaggtgatgttatagaaccatgtaaaatttaggatcaaactcaatccgttttgtgagatatgaaattgagaaaccaggaaaaaataagtccttttcttgctgtttgcctgtttcatatctcacaaactagattgggtttttttcttgaacttttacatagttgcataatatcacctcacccacacatgagataattttcagtattattggaaatatcaaatgtttatcaagtggtttgcacgtctgcacatattttctcttgctttaacctgttataaacactgtaagaacaaatcggcttggctacataccaccaaaagattcatcaattcatctcagaaaatgcatttcactctgttatattctttttttcttgcacattaaatcgtgtaaatgaacagttggtcctcaatgtactagtgagcaagtttgattcacacatacacttaatgttttatctcattttgtgaaaatagaaatgaggcatataatgtgattaacagggcatgatggaagttgacagtgctaaattatcaagtcttggatcttctaatgacattaactgaattctcataagttgcttatgattaaattgcatgatctagagaagtatatctttgtcatttaatcggtccatactgcccataaaatgcatgagttggctttcatttttgtttgatcttttagttagactatgtcttattttagtctaacaagcacacatacatgagagaccgaccaatttatagaaattgggttggtgtcagactcaccaccaccgaaggttttggtgagcaactgttttggttgtaaacacttaaatatcaaattgttggtatcttctcaagtttctgttgaacctggtcttgacatcatctgaattatgcttgattactgagcttggttccttttatgtaattttgttatgttatttccctaaatccctttgcaggaggacatgctaactttgacaggcccaaagcgaggtcttggtgcaaaagattatatgtttttcgagttcaatttaaagatgaagggcgatgatggagttgacaaagattttagcaaaggtttgctgccatacaatgtcgtctgtcgaacagggagactcgagactttacatctcaggagctggctaagtgtagtggaatttgcattcgtgactgttcaatatgccgttgaagctacccttgcggtgaaaatgttagggggggcatctgttttcactggtagagtgactgcttggactactggaaatgatgaagatgaaatagttctctatgacagtgaagttgcagacactcggacagagattacagctgatggatctgttcagctaaatcgtggtttagtagttgtcccattggataaggagctggtgctcaatatttgtgtgtttgagggtgaagatgaagctcaaagctttgagttcattctagggcactatgatgaagaatttacctgcaagcaaggctgttatgagtttcaagttaatattatttggacggcagtaaagactcggcgacggcccaatatgtggaagcgcattggttgcattgtactgttactttgaaggctgtaaaaagggtgcacttatcagagtcatatatgatcggtgcactcaaaacatatctatctatccataaaatttcctaagaatattctcttagatatgtattgctagtctcagtctgtaaatgatgatcacgcttatcttaattagacacatgcatgcgtggtattccctccgtttcaggttataagacgttttaactttggtcgaagtcaaactgctttaaatttggtcaagcttgtagaaaaaaaatagtgacattttcaactcaagataaatttattataaaaatgtattcaattattgattcgatgaaactaatttagtattataaatattattatatttatttataaacctagttaaacttgaaataatttgactttgaccatagtcaaaacgtcttatgacctaaaacagagagattaatatctgagatgcagtgacagttgccaccctcctgccctgaacctaatccagcggccatacaattgctacgtcgtctctcgagtcaagaagttcaccataggaactggatggcattgcgcacgctctctatctaagcctgtttttttttaactacttcactgcagagtatatatttttgttataaaaagaaatcttatattagattgcttaaactaattgttttcagcatggcagacaggtcaaagcctgctgccctctgaagttttcgtttgccatcccaacacaaaaagcgaactcatgcaatttgaatcagatttgataaggaagttaaagtgaactttttatttttaaattttacaaataaactctctcaaaaacttatttccacgaacttttggtcacgccagacagactatcttaacccaacgtggcaatattgtttcaccacgccatcttaactggggtgccaaaacaaaatgctgttttaccacgttagacggggtttggcgtagtgaaaaagatttattttttggaaacaaattttacgagagtttattttaaaaattaaaaaaatcaaaaaatcaaaaaatgataacaaattgtctcacgagtgatccgatccaaccaagtagtttagtccgttatgttcttccgccacatcacaataattatattaccctagttttcctttccctctctctgcgggcggcggccacatctccctggtacgcgcgcgcacatcgatcccctctttttttttttttttgacgctgcatcgatcccctcttcttccgaattcgatgcaatcgcctcttcttctttttttgttcatttatctccatcatatcgcgcatcagcagcaacgctcgcagatggcggagggcggcaacgacggttcggttgcgggggatcggctcatggttgcaacaatcaagcgcaagcgggagcttgccgaagaagatggagattcttcttccccttgtagcgctaatcgatccctcgacatggaggtagtggaggagaaattgtattgctcttatggtgagtactagtgtacattattattattccataattaattcgtcaatatatctatcattcagataactcagacattacaattagtatatgtgtattgattatgtgagcagcctgatatatatgtatagtttaccctgtttgattcctgattacttgcttggttgctgctggatggatgtaacatatataagataataagaattacaaattataagataaacacatcaccttgagcgcgcggcacatgtcgttctaacctgagctgcagcgacgacgacgacagagagacaattgaaacaatgttcaaggaacttccaattggaaaccccaccataagcatggatgaggatgtggtttacttgctctctataactagccccatgaaaacggataggttagaagttgtgtttgctgtcccccgcaaaaaaaaaaaaaaagaagaagttgtgtttgctgttgatgtgaggaagggtatgcttcaaggattagctaagcttgatgttcgcccgaagaacttggctatcatggtcactttatggaccagtgagatttgtaggtatctagtctgaggaatattattacaggtaacttaattctctacgctggtaattaactttattgtgtgtttttatgcgtgatcaatatgtgtgagtatgaatgccatgcttgccatttttaagatctagggaattgttgtgttggtaattttctggtttcagtagggtctagagcttaattcagaagccatggcttgatgacagtgttatgccacaaaaagattgaatccatctcaaaatacaccaatccgttacaaaaagattgaatcttgttggctacattgttcttgattagtgagacagtctgatgtgcagatgcacaataatgttctctcatttgaagaaaagaacaaatcatgtactttactcgcttggaaccattagttgagttgtattttctatttatgcaaacccaactttgatggtaaaatacttaaaattattatatgtacgtagtatgtgctccctttataaatatttaatgcagttgattttgatcataaagtttgatcatttatcatatttaaaagtttagtgtaaaaatatgcaaaaatatcatgtttaaagtacctttaacaataaaacaagtcaaaaaaaataattgtatttttttaataagataaattatcaaattttgttgtcaaagtcaactgcgttatgaccagaggaaagtacccgaatctcttaacatacaggtggcattgtcttaattgtattggacttgtcgagcttggtgttttttgcgggcatttctgacatgatttttcctaatctatttacaggaggaaccattaactttgacaggacctaataatcgagtacttggtacactatacagaattgagttacatttaaagattagagacgatggtggtgttgaccaagatttctgcgagaagccgagaacacaatgcatcagctataattttttaggttcataatataaatttagtgaaagtggcaacaaaatgtccggaccagtatgtgaacaagtagaatcgaatggcaaattaatcttctgtagctgccataaaattaggaacaaaattatgtagctctgtgatggaaagcttgaaggagctcagaattccagtcaatttctagtatacaaaagaaaaactaaaaaaaagtttaaactcaaagcccactagtaaatactactaatacaactaaggcccatattgggcccacacggcccacgaacagcaacctaatcctcgcgctggaagagacgagacagtacgccacgcgccgcctgagccctcgcgtcgcgacaccgctcgccgcggcggcgctgctcctctccagcgaccacgcgaggagggagaagaggaggaagaaggcgagaagggagcaagctagaagagtgggagagggggacatctaggtcgtcgacggcctcaatggggtggggcataccgacgcggccgccggcgacgtcgacgccgtcgcgggtgcaggcgctgtacgagctctgcaagcgcaccttcccgtcgccgtcctccgtcgccgcgtcctcctcgccgtcgtctccacctcccgaccacgccatccgcgccatctcctctctcatgggtaggtcacctgacctccaccaactcctcttcctcccgacctcggcccaatttttgttttgttcttgtgttcagagttcggacagccaattgattgctctttcctctgcaaaatcgttcgtatgctgatgtattgaggaattggatgtgagttttgtgttcagatacaatcactcctgtggatgttggactcagagatgataatcttgaggatggaagaggatttgggttctttgaatcaaacttcttgaagaattcagcaagggttgctagatgggcgcaacccataacctacctgcatgtctacgagtgttacgccttctctgtatgaggatgctcaacttggtcatcttcttgtattgtaacacttctgtgaaagagtagaatttaatgaatacttgtatatcttctctgctaacctgcaattgtttcctgtatgttccatagattggaatattctgcttaccaacgtcggcggtcattcctctccatgatcatccgggaatgactgtattgagcaaattactctatggttcgatgcatgtcaaatcgtatgattgggtagagcctgctgttctagcaagtggcaagccaggttatttttcataccctgtttcaaatatttgtttttatttatctactagtatatattgcattgcagagttatgacttaatgagcttgttgtctctgagaatagaagtgtaaaacatttatgcttcagatggtttctagaatagcaagttaatgaataatagcggttgtggcatagtatcgatactacccagccctattggtcactagtgttgcactgttgctcaggcatcattttagattgctcatttctatgccttgatgatttttcgggttctggtatattaaggattttttttttctttctcctgatgtgcagtgaaacttggaaagttacatacggatgatgttctgaatgccccttgtccaactgctgttttcagtggcggagacagcgtgggggcgccaattttaatcccaagagggtctgaaatagactttgttctgagattttagaaggcccaacaggctgagaaggcccaaaatatcccacaactctacccaaccggccaaccctaatctctttccccaaccgaagagaggcggagactcgtggcggcggcggcacacgagcgcactcgcgcgcgacggcttccagttcaaagcgccggtgaggcggccggcggtcggcaaggggacgcgacgcgcggcggcggcgcgccggcactgcagcagccagcagcagctagggcacgcggctcaccggccgctggctgctggggcctgggggcgccgggcggcagcaaggcagccaggcagggctcggcgcgcgggcggcctggcgggggnactcggcggcgcgccggcacagcagcagccaggcaactgaggcaaggcaacaaggcaagtagcgccgggcagcaacaagccaggcggcaagccggacggcaccaaccaccaaagcagcaaggcaagcagcagcaagcgtcaaggggcaaggcaacaactcaacaattgaggatttgaccagtgaggtatataaaatttctgatttgtcatttaaaatcaatttcaattgtcatggctagttgttattgatagttcaagtcttcaaaaaatcatagattttgattcctagtttgctactttgttatattgctagattgcgaagatgtcaaaaagaacactgctcacatgttatttgacatttcttttgtataggttaccctgatgaagaataattggtgatagggtgtactagtgtcgcacatcatgtcattatctattggatatttcaatattgttttggtatggataatgcttatttcttgttaattctatatatttacactttgtattagacatatagtcaatttacataagacatgtctcaacttttctcggccacttttagttcagcccccactataatgtaatcctggctctgccactggctgttttgtatccccaaagtggtgggaacatgcactgcttcacttcagtaaaatcttgtgctgttcttgatgtcattgccccaccatactctgaatcatctggccgtgtttgcccctattttcatgattatccattttctagcttctgtaagtgaaatccctcactgtcgtcatattacatatttctgtcaggttcatgtttaactaaatcttttggcggaagcagaataccagccatctctggtattggctggtagttgttcaaaacatatattattagtcacaatgctgttcagatcttttctgtcaagaacagcaattaccttatacattatgttcattttatatgagaagaaaacttaatttgttgatatattgtcaaaacacaaaagtgatcattttcactatgctatatcatgtttgatttttctcacggatcactccaactgcagcagctggacaagcaaaagtagtccatgggccagataattatgcttggcttgaggccttaaacgtaccggtgaatattaatatgcgccctggcatgtatactggcccaactatacaggtatagcctaaatttctgcattttgttgatagtcttctgtagcaaccaaaacatgcttgagagttgagactgtttttctgatggaatatttgtctttttgctaggaacatctgccataatcaataaaaatgggcaggacagagcgtcaaactgtgttcaagtgccatctcacaaatacag

SEQ ID NO: 6143 - DNA, 12196 bp, Oryza sativa
cgcaataaacccgatttttaattaaaatttaaatgaagaaattcgcaaatatccatttaaagagcatataaacttcaaatggccataacttggccatttgaactcggaattggaccgttcaagtctctaatttttccttaagaagtcaagaacccatttttgtgctttgtttctgctgttatgtggaatttattagagtaaaagccttttcttttccgttggtcgtgtagacgctgcagcttcggaagatccgctcttcgtggaagtcgaagccgtcggttgggaaagcgagcaaggcaagtcacatcatctttgagcatattgaatcccagtttataaaattatgttgatttaaattattgcattatcgctttatttaaattcccgcgttatcactgttttatttagccatgcctatttacctttgttgtgaccatattattattgttattgttattattattaccttgttcaccctagattaaacaaaacctcaactagtggacactctactcgtagtatccctagtttaaatttagatagatgcttcgcaatttaattaggtaacattaggtggtttacaactatagactttgggaaatattcatatcacctggacactgtggaattgttggatcattgtggaattggcttcacaccgccccctccattcaaaatccccaaaaatggttttaggctgggttcggggtgcatggttttgatggtagcacctcggccatataaggaccggtcttcgggcctctgttgcaaagcactaccgtacttccacatgtctagtgggtaaggcttagtttgtggctcagtctagtcataaacaaaagtacacggattggagatggatgaagtcgggggtcgatggacattctccagggcaaatgaaggctacacgagctgcggcccggtagtcgagatgtcatggcagagggttggtgccctgctgctaggggctcagtcttgcctgcctgtcccgggggttccggccgtaggcaggattgggtcggtactcttgtttatggctaggatgggttggaaactatgtcacgtcttccgtctgtataccgtggtggtatgtggcacgtggttacacgtgaggaagatgtgtcttgtgggtaaagatgtacacctctgatcagagtataatctattcgaatagccgagccctcggttatgggcaagccgagcaatgtacccaagttagtgttttaattcttaaaacttgcttaacaactaaaatatggaatggttggcctgggttggcttgggacgagctgggacccagggtcgggttgccagttcggtctgaatcatcataggccttgggttaaggcaggttcgtgtgggttcacggccttgattaataactttgtatagttctaggatcgcgtttacaaaatagccctgagcaactaaatgtctttaaatgctgtttactgcaaccctaaccctttacattataattcccttgtactcctttgcatttattctgcatttgtgggtgtgtcttgttgagtacggtggttgtactcagtcttgctcaatttttcccaagtccagaagaggagttccttgaagatgaaggtttcggtgtctagctcgtgcctgccgtcaagcgcctgtggtcgtcgccctagtcttccgctgtttctcgtttgtctctgtgtgtgctgggccttcgctgcccatgtaataagttaactatttacgcttccgcttgttaaactctgatttgtatcaacttatggtgtaccttgcctcctgggacaaggattaatgcacacacgtcaggaaagcccgttgggttatttccggtcgtgacagctatgacgccgtcctcgaccgcttggcgggcctgcgatcccaggggctcacaggggccatggtgttcggcgactaccttcgtcgccggattgcgccgctccagcggcgcgcccggggcgcctgggagtacaccgggtccgaggactgtatgaggacccaccagggggtcagatgggactgggctcctgaggacttcaagatagtggtccaacgggtgctgaatctcagctccgtggaggcatccctcattcctcaaggagtcctccccctctgcagcgatccagaccgcgcctccatcctgaccatcatgcaggtagtcggggcgttggaggagcgggctcctcgaggccacgatggcgcgggtgggagccgcaggggggaacaatctaccccgggagggggtcgtgcttctgggccccgcgacgggggcccggggagcggccgccctgccgacgcccgggggaagaggaagcaggaaggaacccctcccccatctcctccccgagggggcggggcggcgcgtgccagcagcaggcgcccggagggggccacgccgacgtcgcagcccgagggggagcggaagaagaaacggctccgcaagatgggggggacagaaccatcccggggaaacctcatttcccctccaaggtggtcgtttaaccgaccccctcgcaggttcgtcccacacccatcgtggccgtattcattccctcaacgcgagttttcactcattcatcttgtttgtcttctggcttttcttctgcttcagcgagatcccgttgcgtccttcttgccaattcaagtccggccaatctgaggccgagaatgcggcgaccacggaggctcggaggcgggaatctgaccggcgagaagccgcggatcgcctacgggaagccgaggaggccgcccaggtggccgtccgagctcgccaagctgaagaagccgctcgggaggaggccagacttcgccaggccgaggcggcgacgacttccgaggcagctcgcgacgaggccgcgggcgcatcgcttgggcccactccctcgggcgacgctcaggacaagccaggtccgggggacatccctgagtccggcacgtccatcggcgggccgagccgcgcggcatcctcaccgaggcggctcttccccacgccttccgttgctccactgagcgcagagccccttctgcaggccttggccgtcgcaaacaccacggtgttggacgggttaagtgcccaggtggaggccctgcaagcagagcgggcggagctcgacgccgcatgggcgcgtgtcgaagaggggcgacgctcggtggaggccatggtggaggtgggccgcaaggcacaccgccggcacgtctcaaagctcgaagcccgtcggaaggtgctgggggagatcgccaaggaggtggaggaggagcggggggctgccctcatcgccaccaccgtgatgaacgaggcgcaggacaccctccgccttcaatacgggagctgggaggcggagctagggaagaagctcgacgccgcccggggggtccttgacgctgccgctacccgagaacggcgggcggcggagaccgaggtggcatcccggcggcgcgaagaagcccttgaggcccgtgccatggcgctggaagagcgtgcttgcgccgtggagagggacctggcggatcgcgaggccgccgttgccatccgggaggcaacgctgactgcgcacgaggccgcctgcgccaaagaggagtccgcgctctgcctccgcgaggacgcgctcaccgagcgggagcgagctctcgaggaggccgaggccgtggcgcaacggctggcggacagcctgtcccttcgcgaggctgcgcaagaggaacaagcgcgtcgcaatctggaaagtgcccgcgccgagagggccgcactgaaccagcgggccgctgaactcgaggcgcaggcaagggagctggatgcaagggcgcgtagcggcggggcggccacgggcgatagcgacttagccgcccgcctcgcagctgccgaacacaccatcgcggatctgcagggcgcgctggattcgtccaccggggaggtcgaggccctttgcctggcaggcgagatagggcccagcatgcttcgcgacgccgtgtcccgtttagaccgcgccgggcggcaggcgggtctctggggcgggcggactgtgaagtacgccgccaaccaggggggcctcgcccagcgcctctcggagatggccgggactctccagcggctccccgaggagctcgaggggacgattaaggcatcctcgagggacctcgcccgaggagcggtggagctcgtactggcgagttaccaagccagggatcccgacttctccccatggacggcgctggacgagttccctcccgggaccgaggatggcgcgcgcgcaggtccgggacgccgccgaccatatcgtccacagcttcgaggattcggcccctcggctcgtgttcgccctcaactccgacgaggaggacgatgacggcggagtgggcgacagtggcgacgaggctggcgacccgggtgcatcggagtgagcccccaggcccccgccaatctttaaatagtttcttcttttcttcttccgaggccttcgggcccccttcttgtatagactgatttaatctgcaatcaaataaagaggaaattttttgtgtcaattctatttgttgtgtgtatgagacgaggatgtctgtgccgcggtccttttgtgtcttggcttgaacaagggctcgtgcccaggtcctagtcctcaaatggctcgggtcggggctagtgcctggggagatccacatgtcgagactagccaggccgggagcgtggtgaccgagggttatgggtgacccgattgtgggtttttgccgattcccccccggagttcaccacgccccggggcacggctcggttctgggccccgtttggcgattttagccgacccgagcccccgagggcaggattgaacacgagtgacctatttcaagtcaagatccttcaaaaggaaacaacagcacagatacaacctttaggaaatcgaaaatgcttttattgaaatacagatataagagaaataagaatatgcatatgtggtagcccccggccgaccctgcacgcccgaggggggtgcggggttggcccgagcccgaaacctgacacccgatccccctttaggggtagaagcgacgaaggtgttcgatgttccacgggttaggcagctctgtgccgtcgcccgtggccagccgaacggagcccggccgggggacgccgatcactcgatacggaccctcccacattggtgagagcttgctcaatccagcacgcgtttggacgcggcgtaggacgaggtcgtcgacgcagagtgatcgggcccggacgtggcgctgatggtagcgccgcaggctctgctggtagcgcgcggctcagagggccgcgcgccgccttcgctcttccaagtagtcgaggtcatctatgcgaagctgatcttgatcagcctcgcagtacatggtggcccgaggggacctcagggtgagctcggatgggagaaccgcttccgcgccgtagacgaggaagaaaggcgtttccccggttgctcggcttggcgtggttcggttcgcccagagcaccgctggcaactcctcgatccacgaatcaccgtgcttcttgaggatgttgaaggtcttggttttaaggtctctgaggatttccgcattggcgcgctccacttggccgttgcttctggggtgggcaggtgaggcgaagtagagcttgatgcccatgtcttcgcagtaatcgccgaaaagttcactagtgaattgggtgccgttatccgtaataatacggttaggcactccataccgggctgtgatgcccttaatgaatttaagtgcggagtgcttatcgatcttgacgaccggataagcctcgggccacttagtgaacttgtcgatcgcgacatacagatactcaaacccgcctggggcccgcctaaacggtcccaggatatcgagcccccagacagcaaatggccatgaaagtggtatgatctgcagggcctgggccggctgatggatttgcttggcgtggaattgacacgctctgcatcgccggaccaggtcgaccgcatcattgagagctgtcggccaatagaaaccttgtcgaaaggctttgccaaccaaggtgcgcgaggcggagtgggctccacattcgccttcatggatatcggcaagaagctcgacgccttgttcccgaggaatgcacttcaggaggattccgttagccgcgcgccgatagagggtcccttctaccagcacgtagcgtttggagatgcgctggacgcgttcactctcttcgcggtcctcgggtagagtcttatctgtgaggtatgcttggatctcagcgatccaagcaatcaatctaagggagctgggagcgctcccctcgggtcccgaggcctggactccgacgggcatcgggggcctgtcaggcgcgtccgtctcccctaaggggtcgggtcgcgccgacggctgggcaagcctttcttcaaaggcgcccggtggggtctgggctcgctaggaagcgagccgtgagagttcgtcggcaaccgtgttatcccgtctgggcacgtgccgaagctctatcccgtcaaaatggcgctccatacgccgtacttggcgcacgtaagcgtccatctgcgggtcagagcaccggtactccttacagacctggttaacgaccagctgggagtcgcctaacaccaggaggcggcggatccctagtccagctgccaccctgagtcccgcaaggagtccctcgtactctgccatattattggtcgcccgaaagtcaaggcgaaccaaatatctgaggacgtctccgttcggcgaggtcaacgtgacccccgcaccggcgccctgaagagacagggagccgtcgaactgcatcacccagtgggcggtgtgaggcagctgcgaggggcccgagctggcctcggggactgagacgggctcgggagctggggtccactctgccacaaaatcggcgagggcctggctcttgatagcgtggcgtggttcaaagtgcaaatcaaactcagaaagttcgattgcccatttcaccacccgtccagtaccctctcgattatgcaagatttggccgagggggtaagacgtaaccaccgtgacccgatgcgcctggaaataatggcgcagtttcctcgaagccatcagaatagcgtaaagcatcttctgggcctgagggtatcgggtcttggcgtcccggagggcctcactaacaaagtagacgggccgctgcacctttcggtggggccgatcctcttcgctaggggccacatccctggggcgctctttgtccaagtggcctcgcggagtgcactcgtcttctgtgccgacgacctcggggtcggaggatgataggggcggccttcccacagtggcctcggggccgtcctgggggtcgggggctcctggcgtcgtcggacaagcagggcaaagggccaactccggtcgtcaggggccttaggccaccgttcggctcgggggcctcttctccctgctctctcccgggtcgagtcggcacagggttagcctcggggtcagagggcgataggtgcggccttcccgcagtggccctcgggccatcctgggggtcggggtcaccaggcaccgtctgacaagcgggcagagggcctgctccggtcgtcgggggccttgggccaccgttcggctcgggggcctctcctccctgctctctcccgggccaagccggcacagggtgagggtgcgcggaatgaggattgtcctcatcgcgctccacaaccaacgccgcactaaccacttgcggggtcgccgctaagtagagtagcaagggttcatttggctccggggcgaccagaactgggggagagctgagatacgccttcaactgagtgagggcacgttcagcttcctccgtccaagtaaacggcccggagcgtttgaggagcttaaataagggtagcgccttctctcccagcctcgatatgaaccgacttagggcggccatgcaaccggtgacgcattgcacatccctaagcttgctgggggggcgcatccactctatagctcgtatcttctcggggttggcctcgatgcctcgggcagagaccaaaaacccgagaagcttgcccgcaggtacaccgaacacacacttatcggggttcagttttatgcgggcggagcggagactctcaaaagtttccgctagatccgagagtaaggtctcttggttgcgcgtctttacaaccaagtcatcgacataagcctcaacattacgtcctatttggctacccaaagaaattcgagtagtacgttgaaaagtaggacctgcattctttaacccgaagggcattgtcgtataacaataagttcctatgggggtaatgaatgcagttttttcctcatcctccctagccatgcgaatctgatggtaaccagagtatgcatctagaaaacacaaaaggtcgcaccccgctgtggagtcgacaatctgatctatgcgaggcagggggtaagggtccttaggacataccttgttaaggtcggtgtagtcgatgcacatccgaagcttgccgttcgccttgggaacgaccaccgggttcgccagccactccggatggatgacctcgcggatgaatccggcctccagaagtcgcgccacctcctcgcggatgaaggcttgacgttccggggcctgccgccgtactttctgccggaccggccttgcgcccgaccgcacggcgagacggtgctcaatcagctccctggggaccccgggcatatccgccggtctccatgcgaagacgtcagcgtttgcccgcaggaaagagacgagcgcgtcttcctatttaacgtccagaagaccaccgatccgtgtggtcttggacgggccgtcgcccagggcaacctccttgaccgggacctcgtcgcatgtgactatccgctgcctcggggcggcgggggcggaggtgccaagcctctcgtcgcctccctcgggcttggacgcggcggtgaggtggtccgcgcgctactccgtacaagcaagcgcgactttgaggtcgccatggacagagatggggccaccggggcccggcatcttcatctggaggtaggcgtagtggactgccgccatgaacttcaccaacgcgggcctccctaggaccgcgttgtagggcagactgaggtccgccacatcaaagttcacccgctccgtgcggaagttggcggatccaccgaaggtgaccgggaggtcgatatgacctagcggccaagtgtgacccggcgtcacaccgataatcggttgggacggccggagcaccatccccggggccttgatagcgtcaaaggcagcgggggaaaggatgttgagggctgctcccccatcaatgaggacacgccccagtttcacgttgcaaacagtgggggaaaccaccattgcgatctgtcctccccgggcaacgcacggtgggtggtcggtctggtcgaaggtgagggcaacctccgaccaccgcgcccggcgcgtcgcctcatgagtaggggccgcggccagaagctctcgcttcatgatccctgaggctctggcgagaaacgtgagcacacgctcccccatcgacagtggcaatggtggccccaggctcttggaaacctaggtcatcatcgccgtcatcgatgtcctcggtgggggccttctgcttggcctcacttcgccgattgccggaaggaaccgccggggacttgccctctcggcgctcctgcctcctctcctcctcccacttcctcgtccgctcagccaaacttttgactgcgcggcagtccgcgaggtcgtgaagggaggtgttgtggacgatgcaccacttgccggttgggcgctccctactgggagcgccggcctccttctttttgtcgctcgcaggcctcccctttcgggtggcccgcgaagcgccctcgacggcgaggacatgaccctcgtcgtcggaatgggctgacctcttcttcctcctcctgtcacgccgccctgtccgagcagcggatccgggggcggccgaagctgccacaccggaaccggaggggttccaggtccatgcctcttccttacgagccactcggtccgcgagctgaaaaagctccgcggtagtctggggctctttggaggcgatcttttcgagcatgcggttgtgccgcacaccccccctgaacgcgtagatcaccgcgtgtgcagggatgcatggtatggtgttgcggacttgacagaaccgctgaatgtatgagcgaagtgactcatcatcccttcgctggactgcatgtaagtccgcttcttcacctgggcgcggatatgtgccttgaaagttcatggtgaactgttggcacaaatccttccaagagtggactgacgcgggtggcaagttcattagccaaccccgtgcttgtcccttcagggccatgggaaagaaattcgccatgaccctgtcgtcacccccggcggcctcgatcccagtcgtgtagacctggagaaactcggcggggttgacgctcccatcatatttttcggcgatggtgggccggaaccttgggggccaacggacgttccgaaggctcgccacaaaggctctacagccgacaccaccaaccgggggcacggagggctgatccccgcgtccgtgttgatgtgacactccggacgagaaggcgccctccgttgcgtgggcagcacgtcggccattacgccggcgctcgatactgatgcgggcatccggccccccacgcagatcttcctgggtcggaggcgctgacgaaggagtggcggccgaatggcgagcaacagccgccgctcgccgcgccctctgccttgacgacacggagccggtggtagcagcgccagaggtcttggtggcggaggaccgcccaccagcacctaggcgctgccgtgccgtcatgaccaagttggccacgtcgtccagccaacgttgggctggagactccgggtcagggacaatgggcgggtgacgtaggagcgcgcccgcagcttggagcgcgccctggggcgtgctgccgtcgccgtagacgaggaggcgacgctccccatctcgccgcccttccccatcacccgtggatgtcgaagtcgcggatccttcgaccctctcgagcgcctcctcccgcctaggactttggcgtggagggggcggtggagtacgagctcgacggcgtgggttcggctgcccgtcgtcaccgctaactctcggagagaggttgtgcgcctttgcttgttcggccattgggctgaacaggaaaagcttggcgcacacgaaagaatgcgagagcttagaaaaacacacgcagagccccctacctggcgcgccagatgacggagcgtggggctcctcaccgggagaccgcgcaggcccccctttgccggttcggccgggggccctgggtgagattctaagctcctagtctgtgtgtggaaggttcgcgagaatggaaaaagcacaagacacgggcgatgtatacaggttcgggccgctgaaaagcgtaataccctactcctgtgttttggtggatctatgtatgaagaagctacaaaagagctggagaaccagagagctcttactctctccctctctgatcgttctgtatccgaaaaaatcaatcccccttctaagtgggcaaggtcctccttttatacctcaaggggataccacatgcaccatctctcttttttttttgtggggacttatcctctcttttcataaacagacggagacttgtatggttgtcgtccgaatgaccttctgatgggacggcccatacctacctccacttccgccggaagcaggcgcgacgtgggaacatggttgtctgctgacgacatgaccagtgtcagaccggtcacaaatcggtcattcttgtccaccacgcgtcagtttatcaatctgcatgttcgcccctcttcatacaatgtcttgcttgtaatggttaggatgaagcctggtatatatctgaccgggaccaacgtgccatctccaggagctaacacgccggctccggctagggacgagtgcttggaggctctcatcctgatgggatggggcgaggcgtgcgtcagaccgcctgtcgccacctaacccacgatctgatcggtctgtgactggtcacagaccggataaacgagcgcgctgcactgcgttacatgcggcgtgacgcgctcgtccaaaccgcaataaatgtggttaggtgagccctgctatgctcacctaccccgtatacgcggcgcaaaacccacaaggggtcgggg

SEQ ID NO: 6144 - DNA, 10003 bp, Oryza sativa
tttaacaataaaataagtcataaaaaaattagtgtactttttttaataagacaaattatcaaattttgttgtcaaagtcaactgcgttatgaccagaggaagtaccggaatttctcttaacatacagttggcattgtcttaattgtattggacttgtcgagcttggtgtttttttgtgggcatttctgacatgattttccctaatctatttacaggaggaaccattaactttgacaggacctaataatcgagtacttggtgcactagacagaatagagttacatttaaagattagagacgatggtggtgttgaccaagatttctgcgagaagccgagaacacaatgcatcagctataattttttaggttcataatataaatttagtgaaagtggcaacaaaatgtccggaccagtatgtgaacaagtagaatcgaatggcaaattaatcttctgtagctgccataaaattaggaacaaaattatgtagctctgtgatggaaagcttgaaggagctcagaattccagtcaatttctagtatacaaaagaaaaactaaaaaaaagtttaaactcaaagcccactagtaaatactactaatacaactaaggcccatattgggcccacacggcccacgaacagcaacctaatcctcgcgctggaagagacgagacagtacgccacgcgccgcctgagccctcgcgtcgcgacaccgctcgccgcggcggcgctgctcctctccagcgaccacgcgaggagggagaagaggaggaagaaggcgagaagggagcaagctagaagagtgggagagggggacatctaggtcgtcgacggcctcaatggggtggggcataccgacgcggccgccggcgacgtcgacgccgtcgcgggtgcaggcgctgtacgagctctgcaagcgcaccttcccgtcgccgtcctccgtcgccgcgtcctcctcgccgtcgtctccacctcccgaccacgccatcggcgccatctcctctctcatgggtaggtcacctgacctccaccaactcctcttcctcccgacctcggcccaatttttgttttgttcttgtgttcagagttcggacagccaattgattgctctttcctctgcaaaatcgttcgtatgctgatgtattgaggaattggatgtgagttttgtgttcagatacaatcactcctgtggatgttggactcagagatgataatcttgaggatggaagaggatttgggttctttgaatcaaacttcttgaagaattcagcaagggttgctagatgggcgcaacccataacctacctgcatgtctacgagtgtgacgccttctctgtatgtggatgttcaaatgttcaatttggtcatcttcttgtaacacttctgtgacagagaatactactagaagttaatgaataattggatatcttctctgctaatctgcaattgcttcgtgtttgttctgtagattggaatattctgcttaccaacatcggcggttattcctctccatgatcatccgggaatgactgtgttgagcaaattactctatggttcgatgcatgtcaaatcgtatgattgggtagagcctgctgttctagcaaatggcaagccaggttatttttcataccctgtttcaaatatttgtttttatttatctactagtatatattgcattgcagagtgatgacttaatgaactcgttgtctctgagaatacaagtgtactgaaaacatttatttcttcagatggtttctacagtaccaagttaatgaacaatattggttgtagcatagtaatagtattgatactacccaaccctattggtcactagtgttgcactgttgctcaggcatcattttagattgctcatttctatgccttgatgatttttcgggttctggtatattaaggattttttttctttctcctgatgtgcagtgaaacttggaaagttacatacggatgatgttctgaatgccccttgtccaactgctgttttgtatccccaaagtggtgggaacatgcactgcttcacttcagtaaaatcatgtgctgttcttgatgtcattgccccaccatactctgaatcatctggccgtgtttgcacctattttcatgattatccattttctagcttctgtaagtgaaatccctcactgtcgtcatattacatatttctgtcaggttcatgtttaactaaatcttttggcggaagcagaataccagccatctctggtattggctggtagttgttcaaaacatatattattagtcacaatgctgttcagatcttttctgtcaagaacagcaattaccttatacattatgttcattttatatgagaagaaaacttaatttgttgatatattgtcaaaacacaaaagtgatcattttcactatgctatatcatgtttgatttttctcacggatcactccaactgcagcagctggacaagcaaaagtagtccatgggccagataattatgcttggcttgaggccttaaacgtaccggtgaatattaatatgcgccctggcatgtatactggcccaactatacaggtatagcctaaatttctgcattttgttgatagtcttctgtagcaaccaaaacatgcttgagagttgagactgtttttctgatggaatatttgtctttttgctaggaacatctgccataatcaataaaaatgggcaggacagagcgtcaaactgtgtccaagtgccatctcacaaatacagttcttatcatgtagtgatgtaaatgtaacatgttcatctttaacttttgatttatgttgtccttcattgaaaaggtgtggctataatggtgacatagtcaaaacagtttgtactagccactttgtatcttagttaccaatctgcaaattctgcattctaaattgcttctggagatattgtaaatgtatttatgttaatgcctacatttttctttctatttctatgccttcagagaggctggttgccatggtgtcaatatggtctggaattcaaatattcaacaacccttgttaagatggtagttgagattcaatcaaaatttttagattattgtgctccattttgtacctgttctttccgtatttttattgggattacaaagcaaactcaatgcagttcaagaaagagttaaagtgtgaaactgacaagctggcagctcaaaaagtactggcccaatatgtatgggctgaacatgaactacaacactgttctggcccaatatatatgggccgcatgtgagtcacattactcttccgtcgttcaagcccattaatttgggctcagcacgcaggacctggccttcttgggcttcttgcgggaagttcaaatttttgcaccacattggcgcgggcgccactatacatgaaagctacgtgaattgggacgtccacgcacgatccgacggccatcattacatggcgtcttcagccgatggcaagctatgctcaggcaggtctgaccgtctgagatatagggcgtgtttagttcacgttaaaattagaagtttggttaaaattgaaacgatgtgacagaaaagttgaaagtttgtgtgtgtagaaaaattttgatgtgataaaaaagttggaagtttaaagaaaaagtttggaactaaactcggccataacatactactcactggatggagcactagaatagcatctagtagctcattttcactttcaggaacatgaatcctctgatcctctatatctaaagtagtgtgaaaaaactagagtttttcaccatctcagtgcgccacatcatcaattaaatacagaccatccgatggaagaaagattcatttgaaccgttggatctggagtgtgtcacggtcaagcaaagaagcacaggcttcaggaagcttcgcccatcttcctgtcactcccgtacttgccatatgtgatcagtgatcggttggttaagcagacaaataggctacttaggccgagtttagttccaaactttttcttcaaacttttaactttttcatcacatcagaacttttctacacacataaacttccaacttttccatcacatcgttccaatttcaaccaaacttctaaatttcgagtgaactaaacacacccttacatgatgtatgttaatatgcatatgtaacagtgtagcaagtcttcttttaagcatttttattaagtacttcctctgtcgtatattaagattatttttagctcatcccatttatctcaaaataaattgatttttagtaataattatatcaaagtttataatagtaaagaataattgcattggaagtagataaagtgataaatagttatattaggatgagataaagtagggtattttagtcttttgatgtttgtattggtatgtgtaggatgagtgaacaatgaactttttttggaacatctgtattactaatatgcatttgtactaatttttttaccaggtatgcatatatacaaattactccctttattttaaaatgtattgagatatatataaatataattaccttttcaaacaatcttttcaatactatactttaactactactgttttctttcgtttattatcaatacctacaaaatcaacgccatataaaaatagtcaaataaaaatctaacaatactactttattatataatgatataaaaatcaaataaaaagtcataacattaatcaaatatccaatcataccaggtatgcatatgtacaaattactccctttattttaaaatgtattgagatatatataaatataattaccttttcaaacaatcttttcaatattatactttaactactactattttctttcgtttattatcaatacctacaaaatcgacgccatataaaaatagtcaaataaaaatctaacaatactactttattatataatgatataaaaatcaaataaaaagtcataacattaatcacatatccaatcctgtacttttaatccattcattagacaagattttatgttttgatttttctcaaaataaaaatgccttatatattttaaaatagacggagaaacaagttagtatttctttatcatacaataatactctattgtcataaatatataacgtttgttttttcttgagcaaactttcgaaatttttcccatcaaggagatctcaacggcagggcactgttggcctgacctatatatacacatcttttaaacgggtcttaagagcctcgcaacgcgtggcttatgtggctagtttatatgaagccatgaagcccccatttccattaccagaaatgagaagttctacagttcttaaacctccaaaacaagagccaagaacagctacagttcaaactgccagcacctgaagaccctacaaactaaaacgagctactaacctccactgcatgtgtggagcaaaccagggccaaataacaggagctagcaactcaagccatcatcaacaaaacccaccacccaactgacaacagcaagcacgcagaaaaaacacactcaggttctggagacgctgagccacgaaaatataaagtctaggaaataaagtggaatagtttattataaacttgcaggtaggtctgaggaaataaagtggaatagtttattactaccatatgacttgacagcaaattaagtcttaacatcaataacagctttctccaaaatgacatacatcttccctcccaaaataaatcaactaatcaagacatagccaggatttgaatctttttgagacggagaggatgcataccaataaagtggaaacaaagtggagtatatatcaacctgcatccaaacgcttatatttcatacaaacagcccttcattggcaggacatcctattaggtaaataataacatcatataaggatcaggttgcatattttgaagaacctgatgaattgctacaagcctacagcagttttaaattttcaaatgacaacaaaatacatctactggacctagtttgtatgtatgttgtgctctgactgtttcgtgcctactacaatagcacaaaatggtacgctaatgtatacccttaagttctttaagaatcattgtacaaatttcttccgtgttgattggtaggaagagagaaaaaaaggaatgtatccaaggagagctggccaactcataggagaagtgagagctcatttctcctgtatcacaactcagtctcacaagcatatgtaataaccatcagcatgttttgtgcaattgtgcttattacagatttatgcattagcaagctttggaataggtattaccttcttcagaaatctgttcaaaacagcccagcattcagtgctatgaagcttctttagtcgagattgatgatgtctcaacatcttgaggacctcctgctgctcgttccattggggtttcactttgagcttatgattattatatgcaacaacacctgctattgctccagattgcagaaaagatggtgtaagagaaattaatgggctcaaacttgaacaagggtgtaagagaaaataaagttaaaccaataagagaaaaaacagtataatatacctatcaaataaccaattatatttataaaggtaagctgtgtatctgcaaagatagcagctgacagcaacaccacagtccaatccctcacaattccagtaacacgagctgtcagtgcactagttctggaaatgacaaggaagactgagggatttagggtgaaagtgcatatgcagtttaagaacaattttcaagttaattaattatgagatcaagtggtcaagatatatgcaagggctcacatagtacatcatggaaatcaagttaagcctctccctttttcttcagaaaaatctcatgaagatcagtctaagggcttctgtgacgattccacccatctggtaaaccacacagatcaagctgattgtattttcaccaacagatgccacaataaccccaatgctgatgacaggcatgatagcaagcattttacagctcgacaggcatgatagcaagcattttacagctcatttcttcaaggccaagggcagctccgaggagaaacacagctactacaatgctcaaacaaagagtacattaacatcatattttaaattaatagaaacctataacttgatcaaaaaccagagagctcacatacttatttccttcaacatctgtgcaaatgcaacagatatgtaaaggtacgcactgctccctagacagtgtgtcattgaaaacattgctccaattgcaatgaccgaactaacatatctgcaagtccaggtgtactggttgaattagatagaaatattgtagagcacctaaacatgtgctgctgggtagctacaaccaaatattgaaaatcaaacctttccaaaagagtacaagccaaatattgctgtgtgtggagattatgggtaccccatacccacacggcatggttatccgactagttataggggataacttgtatctatgtaatatgtaacagatcatgacttgggtgttacgtttccttgtatattacggaacggcctaaagtcctgatttaggaaaccgataccgtattggttaaggtttctatcttgtaatcctgccccccatcctatataaggtgggcaggaggccctctagggggcatacatgagacaactagatcgtcagatctataatacacccggcggattcaaatccccaaacaggagtagggtattacctctcattgagagggcctgaacctgtctaaatcctttgtctccacatccatccacttttaggtctcgtgcgctaccccgttttattattgccgaaatcatgtttcgacagttggcgcgccaggtaggggatgcgtcgaattacccgtcgaaaagtgagatggaatccacttcagaagaaacggcgagatcaatctcaccgaattcgatggctcgaactttggaccgggtttgtcgttccaatctattttttattagattaattttttttctatcatagatcaatcttctggtatattttcctgtgtcgatcttgtgtcggtcggcggagatcaagccgaagctgtcgacgacgccctcacgcatcgagactttcttcgtgctttgccggcggacatgtggtggccatcgctgggcacagtttaccaggagaaaacactgcatgagttgattcaactgatcaacatacatgcacgatccaaccaacatgcacattacatctacagagttaatctgtttactagttgattctaaccagcaattattttgttgctatctgtcttgcatgtacaccgccggccgtatctactgccggctatatccgtcagcgccgaccggctccaccgtctccgtagtcggtcgcctccgagctgttatcattaggctttacagctgccccggtcggtcatctacatgctgccgactctccgaggtcgcagggccgttgatggcttccgccggctactgctgatcgaggcattgcgacccaagctgatcgacgcgcacgacgtatccaagccacgccgtacaacttgggttggctgttccaatttaatttttattagattgattattaattaatccctaatcgccggccgttttgatttcctggcaatttttgttgtttttcacatgctggttgagatcacgacacggccgccatcgtcgcctactcggccactcgggtgcctcttgccgtgtccgagtgctcctctcttcccttccatgcagatggacgtgctgctagattggcacaggacacaggaatatactcggccaccaggagcaagcacgtgtatacgtcgatttaatctacatgtatgctggagcgatggttgttcgcatgcattggatggcagtcgagatcaaacaatcattcactgcttgcggcctcgctgccacggttggtgtgtgccgccgccgttgccgatagcgacatcgtcttcaccactggcttgcctccgtcgccgccgattggtgcctccgcctacacggctggtctattatgccgccgctgttgggcgtctacgacttcaccgccggcctgcctccgtcgccgccgattggtgcctccgcctacacggctggcctattatgccgccgctgttgggcgtctacgacttcaccgccggcctgcctccgtcgccgccgagtggtgtcttcgcctatatggttggttggtcacaccaccgttgttgggcgtctacatcttcaccgaccggccgtctcgtccgccgccgactggtgtttccgcctgcacggctggcctattatgccgccgctgttgggcgtctacgacttcaccgccggcctgcctccgtcgccgccgactggtgtcttcgcctatatggttggttggtcacaccaccgttgttgggcgtctacgtcttcaccgaccggccgtctcgtccgccgccgactggtgtttacgcctgcacggctggcctattatgccgccgctgttgggcgtctacgacttcaccgccggcctgcctccgtcgccgccgagtggtgcctccgcctacacggctggcctattatgccgccgctgttgggcgtctacgacttcaccgccggcctgcctccgtcgccgccgattggtgcctccgcctacacggctggcctattatgccgccgctgttgggcgtctacgacttcaccgccggcctgcctccgtcgccgccgattggtgcctccgcctacacggctggcctattatgccgccgctgttgggcgtgtacgacttcaccgccggcctgccttcgtcggcgccgagtggtgtcttcgcctatatggttggctggtcacaccaccgttgttgggcgtctacatcttcaccgaccgtccgtctcgtccgccggcgactggtgtttccgcctgcacggctggcctattatgccgccgctgttgggcgtatacgactataccgacggcctgcctacgttgacgacgactggtgtcttcgcctatatggttggatggtcacaccaccggtgttgggcgtatacgtcttcaccgaccggccgtct

SEQ ID NO: 6145 - DNA, 9670 bp, Oryza sativa
aaacatatattattagtcacagtgctgttcagtccttttctgtcaggaacagcaatcaccttgtacattatgttcatttatatgagaagaaaatttaatttgttgatatgttgtcaaaactcaaaagtgttcatattcactattctatgtcatatctgattttctcacggatcactccaactgcagcagctggacaagcaaaagtagtccatgggccagataattatgcttggcttgaggccttaatcgtaccggtgaatattaatatgcgccctggcacgtacactggcccaactatacaggtatggcctaatttctacatattattgttgatgttgtcttctgtagcaaccaaaacgtgcttgggagttgagagttgagagttgagactgtttctgatggaagtaatatttgtctttttttctaggaacatctgccataatcaataaaaatggataggacaggagcatcaaactatgtccaagtgcaatctcacaaatacagttcttgtcatgtagtgatgtaaatgtaacatgttcatctttacattttgatttatgttggaacttccttcatagaaaaggtgtggctatagtggtgacatagtcaaaacagtttgtactagctactccgtatcatagttaccaacctgcattctaaattgcttctggagagattgtaaatgtatttatgttaatgtctacatttttctctgtttcgatgccttcagaattcagagaggctggttgccatggtgtcgatatggtctgatattcaaatattcaacaaaccttgttaagatggcagttgagcttcactcacaatctgtggattatggtgctccattttgtacatgttcttttcgtatttttattgggatcacaaagcgaactcaatgcaatttaagaacgagtgaaagtgcgaaactgacaagctgggagctcgaaagtccattctgggttctggcgatagtgttgggcttgggtaggaactcatcatgggccatctataactattcgggcccaatatgtatgggctggacatgaactataatactgttttggcccaatatatatgggccgtatgtgagccacattaccattccagacggcgcagccgcgttcaggcccatagatttgggctcagcacgcaggacctggccttcttgggcttcttgcgggaagttcaaatttttgcaccacattggcgcgggcacgtgaaagctacttgaattgggaccgtccacgcacgatctgacggccatcattgcatggcgtcttcagctgatggcaagacacgctcaggctggtctcagatatactagatactagtactagattagcagctactagtagctaatttttgttaaaagaaaaaaagggggaaaaaagaggcaaaacgtggtaacatggattgagcagtaaatttgcaagaccatgaagcacccatttccattaccagaaatgagaagttctacagttcttaaacctccaaaacaagagccaagaacatccacagttcacactgccagcacctgaagaccctacaaactaaaacgagctactaacctccactacatgtgtgaagcaaaccagggccaaataataggagctagcaactcaagccatcatcaacaaaacccaccacccaactgacaacagcaagcacgcagaaaaaacacactcagattctggagacgctgagccacgaaaatataaagcctgaggaaataaagtgtaatacttcctccgtttcacaatgtaagtcattctagtatttcccacattcatattgatgttaatgaatctagacatatataccgtttcacaatgtaagtaattctagcatttcccacatttatattgatgttaatgaatctagacatatatatgattcgacagcaaattaagtcttaacatcaataacagctatatgagggagtagtttattataaacttgcaggtaggtttgaggaaataaagtggaatagtttattactactatatgatttgacagcaaattaagtcttaacatcaataacagcttactccaaaatgacatacaccctccgtcccaaaataaaccaactaaaataaatcaactaattaaaacatagctaggatttgaatctttttgggacggagaaggtacataccaataaagtggaaataaagtgggtatatatcaacctgcatccaaacgctcatacttcatacaaacagcccttcattggcagggcatcctattaggtaaataataacatcgtataagaatcaggttgcatattttgaagaacctgatgaattgctacaagcctacagcagttttaaacttcaaatgactacaaaatacatctactggatctagttggtatgtatgttgtgctctgactgtttcgtgcccacaatagcacaaaatggtacgctaatgtatacccttaagttctttaaggatcattgtacaaatttcttccgtgttgattgatatgaagagaaaaaaaggaatgtatccaaggagagctggccaactccggcccggctaaaaaaaaaaaaagagctggccaactcataggagaagtgagagctcatttctcctgtatcacaactcagtctcaagcgtatgtaataactgttagtataatccttgttctagttagttatttggtttccttagacagtaagctataggctgcagctgttactcggttgtcagactgctgctattagtggtagtagtcaatttttattttacctctagcaggaacatagcagcagcagtattgtcggttcagcaaccgacctatccatgtactataaatatagctattgtgctaacataagtaagctttttcagctcattttcagtttcagtttcagctagactattgagtgtagttcagaagtgatcctaccaacaattggtatcagagctcaggttaaagaagtgtgagagagatggagggagtaccagctgctggagccaatgcttccaggtcgccacaacaccgcggccgccatcactcgttatcgccaacaccacggcgaggacgaggtcgaggcgctgctgttcgagaggttgttgtgcagcggactgtcagggaggttggcggcgctgctgctttccccaccctcacgcgaaccaactacaccgagtggtcgctgctgatgaaggtgatgctgcaagcccgtggcctttgggacgcggtggagcatggtgaatgcgatgagcaagaagacaggatggcaatggaggccatcctacgcgctgtccccagcgagatgatctcgctgctcgccaccaaggactccgcgaaggacgcctgggatgccatcaaagtgatgcgcgtcggcgtggaccgcgtgaggaaggcgaaggcgcaacagctgcaccgggagtatgaatccatctcgttccatgatggtgaatcgatcgacgacttcgccctacggctcacaagcctagtgtctcagcttgggacattaggagaacgaatcgaggagcagaacgtcatcgagaagttcttgcgcgtcgtcccagagcgattttcccaaatcgctgtgtcgattgagaccctgttggatctctcgacactcaccatcgaggacgtcactgggcgtctcaaggtggcggaggaacggcgaccagctccaacgtcgacgactactccagccggaggccagcttctcctcacggaggagcagtggctcgcacggcagaaggagcgacaaaaaggggagcgatcctccaagcagtcgcaaggtggagctcgtcagcgacctcgctcccatcgcaagaaaagaggttttggtggcggcgtaggaggcgagaaagggaacaccaatcgggacacggcaccaaacagatgccacaattgtggccgtcttggccattgggccaaggactgtcgccagcccaagaaagaagccgctcacctagcccaaggtgatgacgatgacgacgtcctgctgctttcgcgggcatgcgagcttgaagatgacgatgccactttgttgatggcccacgcttgcgagctcaatgatggccccatcatcgcgccatctcctgtctccctcgttgaaccgcgagtgcaggtgagcctaggagccacggacgctgaggacaaggaggcgtggtaccttgacacaggagccaccaaccacatgacgggccgtggtgacgtctttgctgagctcgatcgaagcatcaccggcaccgtcaaatttggagacagctccatcgtagacatcaagggtgccggtaacgtcatcttcaccggcaagaatggcgagcacaaggttctcagtggcgtctactacattccgcgcctcaagagctcaatcatcagcatcggtcagcttgatgaaagcgggacgcgtgtgctggtcgaggacggcatcatgcgtatctgggaccgccgccgccgccgccgtcttcttgccaagatcaagcggggacgaagccgtctatacgtcctccgcctcgaggttgctaggccgatttgcttggctacgcgacacgatgatgttgcctggcgctggcacgagcgcttcgggcacatccacttcggctcgctagagaagatgggccgacaagagctcgtgcgtggcctgcctcgactggagcatgtcgagcagctttgcgacacgtgtgtcatcaccaagcatcggcgcgctgcctttccaaaggcagccaagtaccgcgctcaggagccgctagatctcgtccatggcgacatctgtggccctatcacgccggcaacgccaagtggccggcgttacttcttgctgctggtcgacgatgccacacgatacatgtgggtggcgctcctagcagccaagagcaatgcacctgacgccatcaagaaaattcagatggcagccgagactcactgtgggcgcaagctgtgtgtatttcgcacggacaacggcggcgagttcacgtcgcttgagttcgccacctactgcactgatgagggtatccaacgtcatttctccgcgccctacgccccacaacaaaatggcgtggtcgagcggcggaatcagacagtggtgtccatggcgcgcgcccttctcaaacagaggggaatgcctgcggagttttggggggaggctgtcagcacggctgtcttcctcctcaatcgtgcaccaaccaaaagcctcactggcaagacgccgtatgaagcttggcacggcaagaagccgatggtcagcttcctacgtaccttcgggtgcctggcgtacgtgaaggagctaaacgatgtgcgcaagctcgacgaccgcagcacacccggcgtcttcattggctatgaagaaggggtgaaggcatatcgtgtcctggatccaaggacacggcgtgtacgtctcgcccgtgatgtcatctttgacgagagccgtgggtgggactggacggcagcaagcggcatagatgctcgaccgagcagcgatttcgccatcgagtaccatgttgagaagaccactgggcatcctatccctagtgtggggggaggcgtggtgaccccatcagcatccccaacgccactacaagagacttcaccagcaacccctgccacaccagcaccaagtcctagcgttgccccaacagagttcgtgtcacctccctcacacgacgaggagaggatcgacgcggcgcactccaacacccctgtccgctaccgcacagttgacaacttgatcggggagaatgccccggcaccagggattgcaaaacgggaactcgaggaggcgtctttgctcctcgctggacctggtgagccatgctcgtttgcagaggcggagggtgatgatgcatggcgagcagccatgcgtgaagagatggacgcggtgaatcgcaatgggatttgggagcttgttgatctcccacatggccatcgcccaattggactcaaatgggtctataaattgaagaagaacgaggccggaaaggtggtcaagcacaaagctcgtctcgtcgccaggggatttgtccagcaacctgggattgattttgacgaggtgtttgcgcccgtcgcgcgcatggagtcaattcgtctcctgcttgcggtcgccgcccaaaaagggtggcacgtccatcacatggacgtgaagtctgcctttctcaatggagatttggcagaggaggtgtatgtgaagcagccccctggttttgtcgtcgccggagaagaagacaaggtcctccgcctgcgcaaggctctttatggcctgcggcaggcgccaagagcctggaatgcgaagcttgattgtactctgaaggagctcggtttcgaccaaagcaagcatgagcacgccatgtaccgacgaaacaatggtggctctgctctactcgtcggggtctatgtagatgaccttgtgatcaccgggccatcgacaagagcaattgaacaattcaaggaagaaatgaaggcaaagtttcagatgagtgatcttggcttgctctctttctaccttggaattgaggtgaagcaaggagatgatggaatctccctgaaccaggggcgctatgctcagcgcattgtggagtcggctggcctcaaggactgcaacccttgcgccactccaatggaagaaaggctcaagctgagccgtgatagcacggcacctcccgttgatgcaacaaaatatcgacggctggttggtagccttcgctatcttgtgcacacacggccagacctagcatttgctgttgggttcgtgagtcgcttcatggagcggccaactgaggagcacatggtggccgtgaagcgcattctacgctatgtcgctggcacgatggagtacggacttcattacaaaagggagaaagaggagcagcggctgattggttacagcgacagcgacctcgccggcgacattgatacaaggagaagcacaagtggcatgttgtttttccttggttcaagcttggtgagttggcaatccatcaagcagagagtggtggctttatcttcctgtgaagcagaatatgttgcagccaccaatgctgccacacaaggaatctggttggctcgattgctcggcgaacttcttgggaagcaacctaaagcgatcgagctaaaggtggacagcaagtctgccttggcgctggcaaagaaccctgtcttccatgagcgcagcaagcatattgatttgcgctatcacttcatcagaagctgcttggaggaaggaagcatcagcgccagcttcatcaccaccatggaccagctcgctgacattctaacgaaggcattggggcgagttcgattccatgagcttgttgcaaggattggagtggtcaagattagttcagaatagaagaacaaggattaaggggagattgttagtataatccttgttctagttagttatttggtttccttagacagtaagctataggctgcagctgttactcggttgtcagactgctgctattagtggtagtagtcaattttgattttacctctagcaggaacatagcagcagcagtattgtcggttcagcaaccgacctatccatgtactataaatatagctattgtgctaacataagtaagctttttcagctcattttcagtttcagtttcagctagactattgagtgtagttcagaagtgatcctaccaacaataaccatcagcatattgtgttcaattgtgcttattacagatttatgcattagcaagcttcagaataggtattaccttcttcagaaatctgttcaaaataacacagcatttacgattgatgatgtctcaacatcttgagggcttcctctgttgactttgctatcagcaccctgctgctcgttcccatgggttttcactttgagcttatgattattatatgcaacaacacctgctattgctgcagatcgcagaaaaaatggtgtaaaagaaattaatgggcccaaatttggacaagggtgtaggataaaataaagttaaaccaataagagaaaaaacagtataatatccctatcaaataaccaattatatttataaaggtaagctgtgtatctgcaacgataagagctgacagcaacaccacagtccaatccctcacaattccagtaacacgagctgtcagtgcactagttctggaaatgacaaggaagactgtgggattttgggtgaaagtgcatatgcagtttaagaacaatgtgaatggtgggaagttctatgagactttcattcatcttgggtgctctaaataaagacacacaaagtgcaggaaaacaatatgataaagttaaaatagcaaacaggtttgaagttaattaattatgagatcaagtgggcaagatatatgcaagggctaacatagtacatggaaatcaagttaagcctaacacccttttttttttcagaaaaatctcatgaagatcagtctaagggcttctgtgatgactccacccatccggttaaccacacagacccagctgattgtattttcaccaacagatgccacaattaccccaacgctgatgacaggcacgatagcaagcatttaacagctcatttcttcaagggcaaaagcagctttgagaagaaacacagctactacaatgctcgaacaaagagtacattaacatcatattttaaattaatagaaaccagagagctcgcatacttatttccttcaacatctgcgcaaatgcaacagatatgtagaggtacgcactgctccctagacagtgtatcattgcaaacattgctccaattggaacgaccgaactaatatatcttgcaagttcaggtgtactggttagaaagaaatacatttctgggtttctgatactcattattaacaggacaagcaagcagtatgccaggagttcagcgttacatgctagttaataaacaaatagtgaaatactttttctgaaggaacaatggcattgaattagatagaaatattgtagagcacctaaacatttgcttctgggtagctacagccaaatattgaaaatcaaacctttcgaaaagagtacaagccaaatatagctgtgtttggtggatgttagttgtgttaacttcagggggaaaaaacggcaggcagttgtggtaactcaactgttcaacagtcttctgtcaatgtaaaaccttcattatctaccatgtaaaactatctcccaatcctaatgtaattagtcagcctactttggctggcccagctaaaaaaaaaagagtgcaagcaagcctactcattacactattcagaattaagaaacatccacccaatcgagatccagggactaccaaatttcaaattacttctattatgttctataatcgtatgcctcttgacattaccatatgcatattcagttgctgcctcagtcagaatctttacaaaaaaaatgtgaaacccgctcaattagttgaaatcttaagcataaagttttttttttcattaacaacaaacagcataacatttttttttcctgtcctaagaggaggtttcaagaaacagctgtctaactgttgtccttttttttttccttctctaacatgagatgcatgtatctattttgacaaaatccaacaatgtcagcaaggatataataatacgtcttcaacatatacatataaatgcataaactacattcctgctttcttctatcagtgaaatggcagagctccaacccattccctagaaaaaaataaactatattcctga

SEQ ID NO: 6146 - DNA, 29627 bp, Oryza sativa
acaaaaaaaatgtgaaacccgctcaattagttgaaatcttaagcataaagttttttttttcattaacaacaaacagcataacatttttttttcctgtcctaagaggaggtttcaagaaacagctgtctaactgttgtccttttttttttccttctctaacatgagatgcatgtatctattttgacaaaatccaacaatgtcagcaaggatataataatacgtcttcaacatatacatataaatgcataaactacattcctgctttcttctatcagtgaaatggcagagctccaacccattccctagaaaaaaataaactatattcctgatttgttcagatgaggagagacagacttgcaaatgctttattcatgctgcgatgggtcatggaacatgatatactgatgaaatactactgtgcaaataagaaaaatcatacactgttcatgactcgcatattggtagtcattccctcctcaatctttccaatctgggaaatataaggttatcagtatttgttgtaacatctaaggcagtgagcaagacctagtcaagcggttcaattttagctctgataagaaataagtagatcaatcatatgattgcaagcaactttccagtcccattatctccatttccgtccgctccaccaactccagcaacaagaatggacgaaggaaaatcagatgcctttatgattgtatcaatagtctcttgcaaatcagtcatcgcaccaccctggacaacaaagggaaaaacattgacaacatggaaacatgggttcagcgttatacatactgtgactattaacagaacgaagtatttctgctgattcatggcaagtgattggtttgctattgcagtagtagtgctaattactggacaaaatagtgttggccagccaatgatacattacgaagtgcactgatataaactgacataatcccttgtgttccttcaacctcaggaagtttaatatagtcaggcactcggccaataggcaaacagctaacatataatttcaagaagcattttaaaagcacaaaacactaagtacataatttcttacagaagaaaaggaaatgttctgtaaaccaaaataagatgggtgagaaaaggaagatttccacgtttgcttcccagatgtggtacttagaaattcttctacagaagatgtcatggtgattaaggtagcaaagagtaggatacctcaggttgatagatgctgccattcaggttgaaacagtggaaataggaaacaggacatcaataggtctagctccaaagcccccataaggggaatcgcttagcagggtcatagcattgtagtgcatctctgtttccagtactgcctgccaaccaacaaaaaaacagtggaagtacttaaatcaatgttgtcatatgaccatcagaacacaagaactaagagattgttacaaaccatttggccgaccagtgggttcgatgtaatgcaaggaatctggaagccatgggatttccatttgaagctacagagcacaaaacatccaagatttcaaggcaacgacttcaagacagtatgcgtttatcaactagagagctgacgatgaaatagtgggagggccagcaagaactagcacacctgtgaagtctatggctaccatgaaattcaattgacacccccctaatgagagagcacaagttagcattagattttgtccttaagaaaaaaagatagaaactcgccaccgctgcgcgcgcacacctaacctgcgccaaaaagcatgcgggtgctgtggatgccgcgcccgcgcggcgcggcggtggagctgagcgccgccgcatggctcgccgccccccgccgcgaggagcagcaggctcaattagccggctagccaacggcggccgcggcgcgaggcagggtgagccggtgaggccgcggcgcgaggcagcccgtggcagtggagcggagtggccgccggtgatcgccggcggcgtaccacccggccgccggcgagggttttgtggatggggtgcggcggtggctttggtcggtgggtttgccttgcctttgcctcgcctcggggagacttggaatgggagggagtgggccccactctctccctctctctctccaagagagtagtagtagtagtaggacaaaacaaatataatatttaaaaaaaaacacagagagagacgtacatcaccacccttggccttggccggcatctttcgcaacaccaactccgcctcgcctaaaacccttcctcaatctcttcttctccggcgccggcgacggcgttgcaacttcaacgatgggaagaagaagaagatcatcaagctagtttttctagatcatttccacggccctatccacagtttcgtcaccactctctctccaatccagtgcttgaacacagcaaaagctcctgctcgctatatctatctactccgattcaaaccccccaaaccccttccgatcgatcccttgctggtaggggtgaaatcgggtcgggttcggtcggatctcatccttcccatatcctaacccacattttataatcggaatcgggtcgggcacggatattatcggatacgaatagaagcacggataatatcgggcataaatacggaacgaatacgtaccaagacggatacgaactctatcggttacgaatatttattcaaatatcaagtcaaagcaacaaccaaatataccacatagacaatagccattcagccatttcctatatgtctattatgaatatattaggggcttatggcatcataatgcctatcagcaaaactgtaccaaagtagtagcaaaagtagacattcattgcttgatagcttcagactcaatgctgtactgatctgaactgtgaagtgaaggctagggtttgtgcttggcactttgtttggtgggccttttggatgtgggctggctgttgcctgttgtgttggcctgttgggcgcttgcctgttgggctgttgtccatctatccgagtaatatacggatagattatcgggtaatacccgcataatttcccggataatccgtatccgtcggataccgctctcccgaacccgatctcatatccgcaaaaaattacccgtattcgaaccctgtatccgtgtaagggtccgggtacccaaattcccgacccgaatttgacccgaaataatgtggccgggcgggcggtcgggaaatacccgccccgttttcagtcctacttgctggtacgcaaaaatgcctccaacgaagaaggacaagggaaaggaaaagattaaggaggtagaatgataatttttttaaaaaaagcttcatgatctttattttttttctgtttcttcgcgcggtagcttgatgtgtgtttggtttgtgcatttgaaattttgcgtgtttcttcaacagcccaagccatcggatgatttctacttggatctgggtgatcttcctaagagctatgccaatctaatgaaagatattcctcgtcgcttggaagaaattatcaaagctgaggcgccctccaccagtaaggggaagaagctcttcaagaaaatctcggggaagctatatactgcccagagtggcacatttttggttcatctcacgcctgataaggatactgcagattctggaagagtgtctctgctattccgctggaaagacttgtatttcgagggattttactccaagggtacgtattacggtatatctaatctactcgctttatcatgcattatattactaacttattaagaacactagccatactgcctcttgcttgctggatgtgccaattgttgttggttgatttggtatgtatagtgctaacacatggagaatcggagacgcacgattgcaatggcccttgtccaggagtgttcatgcatatgcaccgcttttgtctggaattgtttcgaattgggaggttaaatcgttgcaaagttggagtactacaagtatttgaggcctggaatagttttgagtttccaaattaagggttgtagttctatgaggcatgattaatgctgtagagacttgcattagcattctgacatgaaggatgcaattaatcatgtgacagtactatatatatactcttgcttgcatgcatgcatgcatatgtcaattgtggttggttgcatgcatatgactctcactgctgggctacttactagcacactgacacactggtgtggaggagcattgcattgcaccacacccccttttgtcaatttggagttaatttgtttaatttgggaggttaattaaattgttgtacattaatgtgtacaatattgtgttaattgccctatctgttgctttcgcagggatttggttcaggctacaggattttcaggcagaactccctcctcagtctcagttgccatatgctgccaagggtgggaaaggagtggtgattctctcaatcgaatctaactatgcagggataggaggaaataccatatacatgggctctgatgcattcgacaaatgtctgaaagcaatgctgagagcacctgacctggaaggtcataggctctactcggttctaaaatcaaacagagttctagctgtccctgttgtaggaatatctgaacctttaaggttccctcaattccaggaatgggttctctcaaccctctcaccacctcctaccgatgctgaccactcctcgtcgtctgatgatccttctcctggaactgatgctgctgaatcgtactctgctggaatgggtacgggcagggacaagaaggttcctgagaaattctccttctacttcacaaaatggggcacgctttctgaaggattgttgaacaatagtgttccagaagaatttagcacgatgtccattgatgagatggctgcacttcttggcattctccgatggatggaggggatgtcattacctgcaccaaggagtggaactcatgatagtgaggcctccagttccagaccaagcagggctaccaagggtaagcataataccagtaaatagatgatagctaggcacaagatgtcaatctggaaagagtttgaagctggttgcggacaactaaggttgatgtttcgatcaggcacaaacgtgcttttgtgattgagtgagaacatatgcatcacacgtactaagttttcaactcaaaatacatgcaaataagttgtaaaaaatattgttcgaacatggtaatttgcgtgtgttttttattctttttatgatgcattttgagacaaaattttaaatgactgtgcatatcatcattgcaatctcagattattttttcttacaacaaaagagaatggcggacgcgacagggggctgcatgacccacgttaatccgtcttatatattactctctccgttttaaattataaatcgtttttaattcgattagaatcaaactattataagtttaattaaatttatacataaatataataatatttacaacaccaaattaattttattaaatctgtaattaaatatattttcataatatatttattttgggttaaaaatgttattatttttttcaataaatttaattaaatttaaaataatttaactttaacaaagacaaaatgattatagtccaaaacgagggagtactagttaattatctgagtaattaagcctactaatccactgcgcgctgttcacgtacgtaagccatgaccaccagtccgagtcttgcaagcaggcactaggcctcacccatatacgacaagacgttagttagacagtttggtgaatttaactaaactaaatcatttctttgattacttacagtaataatggtaatttaatcaaccaataaaagccctgatataaagccctcatgaattttagtccccatggtataatggcgaaacatgcccaaaccatctactctagtcgatagtattgtgttactagtttatttcataagcacacctatatttaatcatgcatgtgtgttcagtgttcgccacttaaaaggatgaccatttaagcgcatgtttatacattaatataaacacttcctgatccttttcaagtaacgataattaacctttgtcgtaagtagcattttttttactactattagtttctataaatccatatagtgtaacattataagatttatatttctaaaattcactagaagaaatttttttataatgtataattaaacaacattgacctgatcgatttgccctattaatctttagttatttgagtggttttacgtgtaatttcaaggttgttttgaaaacacccgatccactttgaaatctaacaaaagcgatatagatacctatacaactcaccatatatatatatatatatatatatatatatatatatatatatatatatatatatatatcttaaactttaacatgcaaaacatgtaatatgacatcttaataaagcacatacgcattacatcatcatccacgtttaatttccttctagtagctagcttaatttcacatctagtactacgaccttccatttcaaatatacgtaatattggattagcatacgtacgtaaatattaggggtggttggatgacctactagctagtagttctaaaagctaagcgaataaatatgttttcttgaatttaacacaattttattataattgactggcataagagagaaaatatagaaactgatttgatttgatttgaatgtctaaaacaactttatatttgtataagacttagcaaatctatgaaatcttgatgaggggatcggagactaaagtacatgcaagtcacttgagtacgggcaagtgcaatgtaagaataacaattaattaaggaggaaattgataatattgccactcgatttgttgggcttttcaccctctgcgtaaggaggatttgagccctttttttcactgattagtcacatatgcatgaaaggaccaattaccaatgactaccgttattagttgcgttaaactggtgtcagttcaaaaaaccggcacctataggagctttggaaccggcatcaataaaaatttttctactagtgatgcctgttcgatcatccacctgctgccattagcaccagctaccgactaggagaagcggctaagtgctaccgtcttgaagcaccctgcccttcaagctcctcaatattccccccactcccttctaactgagctccacttattgtcagaagaacacaaggagaagaagcaggactattgtcgatcaccccaagttcccctcccctaaggatgttgagatgcgccaccaccgtcaagagaaacaccaaacctcacaggcaggggtggatctaggatttgcttggagggtggactcatcctcttcttctcctttcagcccccctactattattcccccttccctctcatcttctttccgtggggatccaacggggttgaggggactcaagccctccagtattcacgttggatccgtccctactcatacagaagtcctctagcatcgcttgctatgtctactatgctacttgtactgtagtgtaggcaggtaagttagggcaagagtccggcgggagtataccagaggaaggccggcattgagatgggggctgtcaaatcttggcgtgcggcacccgagtcactcaatttgttctcggctggtcctatggagacatagaagaagggagggggtgcgttatataggtatgtatactattgtataggcatcatcctctctatgccgaatatgtgcaaaatagtaaatcttcaaggtaacaacgaagtgtagcaaataattcattaatttgagcgtggagggtgttattttatcaaggccaagtggcaaaccgtcgattttctcttcattaagcagcctaaagatgcatttattattccgtttaattagctatcctggtgtttacatccaaatttggcacctatggacgaaatagaggaaaattgccaaagtttggagagtgccgggtttccttcatagggccggtcagaccagaggtatatgggcggtctgaccggctagtagggccggtctgaccacaggtatgtgggcggtcagaccggcagggtccgagtccgagtctgttttcgtcgggtctcgggtttccttgctcgggaaggcatgtttcgtgtttcctttggtttctatcccgagttggacgtagagaagggcctatagagggtaagaccaacccctatttaagggacaaggccggttcattgtaaaacccccaaatacaatctacttgaatcattcttttactatgttttctattttaccctagttttagtccatctttgtcggtttgcgccgtaaaccgtccgccgccgctgcgagagtgcgacacctctttgtaggtttgtcctgaaaaccttccgttttgcccacgagacgggtagttatcctcatatcgatctaaatcagcctagaggctgattttgatctctaaatcggctccgctagccggtttagcttttctttttgcaaaacccatcttgatttggccctttggttagatcgaggtggttggcgactccatatcaccgcaaggcgtttaggtgttgcgatcgtgcttgtcgacttgtcacaaaaagttgccaacacgatttttggcgactccgttggggaagagatccgttcatcgtcaactcaacttcgacttcgccatgatgaagccgccatccaagacggaggtggagccatccaatatgatcctggtcacattggatgacttcgaaggagaagatcgtaaagctatggaggagtacatcaacgagttcacgcaggaggcgttgatgagggcaagcactaggactcgtcaaggcgtgatcatcaagcccgggccacgtcctaagctcactcccgactcggtaagcaatgatgaggtatcacaatctatccaacaacaaattgcatctacaatagattcatctatgcttgtttttaaagatcaattagatgcaacttttgagggtaaatttgatgagtttttaagggttaaattcggccctcttttggccgatcacatggtaaaaaataaagcctcttccactactaatcaacctcctataggtcaaaccgaaggaacggcgcacacggccggtcagaccgcgacacagccgtcggtccgaccggccagacggccggtcagaccgggtattaccccggcggtcagaccgggactcaggccggtctgaccgcgcctctggacgccggtcagaccgggcattgggccggtcagaccagcgcaattataccaatacaggggatagatccaatgactaatgctaggtatttgtatcatcttagaacatctgatcctcctatatctactactacaagcaatccccaagttcccccacatgttcctaatgcctataatgatgttgctaggggatatcctcccgatactagacaaggccaatataatcatattgcgccacaaacacaacctattaggccaccaaatctaccgctaaatcaacaagggcctaataatatggaggatataattagtgatattatgaggaatagattcaggatcgaaactaggaatcgtgctagaacttacaaaaagccgtatcctgattattatgacattatcccatatcctcgtggttataaaattcctgaatttacaaagtttagtggtgaggatagtaggaccacatgggagcatgtagatcaatttttagcgcaatgtggtgaggctaattggaatacatgtaaattacgcttgttttctttatctttgtccggtactgcttttacatggtttacttctttaccggcaaattctatttctacttgggctcaattagaacaaaaattttatgattattttcacactaatgaaactgagcttaagttgtctgatttaacatcggttaggcataaatgcaatgaatctgttgctgattatatcaagagatttatgaatgttaaaaaccgatgttttaatttgaagataactgacaaagatttggccaacattgcatttgatggattacttgattctattaaagagaaattgaatggccagatatttcttgatgttgatcatgtgttgcatgaagttctggctcaggaaagccgagtgaatgacgatagcttacatgctagtttagatgaaagtgcaatatcatgtatagccgaaccaagcgatgtttcagattgtgttaatgatttgtgcaatgataccataacgattatagccgaaccaaatgttggttcggattatcttgctagcttgggtaatgatgcaacaatcattatagccgaaccaagcaacggttcggagtgtgttactagtttagacaatgatggaatagccgaaccaagtgatgattcggattgtgttgctagcttagagaataatgccattgaagatatagccgaactaaatgacggtttggattgtatcacaagcgaaagtgaaatagcattgtcacctaagaccgagtcacaaatcggtcgtgtggatgttgaaaagatgatgacaatgtcttgcggaatagtagtgaaatagaatccaaagtagccatgcatacatatcaaaggccgtatcctgaacacgtagattcggtcccatacccgcaaggatttgaggtgcccaacttcacgaaattcacaggtgagaatgctatgactacaatagagcatatcggccgctttattgatcaatgtggtaaggccggtagtgatgatttgcttaagttgaagttgtttcccctttctttgtcaaactttgcatctacatggtatagtttgcttgctcctagttcaatttctacatggtcacaaatggagcatgagtttcatggttatttcaaagatgcaagcttgatggagcaaagaccgattaatacttcatcggtcacttgtgaaactatttcggttacacctatgctaagaccggaattgttagtaattctctccctattaatcctattgatgttgataaaaagaaagggaaaaatgttattgttaaggatcctcggcccaagacacttaggatcaataatgcgaaggccgaagatcataaagttgcaaaggatgagtcatctagtatccaaaggaccaaaaagccgaagctcacttttgatatgcttatggctaaatacaagaaaggattagccggtcaatgatttgacaaccaaactagtgattcgaaaagaccaagatcatctcgtaggaagagatttggtcaaacatcaaagcaatcggagccatcaaccataccaactccatataaacctccaattgtgatgccatggtatccatatccaatgtcactatatggttatccttttatgtattacatgccatggatgcctcaattctctacgccgtttcatcaaggatgggaggaatcacctagggcagtaccaagtcattctaactcaagacaagaccgtttcccacaaaagaatcggtccggtggatcaaaggtgaaaaaggcgaagaaggtgtgggtgaggaaggaagccaaagctccggaggtcgttgctatcaaagaggagtctcaagatgttcatgtacctactggagatgcgatggaaattacgcaagcaaaggagatcgaagccgacgccgtgactgtcaacattggtggtctaaccgagatagctggccggtctaaccgccagactatggccggtctgaccaaccctcctggccggtttgaccgacggcttgtggccggtctgaccggacctagaggccggtctgaccgaggggcattagagaagagtgagaaaattgagagcaacacaggaggttccacttcgaccaaaaatatgaagaatcatcatttggctcctggaaaacaaccacagccgaagtggataccttccggcttatctcgctctcaaaacaggaggcttcagcgtcttcgggccatgggtaaaaaagaaaaggagaccaaagatgtggagaacaaaacatgtaacaatttagatcctcgaacgacatctaggcaagtgtggagacccaaagaggtaaaagttaagagaccggtgatttcccatagtagagataaatccaatttgatgagagaagaatcatcggtcattagagataagtctccttcgcatgatgctatggatgttggtgcggtgttcatcttgccttcgaaatcgtgcagtcgagaaagccgattttgcttgaggggcaagacattaatatgctcatgaagaaatcaagagaagatgaacggcgatggatacaacatcacatctttgagccgccgttcgtcggatgctaaggcaaggtatgggtttattgtgtttaccattatatgcctatgccatgttaaaacattgcttgtgtcagggttacgggttaggtataccccttacccttcgatatgcaccacatatcgacatggcatacccgcgcatacacgggcattatctgcatatactaaggaaatcttccacagtgtttaagtcctactcggacaagacagggtcgtcaatatatcgtgtagggtccgatgtctccgagttcgacttggagaccacttgatttgcgatataaaagggatcccctgggaggacctaaaggatggaatctgatagccaacacaacccccacagcctacgaagtcggagcctgcaggagccaaatcgccggggatctagtcgaatcaacttaattacgatctcgccgcttcatcgagttccattgttccctttgtaacatgtggttttccatcatataatcccatatcaactggattaggactattacctatcaaggggcctgaaccagtataatttttgtcttttattgcttgatgtcgtactacgtagatccttgtaccaacgtaccccaataccctctatatccggtctacgggtatcacccgtcgacagtggcgcgccaggtaggggggcttggtgctcaaggttttactactatgtcatccagcttcgtcgacaacagcgtcaacaccaacctcaaccacgggtttcctgcttcaacaacgttggtgtggactcaagtcggcgaaatcgtcttcccggtgtacaccacgatgccgatctcagccggtccatcaatgaccggaaacgagaacgcagtggctgcaacccaaggcgactccatgtcgaaggaccctcccgccgaagcagggaatggaacatcgacaacacccgagcttgagaaggattctaatgcggccgaaccttgtctttccgacaagaaccacgagccgacgagaacagcttccgaagcgacaaggtcctggtgtcctatccacaaaaccaggaaacatactttgcaagcctgctgggtcttcctcaatgcccacgccgaaattcgcgcctgtagagagcgtggaattcagcgcgtttctccaactcgtgatgtctattgtcctattcacaagacaaagaatcacgacctctcaagctgcaaggtttttctcagcgccataaagatgtcatctcctaaggtccagccatcaagcgtatcccttagagaggaagacaagagacagggaacgacgctgacctcagatcgattcgttggtgcgattgacatcgactcccacgaaccatcagttctacatctactcaaggactatggctcgtcatcaacgagtacaccatgcgaggtattggctatcgatgggaccagcacgtcagcacgcgctaatgccgaggcggagaatcaagtagttacaccggctcagcgcatcagtacccttaacacaatactgagggaggcaccttacgatcccgttctgaacgacgatcttgcgtggtggcaggaacggctacgagaatcagtaaccaacctcagccacacgttcgaaggggctgctgctgatgcacacccggaacagccaccaactggcggcgtcgatggcgaaaaccccgaacagcgggagtcaccctaccgagcaaccccttcaccccgcggcactggcgacctccgcgatcacctgaacggccgacgagaagcacgtcgcacacagggcaacgggagccgctctcgacatcacatcccttcacggcatcacgataatgaagaacgaggaggccgctcgaacgaagaccgagaccgtgatgatcgcgacaatcgtgagcggcgggcgccgggcaataccagtcgaggacgccgccataatggcgaagacgacagagatcggccccgggacaacgacggagggcgacgatgggattctcgagaacccggccgatgtcctcgtaatcctacaccagaaccaagcgattcttcgtcatcgtcatcctcttcttcatcctcatcgtcagatagacatccacgaaggacacacgatcgccgacaacccactgcccccagcgctgggtgtagagctttcggtcgttccctgcgtgatgtccgatggcctgagagattccgacccggaacaatagagaagtacgatgggagtactaacccagaagaatttcttcaagtctactccatagtactttacgctgccggagcagatgacaacgcattggcaaattatttgccgactgcgttaaaaggctctgcacgttcatggctgatgcatctaccgccctactcgatttcttcatgggcagacctgtggcagcaattcgtcgccaacttccaaggaacttacaagcgccatgcgatcgaagacgacctacatgcgttgacacagaactcgggtgaatccttgagggaatatgttcggcgcttcaacgagtgcagaaatacaatccccaagatcaccgacgcttctgtaatttgcgccttcaagtctggcgtcagagatcactatactacccaggagttagcgacaagacgcatcacaactactcggagattattcgagattgttgagcgatgcgcccacgtggacgatgcgctgaggcgcaagaacgataagccgaagaccgggggcgagaagaaaacagccacggacgcacctgagttaagcaagaagaaaaaccgcaagagtgcgaaaaggaaggctcaagcggaagttctcgcagcagaatacgctaacccatccaagcgcccagacccacagggtagcgacgcaaggaaagcatggtgccccatacacaagacggacagacattctttagaagattgcctcgtttttaaaaagtcgctcgagaagcacatggcattggaaaaaggcaagcgagtacgcgtggtcgagaaggacgcggaggcagctgctcaggaattggactcagcatatccagactctgacctccacgtttcacacatcttcggaggctccacatcgtactcttcatagcgagaatacaagaaagtggaacgtgaagtctgttcgacatggcagggggctgcacctaatatgaagtggtctgaacagaagatagaattttcggaagaagagcatcccaagactgccgttatcccaggacgctatccgatcgtggtcgagcccactattcggaacatcaaggtcgcgcgggttctcattgacggtggcagctcaatcaaccttctcttcgccagcactttggatgcgatgggggtcccacgaagcgagttgacgcctaccaatcaacccttccatggaattactccccagtcctcgtccaaaccattgggcaaaattacgttgcctgtgactttcggccaagcaaacaacttccgaaaggagcagatcacctttgatgtcgctgaattcgatacagcgtataacgccatcatcgggagaactgcacttgcgaagttcatggccgcatctcactacgcgtatcaagtgctcaagatgccgggaccgaagggaataatcaccattcaagggaacgcaaagctggcggtacaatgcgacaagcggagcctcgatatggtcgagcaaacgcccaacccacccgccacaactgagcctcccaagaaagtgagcaagacaaataagacgccgaaaccagacggcgccatcaagatcgttccactctccagtgccaaccccgacaagaccgtcaagatcggggcatcactaagcgaggaataggaaatcgcgctcatcaccttcctccgcgacaatgctgacgtgttcgcttggcagctgtccgacatgccgggggtccccagggaggtgattgagcacaaactcatggtgcgacccgatgccaagccagtaaagcaaaaactgcggagatttgcaccagaccgaaaacaagccatacgagaagagctcgacaaacttctcaaagctggctttatcagagaagttcttcatccagagtggctagccaatccagtcatggtgcggaaggccaacgggaaatggaggatgtgcgtcgatttcatcgacctcaacaaggcgtgtcccaaggatcacttccctcttcctcgaatagatcaactggtggactcgacagccggctgtgaactgttgagctttctcgacgcttactccggctatcaccaaattagcatggtgaaagagaacgaagagaagacagcattcatcacgccgttcggggtattttgctacgttaagatgcctttcggactgataacagcagggaatactttccagcgcacggtccagggcgcacttagtgaccagctcggcaacaatgtcgaggcatacgtcgacgacattgttgtcaagaccaagacaagcgactcattgattgacgatctgcgggagacattcgacaacctacgacgatatcgcctcatgcttaatccagagaagtgcacgttcggagtaccgtcgggcaaactgctcggtttcctcgtctctggcagaggaatagaagcaaatcccgagaagatcaaagcaatcgagaacatgaagtcgccacaagactcaaagaagtacaaaagctaaccggatgcatggcagcactaagcaggttcgtcgctaggatgggagaacgaggacaacccttcttcgctctgctgaagaagaaagacaaatttgtatggacacaggaagccgaagaggcattcgttgcactcaagcgctacctaacaaacccccctgtacttgttgctccccaacctaatgaagaattatttctttatattgtcaccacgccatattccgttagcaccgtcattgttgtcgagagagagaaaatacaacgaccagtctactacgtcagcgaagctctccatgacgcaaagacaagatatccgcagattcaaaagctgctctatgcagtaatcatgacatcaagaaagctacaccactactttcaagcccacagagtcacagttgtctcctccttccctctcggtgaagtcgtgagaaacaaagacgttgtcggccgcattgcgaaatgggtagtcgagctaagctagtttgatgtccactttgtgccacgaacaaccatcaagtcccagatactcgccgacttcgtagctgattggactatgcccgacaacaaatcagacaaccaaatcgacaacgaaacgtggacaatggcgttcgatggtgcactcaacagccaaggagcaggggcaggattcatcttgacatctccttctggagatcaattcaagcacgcaatccacctcaacttcagggcaaccaacaacacggccgagtaagaaggactactcgccaggataagagccgcaaccgcatttggggtcaaacgactgatcgtgaaaggggactccgaactagtcgcgaaccaggtacacaaagattataaatgctccaaccccgagttatccaagtatctcgcagaagttaggaagcaggagaaaaggttcgatgggatcaaggtccgacacgtataccgcaaagaaaacgtcgagccagacgagctagcacgacgcacgtccagacgagaaccactcgaacccggcacttttctggacatcctggcaaagccatcggtaaaagaggtcagcggcgaagttaacccagacacccccgacatcagctcggaggccacagaggcagaacgcgccgttgccgatatcaaaaccacagacgactggcgcaccccactgatcaaattcatcaacagcgacgagttgctcgaggacgatgcagaggccaagaaaataacccgtaaagcaaaaatctatggcacgatcggcaatgatctatacaagaaagcgccaaacggggtacttctcaaatgagttccgtccgacgacggcagacacctcctccacgatatacacgaaggcatctgtgggtcacacgccgtcggtcggacgttggtcgggaaagcttttcgacaaggattcttttggccaacctccctcaaagatgcatgcgacatggtccagcggtgcgaagcctgtcaatttcacagtaagcacacaaagctacccgcgcaagcgctccagactatccctctcacttggccgttctggtgctaggggctagatatactcgggcctttcccatgaggacagggcggctataggttcctattcgtggcgatagacaaattcacaaaatggatcgaggcgatgcccacgggagaaatcaaggccgacaacgccatcaaatttatcaaagggatattttgcagatacggactaccacatcgcatcatcactgacaacggctcccagttcatcagcgccgatttccaagattattacatcaggctgggagtcaagatatgcttcgcttcagtctctcatcctcaaagcaacgggcaagtcgagagggcaaatggcatagtgctacaagggatcaagacccgtgtctacgacaggctcatgtcacacgacaagaaatgggtcgaagaactcccatcagtactatgggccgtacgcaccacaccgacaacgtctaacaaggaaacacccttcttcctcatgtacggctctgaggccatgctccccagtgagctacgacatcaaagtacatgagtacagaagtactccgacgaggatcaggaggaacagcgaaacgacgatgtgaatctactcgaggaacatcgcgaacgagttgccgtccgagcagccggttaccaacaggccctccaccgttatcacgagaagcgcatccgagcacgcatactttcgacgggttcaaagccaagcagggcgaaacaagctctcacccaaatgggaaggaccttacatgatcacgcaagtcttgcggccaggcgcattcaagatagcagatggcgacggccgcgagttggcaaattcttggaacattgaccaactacgtaaattctacgtataggtcaatatcatccatacctgtaagacaccttacagtatcaataaagcctatgttcgggcacatattacaattacagtgttcatgcctgatgatcccttacccagatgatacctagcgttgaaacctatccttatgtccctttacaccgtcctgacaaggcctccgaggaacctaagggatcctcggctggggacgcccagagccgataaggtcttgtcggatcctgtagagacgaaagaccatgtaagacctggtcgtgtaagagttctcgccgtgcgtattaaccaagccgtgtaatcggaaaattaactttccaacttcacggctgggggctaggatcagtgctttctcaaccaaggcaggtcaaaggtctaagagccttgtcccccgagaagtatcctccgacgacaaggctgggggctagggagagtgtacgactcaaacgactgaccaaagtcgtgaactgaggaaacactcttacacactatatccagagtaagaaagattcaccaagatagatttcttccctacttcgcaaaatacttcttacaattatatacaaatccagaactttattacattctttccctaagatatctgtcacagggtacgaatactaccaagaaggccaacgccagtccatagactggaaaaccttctccgctaacggtgccatcgacttcgccaggtggtctatctccgcaggagtcctctgagaatgagtgaatccttcatggagaaactcgaggtgcagttgcggacgatgatctcgtacacaagccaatacatgccctcctgcatatcggctcgatcggcggcattcctgtttcagagcctcgtcaatccgcttgccaacgccctcaagctgagtacaagccccattcaaccacgggatatatccggctgctgactcctcgggatccccgcgaggtactcggagctctctgcaaacttgggccatggacgtgcagcaactcttcaggtatgagttgaaccacacctcacgacctcaaagtgtttccacggcctgctccttctttacttccaacatggctctctcgagttccaccacttcaaatttcgtcttccaatattggatacgacgatctcggtcagcaagtgcgttctcgaggtctgttcgacatggaaacgactacgttaggctgctcttctctctcgagaacacggttgatcaagtcggaggagcgaaaaggatgaaaaggccaccaaccaaaggaagtcgtcgccgtccccgctctcccgggtacaatgtcattcacatcgtccagcaacgcgtgtccctcaaacgcaagaatcggagggatcactggcgactcaggttgcccgcgctgctggacaccctcgtcatcagcatctctacaaaggacaaaaattcccgaggtcaacatacaagggcaaactagaatgataattgcacgtattctgaggcggtccaatttcaagttttacacagcatgtcttggaagtacaagaagacctactcttcaaatagggggagaacagattccccagatcaccgacttcttccatcacctccttacgcgtggtactagccgccccctgatccaagatctcgcgcagatcgagttcaggacgcgatagctttacgcacgcaaggacataacacgccccagtgtagatcccgttcgatgtctcctctgcgaccctggccgcatgcttggaggggatctccgtcatcgccgtcaatagtaccgcaagggaggaggtcagcgaaaattcgtcaggattcaccgggatggtagacttgatgccgcactccccggcaagctggtgcagcccagtgtaggtgacccgcaacgagccctgaatttccgacaggttgtgcccgagttccgacatgcggttctcgagcccctaccgttgtcgctcgttgccggccaccagttccctcatcttcgtgaggtcttcatgagcttccgccaactcgcgcaccaaccggtcagcacgcgcgttcgccaacgccgcttctgaccttgcctctgcaacctcgtggccaatgctgcgggcaccagcttctaggaggcgccccatttcgacttggagctcctcccaggcgaggatagcagtgggcggaccacgacctgccgcgggatcgctgactgggccactaggcgtcacctcccggctcccagctgcgagtacgacatccgtcgaggccgcggtaggcgaggcgctggaagcccctcctgacttgctctgcgcggcctttgcccacgcttccctatgggacgaccacggatcatacaacgcttgaacagaatcatgggaacttaaaaacccaactacttacttctcgccgatcgtcacaagacgttgtcgtcgcggaggcgggggagatgcgtccaaagcctgaaagacaaccaacgcgaagtaaggcaaaatccctctggctgcgcgatctggcgataggataacttaccgagggggtcggcgctttgcgacgatgtccgcttacagaggagaacttcctcccctttgtcggagcattgccaccactagtagtggccgcagcagcatcagacgcctccttgacaaccttctcttttagagacgccgccacctgatggtccgcgagcggcccgatgatgtcagtcagaggaagagcctacgcttaatcaagtcataagatgatctcaagaggaaaggcgggatgtccatcgagtatacttacgttaatagcggcatcacgctccgtcgcccccttttcacaaaggggcacggggacgtcactcgccgttgtcggtccactgatcattaactgcccgacttggcgctccacggccctactgctcaaacctgtgaatcgaggaccaagtttcgataaatcaagaggaatgcgaacgtgagtatgtcaagataaatacgagaaagataccccgaggagaaacctgggtcgcgtcctcaggcctggaatagttaaaggctagatgggcccgagcctggagcagctggatccgcctaccaacgaagtccgcaacgacttcataccccgacaagccccgcactcggagatcgttgatgaagtcgataaacgactgaagaaaggggtcaaaggaggcttggcggtccaagacgaaatcttgcccggttgttctgtgggaacgatgaagacagggttcgaatctttgacctcaagataaaaccatctattccgccatttgttgcgagaagaagggcactagaacgggatataacgcgacttcaggccatctcgaagtcggaacccaacggagccagataccctgttggactccatccaacgcagttcgtagtagaagcgaaaaagatcaagaaaagactctaccccaatgtaagcctcgcaaagatgagcaaagatgctaagaaaggcaatagaattggggttcaaatgaagaagagaaagaccatagaagttcaaaatcaggaggagaaattcggaaggcggagggagaaaaccgcagagaacatagtcttcgatcgcaaccatgcgacctaagacgggctggggattagtacctcctgcttccctctccatggctccacgaccaggaagggcgccgtcttcctgaagctccttcagcgatgcgctggtggaagatgacttgccgaggtccatcgctgatcgaagatcgccggtgaaaggacctaagttgctgaactagggtttttgcgggagtggagaagacgagaggcgcttgggggctggagaatttttccactacaggcggacttcaaatgaatccccaaaactcccttaaatagacgcacttccgacggtgcgaattccaaggaaagaagagagatggccgccggaaatttctgggtccgttacgcgcggcggtttttcagactttagtttaaactcactcgtgaccgttgggcttcacacggtgttctcgatcatgtcctgtctctacggttcccacaccgagaacgacatcagcctcgacatcagaagtcgttattggtcgcacgggttcatttaagcagaagttgggggctactgtcagggttacgggttaggtgtaccccttagcctttgatatgcgccacatatcgacatggcatacccgcgcatacatggacattatctgcatatactaaggaaatcttccacagtgtttaagtcctactcggacaagacagggtcgtcaatatatcgtgtagggtccgatgtctccgagttcgacttggagaccacctgatttgcgatataaaagggaccccctgggaggacctaaaggatggaatctgatagccaacacaacccccacagcctacgaagtcggagcctgcaggagccaaatcgccggggatctagtcgaatcaacttgattacgatctcgccggcttcatcgagttccattgttccctttgtaacctgtggttttccatcatataatcccatatcaactagattagggctattacctatcaaggggcctgaaccagtataatttttgtcttttattgcttgatgtcgtactacgtagatccttgtaccaacgtaccccaataccctctatatccggtctacgggtatcacccgtcgacagcttgatatttagcacatgtgtgttttgcttatcaaatccatattatacatacatgttgcaaatgccagttctaagtggtggaattggtaggttggcatataatatgtttgaagtatgatttggctcatcagtctttaatatttatttaaagccaaatcgtatgtgtttttatgggtcaccatataagatatagatttattgcaccatgaaagttttgcttattagtaattcggctaatatcaatggtcaatgtgatgatttgttttagagttattttatttaggaacattggcattgttaatattttgcatacacgctcaagccaattacttacatttgtagtttattggaatctatgcatgtgacacatatgactttggtgattcattattgattatacttcaattggctaagtgttttgatgccatgatgattattgttttaaaagccatttgaattagtattcatctagacatgttagttggatgttatagtttttcatatgtctatagagaagaaaatttggtccaatagtttgatacaccaagcatctggctattatgtgaagaaaaattatatactaaaggccgatgcttgatttcaaaggtttggacgaaattggcaaagtcatagaccaggggcggtctgaccagcattgcacggccggtctgaccggtggtaccggtggtctgaccggctctggatggccagtctgaccgggcagacagggtggtctgaccgacattgcgtggccggtctgaccgatcccagacagaaggctgggggcacattacagttgattaaaaggccgaattaattgtgaattcggacatttgtgcccatgagttagaaatagcttggagaattcctttgattagatatttgaaagatcctacacttaaggttgattggaagattcggcggcaagcattcaaatattatatcgccgaaaaatagatggagtattgttgaagtacttagataatgatcaatctaaagttgctaggagaatagtacatgaagggatttgtggaattcatcaatcggcccgtaagataaattggttgcttaggagagtggggtttcattggccgaaaataattgatgattgtttcaaatactatagagggagtgaagcttgttaacggatcagcaatgttcaattagcgcctaccgctgtgttgaatcctatcattaaactatggctgttccgaggttgggctttggatttcattggtcaaatttatccttcgtcatcaaaggggcatcggttcatgctagatgtaatggattacttcactaagtaggccgaagccgtgccgctcgagaatattacttacacggaggtaattgactttatttttgaagcatattgttcatagattcggtattccttaaactttgatcgaggagcttcttttatgtctaagaaggtgagaagttttgccgaaattttatgatattaagttgttgagttcttctctctactacgctcaggctgatggataagccgagtcgagtaataaaacattgttgaaattgccattttgccagttgaggtaaatcttggctttcttcggtattttaagaaagacgacttatcgattgaagattacaagaccttgatgggaagcaattttgaagacgtcatcgacaagcgtttgaagactttgaaggagatgaagacacttcaagacggtgttttcaaagagcaattaatgggaaatacttaaagaaatacttcccgagcatttggtaagatgcttaggaagtcctatggccggtaattggattatcgccctaagacaatatgttctatgcttttagattcacgatattcatcaaaaaggcaggggggcatgtgtttacaccaaaatttggcacctatggacgaaatagaggaaaattgccaaagtttggagagtgccgagtttccttcacatggccggtcagaccgtaggtatatgggcggtctgaccggctagtagggccgatctgaccgcaggtatgtgggcggtcagaccagcagattccgagtccgagtctgttttcgtcgggtctcgggtttccttgctcgggaaggcatgttttgtgtttcctttggtttctatcccgagtttgacgtagagaagggcctgtagagggcaagaccaacccctatttaaaggacaaggccggttcattgttaaacccccgaatacaatctacttgaatcgttcttttactatgttttctattttaccctagttttaatccatctttgtcggtttgcgccgtaaaccgtccgccaccactgcgagagtgcgacacctctttgtaggtttgtcctgaaaaccttccgttttgcccacgagacgggtagttatcctcatatcgatctaaatcggcctagagcctgattttgatctctaaatcagctccgctagccggtttagcttttctttttgcaaaacccatcttgatttggccctttggttagatcgaggtggttggcgactccatatcaccgcaaggcgtctaggtgttgcgatcgtgcttgtcgacttgtcacaaaaagttgccaacacctgggtccaagtttaactgattaattataaataatctttctaataatgagtattgtagtctctgtagatctacgtgagtacgtgcataccccctcgtcccaaaaaagacaaaccttgggtttccgtgtccaagtttgaccatccgttttatttgaaaaaaatatgaaaaaaattaaaaagataagtcacgcataaagtattaatcatgttttatcatctaataataataaaaatactaattataaaaaaaatttatataaaacgaacagtcaaaagttatacatgaaaactatggtttgtttttttaaggacgaagggagtatcatgcatggcagaacagattacgttatatgggctaagtacgtgtggcgcatgcacttaccattactccattctactcgtgtcccgatcgatcgagctggcaagtggcaaccacacgcaagcaatacgtacgtacggtacggacgtgtcgacgtgaccagagtgtcacggcaccacatgcttagtactgtttaaaacgttttgattttgatcaaagtttcaattttaaagtttaactaagtttataggtaaatatagttacattaataaaactaaattagtttcatcaaatcagtaattgaatatgacggagcgtggggctcctcaccgggagaccgcgcaggcccccctttgccggttcggccgggggccctgggtgagattctaagctcctagtctgtgtgtggaaggttcgcgagaatggaaaaagcacaagacacgggcgatgtatacaggttcgggccgctgaaaagcgtaataccctgctcctgtgttttggtggatctatgtatgaagaagctacaaaagagctggagaaccagaaagctcttactctctccctctctgatcgttctgtatccgaaaaaatcaatcccccttctaagtgggcaaggtcctccttttatacctcaaggggataccacatgcaccatctctctcttttttttttgtggggacttatcctctcttttcataaacagacggagacttgtatggttgtcgtccgagtgaccttctgatgggacggcccatacctacctccacttccgccggaagcaggcgcgacgtgggaacatggctgtctgctgacgacatgaccagtgtcagaccggtcacaaatcggtcattcttgtccaccacgcgtcagtttatcaatctgcatgttcgcccctcttcatacaatgtcttgcttgtaatggttaggatgaagcctggtatatatctgaccgggaccaacgtgccatctccaggagctaacacgccggctctggctagggacgagtgcttggaggctctcatcctgatgggatggggcgaggcgtgcgtcagaccgcctgtcgccacctaacccacgatctgatcggtctgtgactggtcacagaccggataaacgagcgcgctgcactgcgttacatgcggcgtgacgcgctcgtccaaaccgcaataaatgtggttaggtgagccctgctatgctcacctaccccgtatacgcggcgcaaaacccacaaggggtcggggcgcctcggccctcgaggccgagacgggagcggtccgacccctcggggagacaaagagaagggcggccgtatcaccctcgggcccgacccccccccccgagggggttaggccacgtgggtgatcgtgtctgcctcaagtctctaagtcatgatactcccggtcccatgtcaccgacagtagcccccggcgttatgccagggcgatcgccctcctcgagggaagcggtcgggcgtgacgccacttcctaaggcctggtgacaggtggggccggtctaaaaatcgggacaagccggttcgtttttcctggagatatggtgatggcgcttcggtcggcgagcgtaattaacgcgcgcacgagatgttccatctcgactgccacagccgcatatccacctcatgcaccgcaaacgggcgaatgggattagtggaagcgtgggcgcgagaaacgagggggcaagatagtgggcgcgagaaacgaggagccgggcacagcgttggtaagggtataaagtcgccgaggaagagatttgcttccttcctctcgccattattccccttgtcttcgccgcttgcgccctaactccttgtttcctgtgccctaccttcgccacacgcgctcgctctcaaacatctcttcttccagcgtcatggcacggggctccgctccgcttgacggtagcgtgctgccgccttcccgcatcgtgagcgagagacaggccgggctgccgcgccgcttcatgccggaatctgccaccggccgggagatagtctcgctgggcgagagatgcccggcgccacgctactcggggtggtccgtcttcttcctcccttttgctatggcagggctggttccgccattttcttctttcttcatggatgttatggagttttacgatctccagatggcgcacctcatccccaacgcggtaatgacattggccatcttcgcgcacctatgcgagatgttcatcggggtgcgcccatcccttcggctgttccggtggttcttcaccgtacagccggtgtcgccgccgtcggtggttggtggttgctacttccagccgcgggggccggtgctgaaccgctacattccctgcgtcctccgcaagaagtgggatgactggaagagcgactggttctacacccccctcgccgacgaagcgcgcctccgacttccgagccagcctccagcgcaggcctccagctggcgggcgccggtagatctgggagatggctatgtcacgtcccaaatcgaccctaaaattcatcctcgaaattgtgcaaagaataattaaaattcatgtgaaagcctccaacaattaaaatgtgcaaatctaaaagtcaaataaggcttggaggatttttgtatatttcctaaaagcctaaaatgcgtaaataaattttagtggaattttcagagcacaaataataattgaaaagaaataaacaaagtggaaaaggtttataaaaagaaaaaaaccctaaaagaagtcttctttccccccttcccttcttgggccggctcggcccaatcctctccttccctctctctctctcctttcccccgcggcccatcggctcctccccgcgcgcgcgccgctaacaggcgggcccgcccgccaccctcgctgacgggtggggcccacctgtcatcccccacctcgcgccgcgcccgccgctcgcccgtgccctagcgccgccgccgtcgcgaatctcgccgcctcccgccgtccccgcgcgcattaaagaggggggaattattccccacgattccctctctctttcccccggg

SEQ ID NO: 6147 - DNA, 4254 bp, Oryza sativa
aagctataattaattaattattacccgagatcagcataatagcaacaaagtcccgcgactttggaatagatggcattatattacctgtctatcagttggaagaccttgtcaaaaaccttctcctctttattcattgagtcgtatacagtgactctgcatgcgtccaagtcaaaaaagaactggacccagtggaatatggaatatgcgtgagatgagataaatatcagaatgtacatgttatatgtatgggaatgaaatttgttcgaacgacaataaaaactcactctgtgttgtacggcaatagtatgaacgtcttgaaatgctgttgcgttaggagatggacgagattgtcctctgtgtctttctcgtacttgtcgagcatttcggtgttgattttccgagggtcaatgaacccagtatcgtaaaccccccgccgtcaggccctttgaatctccattctacaacaatgaaaggaaattattattgcttacatatatgccaggagctaattattgaacgaaacaaatcgaactcaaagatacttacaaaatccatgcgctcagaagagagacgtcgagggcgtccagatgataccgatcgaagacatccttgaaatggatccttagaacatcttctccttccaagaagtcggggtttctgatcctcgctccgaacatctctctacccttggcgctcatttccatgtaccgttcatggaatttgtacatttgtgttggtagggactgcagctgctcaggcctgacaagcggtttaccgagttcaaacttgtatgccacttccgccttcgggattggtgcgcctccaaccaactgagcaacagttagaccggtgtccgaaatgaaatacgttatgccaaagtcttcgccggtcgccaacggctcgaccacttggtttggttgttctccaagctgaggaactggtttggacttcttgtaataggctttcctaagtgttcggtcatagtccgttagctttaaggcctccttgtttgtggtggacattcccttgaagaaattcttcacgctcgggtcaataggtatcttcttttcaggactccgaggcttgagttgcctcttcacttctcctgccacataagcgtcaagctcctcttaactgcaatcgtacggcggctccttgtttttggtggtgtcaactttggccttcttcgttgcccttgtgctggcaggaggtggagcttggcgagaccttgtcttgggaggtgcaggcggacacggtggaggtggaggtggaggaggcggaggagccggaggagatggtgcatgaggaggtggcggaggagccagaggagatggtgtaggaggacatggcggaggaaccggaggagatggtgcaggaggagacggcgaagccggaggagatggtgcacgagacgccgcttgtcgcccagggaggatgatgtaccgcttgcgctatagtataatggcgtgccttgtgtctcgtagatgcgtctcaccatctcctcctaggtagtccaactcgaggtcctcgtacacggcttccaccagctcaacttcgaccctcgagtatcctgctggaatcggcctgcagtggtaagtccctgaaatgtccgttgggatggccattcccgacgccaccttcacgtgatgagaggttatctattagtaatcaacctaagcagcaacttgcggaacgtacaagtcaaaaatcatatattacatcgaggataccttgattgataagttcttgaagggaatatgcagctcacatggtgtccgttgcgtgatctcatcaacggggcaggtggtttcatcatgggtttgcatggcgtccatgctatgtgatcctacctgccccgttgaggcgcagctgctacgattacctgattggctgaccattggaggaggtatgtacggctagggatcatgtgaccgatgtgctgccatgcgttcatccaccttccgggccacctaatcttgcatgctgagctcgtagctcgataccctgtactcaagatctgcaatcttcgcctcggtatctctcttgctcctcatccgactcctgtacgtgtggatgtcctccttgaatcaaatcttccagggaatcacgccttttactcgtgttcgtcttggatgctcgggaatctgtagggcgagtgacagctcgtccttctctctgtcgggtcggaacgtgcactgagaagaggcttccactatgtccgttagtcgactggcagcctcacgtatctgatcgctgaagaccagggagccatcaactgggttaagcgttccaccgtgagcatagtaccagaacttcgatcgatccggccatttagcggtggccggttcgatacccctctcaatcattcttgcctccatctcctcccacttcagtattgcgacgctatagccacctaaccccaagtggtgatggtacttcttcttggcagcgttttccttgtttttgaccatcatcgcttgcccttgttgccctgtcttgtcagcaacgaactcgtcctaatgatcccttagctttgggaatacgtcgaagttcggtgttagtaccttcaggatgtatttcttgtacagatgtcccttgaagctcttgaactgttctgccattttcttaagagtccactgtttcactatgttctccgtacccgcagggagcgtgaacgtctcgagcattgtggtccacagcttctctttctctgattccgggacaaagctgtcattatccccgcgtgcccttgttctgcgctagtacaccttcctgacaggcacgttatccctcacaacccaaccgctgtgtcgtacaaaattcttggctacttctgccgggacactaggtcggccgtctgcgtccacctcagttatgatgtgccgaccctctatcttcttcgcagcacctcgttgtccgcgtgccctcttctgtccagtggagggatgacttccactagccgcctcctcgttcccctccgcatccctctccacgttgccctcctcgttcccctccgcatccctctccacgttcccctcctcgttcccctctgcatccctctccacgttcccctccttgttcaagtactggttggatcctcgttcccctcttcttcgttccagtactggctgcttccctctgcgattgtatcgtacagtatctatttctcatcacgatcagccatctgttcatagaagaaatatttgctaagcgtaatattaaaactctactaatcttgtattaaaactcaaataatcatatatgctaagtctaagtgtcgtgtattagaaccctagataatcatatatgctaagtctaattaagtttcgaatattacatctctaataatcttatattaaatctctaacaatctctaacaatcaaatatgctaagtctaattaagttccgtatattaaacctctaataatcttatattaaatctctaacaatctctaacactcacatatgctaagtctaattaagttccgtatattaaacatctaataatcttatattaaatctctaacaatctctaacactcacatatgctaagtctaattaagtttcgtatattaaacctctaataatcttatattaaatctctaactatctctaacactcaaatatgctaagtctaataatctaataatcactaacactcacatatgctaactctaataatctaataatcttatattagaaatctaacaatcttatattatatctctaacaatcacatctttacatcacttgcctgcacgaattccttcgagggctagctaccacttcggcttgagggacgacgacgatgacgtcttctctgcaacatgcaaaaaaaatgtattagtctaaacgcaaaggaacatataatgtatttcacgttttcaagtatatataatcatatatatatatatatatatatatatatatatatatatgctaagttcaacaatagtttaattatctcgttcgtacacgtttcgctcgcgttcgttcgcgttcgttcacgttcgttcgcgtttcgttcacgttcgttcgtgttcgttcacgtttcgttcatgttcgttcacgtttcgttcgcgtttcaatcacgttcgtttacgtcgttcgcattcgttcacgtttcgttcgcgttcgttcgcgttcgttcaagttcgtttgcgttcgttcgcgttcgttcacgtttcattcacgttcccctccacatccctctccacgttcccctcctcgttcacgttcgggcggctgtgcgg

SEQ ID NO: 6148 - DNA, 1267 bp, Oryza sativa
ttgattgacacatttttaaatatacattgatacaaggcacatatgttaacgaaccaaatttggtaatatcagcatcggagaaggagattagatcgaagctatcggtgaagtgggcccgggggtatgtggaatgaggggaatttacctttcccatcctggcgcatgacctacagcatggccctacccccgtaccccgcggatcgcaggagcggccagggggcctcggggtgccacgtcgtgcccctcgggccctcgcccgttttgccccgaggcctcggggtgtcacgtcgtgcccctcgggccctcgcctatccgccatctggcggggggagcaagcggggagggggcccaagccgaacctcctttaatgaacgcagcgccccaactgccccctgccgcattcaatgcggtaggggcagacgtgcggcatgcccaactggcgcgcgatggtcaggaatgactagtctgtgaccggcctgtcaccggtcacatatgactggacggacagctgtgcccccacgtcacatctgcctccggcagagtggaggtaggtatgacccgtcccatcggaagggtcattcgaggtcctccccatgagaggatggccaccacaattcttcatccattaatgggggattgacaggggtgtcccccgtgtcaggcaagggacggcgctgaaccccactcaaggacaatccgtggcttagcttccaggcgaaggcacgggtcgagatccggtcaaggtagggtgggccccccccacccgagagaagagtagtagagtcggtgcatgtggtatcccttgaggtataaaaggaggaccttgcccaccgaaaagggggggaccaagagaaaaaacctgagctcaaggagaaaggaagtaagggcaatctccagggcttagggacctttgtaacttgtgcctaaatcccatacacagcagtagggtattacgctcctttgcggcccgaacctgtataatcttgttgtgtgcacactacctggtagtctagtgggcggatacgtgattttcagaggcgggccttttcccccggtcgaactcacgaaagggggatcccacgatctcccgctagagaggatcactcctcgacagaagcggaatcgaagataagggctgtcgcgaaaacagagtaagaatcgggtagagtctggatcggctacggtcaggatcggcagagttcgagtcagacagggctagccgatacaaccgattccaagaatacgactcggtgtacatcagcgggtg

SEQ ID NO: 6149 - DNA, 16174 bp, Oryza sativa
ctaaatgctgtacgatgcaccaactagcaaccttgctgtactgggggactggacgaatcatgccacattaggtcgcgccatgcaactcctaccatgcgccatagttgcatcggctgcataacccgtggtcactctggtcgcacataccatcgaacatcggatgcatgtcaaacatcgaccaccacataaatttcgacataccttgaaaggtataccggaatgaattcgcgcatgccacatgaattcacatacatatttagcccattaatggatcatccgatacatactgcacttatgaaaagcttcaattgtgtctaattgacactacgctcttgccaaatcgatcctgcaagatcatgcatgttggcatcagcacattaagaaaagcactaagtaccggacgtccacaagaataggactaaaaatgtccaccgcaccattattgaaattcctgccacttcaatggactcttagctccaaagacaacgaaatatcaataaccggactattcgaaatgtgttgtccacttaaaagaatactagtgttgactcgacacacgtgcatgtcccacaaccataagggctcccaccgaaaaaaaatggaaatttttaacagaggtacgaacttatcctaaattccttgacaataagaaggattattttcagtcgtttagggggagagaaataacccttaaaatgataaatgtcaggaaaaatggtcaaagaaaggatggatgcacatttaatcaagaaccagcgaatgaaagtatggaaagcacacataagaattggataactacctatcacttttgtgatctggagagcatgactaagttgcattacccgaatgtaatgcaccggaggagggtgaaataccgaagaatgcaaaggtatacctcatcttgtccagatgcctcaaaaaataaataggacaagaactccggctccttaaatctctaaagtaactggagacgtatggtgaaaatgggacgaaaggaactttcaagctcatagtcactaaaagtaaccccagaatttgagggggagcctgttcagagctggcaaatggtatggaacctcagaacatgtataccacatcttcctatcaaggaagaaaaccagcagttggagtgcacaccaatgccggtaaaatgaaaggatcatgcccatgtcaaagaatagaagcataagaaaattgcatatccccatatatcgatggatactcacataagtgtcacatacaaccaataggaattggtaatgagacctgctatgggaaatattctcttcatacagcaaatcattggcagtcaacctggagtttaaaatcaactaaaagatcaacccgcaaagctgacctgtagttgacaatgaatggttaaagaaattttggattgggcactcgcatacaagcattaaaagtcccaaaccaagttgatgatcttaatatcatcgcataaagaaagaaagctcactctttccgaacaagtttgagataaaataggtagaaacctacgtttctttggctcataaacctacaacacatgaagaagtgaaccatagaatatcagaatgtgagaatacataggttccttggatatagttcaccatttctagcaagtaacatggttcgagctttgcccaaaccccaaaatcattatcaagaagataatgatatgtgcgtcacaccaacactaatagattgtatgatctctacaagttatggaaaaatcatgcaagatttgaccattgaagcatcactcggactatcttttgaaaacataagagcaacgagttttgatggttcacacttaaaagagatgcaaaattcaaggggggaattctgccagtctattaacaaaagcatgaactaaagaatcaagtacccaaaaacgattaagaaaatcgatacaagaatttgggtaaattgtactctttttcccttagataagttttcttgcagtttcttatcaaggtttttaataaggcaatctatgtgacatacatgcgtatgctatgtactctttctgcaatttttcccactgggtttttatggagttttaacgaggcatagacatcacgcggtgagtgcccaagggggagtgttaagaaactttaggcttggccgatgaaggcctggcccaaatacacttaatgggcccatcaacgaacctttcatatattggaatgcactatataaagagaggagggggctaatcatttgtacagttgattggaggattgaatagtaaagagagtctcacccctaaactttgtgtctccaatattttctgtagaattacgggaccctcttgaactgctttgtgtagcaggagggttgcgtaatacccttgaccctaaaggttccacaaccctgaccagggtatcattattaagaagtagagaagaagatgaggcactggaaggctgttatatgtccaagaaacattagctgccaccatcactttgggatggagagaaaaaagattgaaacaactaccatgtcaaaggaactctgaccatggttgcattcacatgggattataggctatagtgtcaagagtcaaaacctcgagaaggagataggccacgacgagcgcaagaatgtggatgtgcgctgtagtgaagcgcttgcttgagttcaaccatgtttagtcacatgtttttcttccttttatactgagggattgtttggtttagggtgtattcgtttgggaggaatttcaaaggatttggatttctaaggatcctatgaatgtcattcggttcgtaggaatgtagatatagaaaatcaaagaaaattttctttttctacaagttgcagagagaagaaaggaaactttccatccacataaacctcatggaaaaattcttacggattgaagtatgcatgcttttctattcctccacttttcctaatcctatgagaagtttctactcacagaaataggaaaagtgaaggagtggaaatgtatgcacacaccaatccataggaaattttttcaagagtttagagtaaattaaatgaaaatttttctagttttctctctacaacttggaggaaaacaaaaaaatttctttggtttttctatacctcattcctacaaaccgaatggcacttgtagtagttaatcattaggaatctaaattctttgtttttcttcaaaccgaattggtttagatagatccttaatttgcagcccttagaggatgcaatttttctttttgctatattcaatgaatgaaatagcaccgtctttgtgtctattcatttaaaaaaaatgattacttttgactggatctctacacgatatgcattggtgcagtacaataatagagatcatcttgcttcttattatattcagcttgattgacacatttttaaatatacattgatacaaggcacatatgttaacgaaccaaatttggtaatatcagcatcggagaaggagattagatcgaagctatcggtgaagtgggcccgggggtatgtggaatgaggggaatttacctttcccatcctggcgcatgacctacagcatggccctacccccgtaccccgcggatcgcaggagcggccagggggcctcggggtgccacgtcgtgcccctcgggccctcgcccgttttgccccgaggcctcggggtgtcacgtcgtgcccctcgggccctcgcctatccgccatctggcggggggagcaagcggggagggggcccaagccgaacctcctttaatgaacgcagcgccccaactgccccctgccgcattcaatgcggtaggggcagacgtgcggcatgcccaactggcgcgcgatggtcaggaatgactagtctgtgaccggcctgtcaccggtcacatatgactggacggacagctgtgcccccacgtcacatctgcctccggcagagtggaggtaggtatgacccgtcccatcggaagggtcattcgaggtcctccccatgagaggatggccaccacaattcttcatccattaatgggggattgacaggggtgtcccccgtgttagtcaacgcttggcgctaactaccaatcaacgacagaccgtggtttagtttgcagatgatggcatgggtctaggtccggtcaaggaagggtgggctcctccccatcccagagaagaatagtagagtcaggtgcatgtggtttcccttgaggtataataaggaggaccttgcccaccgaaaagggggggaccaagagaaaaaacctgagctcaaggagaaaggaagtaagggcactctctggggcttaaggacctttgtaacttgagcctaaatcccatacacagcagtagggtattacgctccttagcagcacgaacctgtataatcttgttgtgtgcacattagctggtagtctaggggacggatacgtgatttccagaggcgggccttttcccccggccgaactcacgaaagggggatcccacgatctcccgctagagaggatcattcctcgacagctggcgcgccaggtagggggatttcgcgcgcttcgaagagaagtcgtttccttccgctccaagccttcctccggccccaacgatcatggtggaggttttagaggaagaggtggaggtgcagacccttactccttccaggagtgaaggtgccagcgggagtcgcaacccgcgtcaccgccgacgcggctcgcggactccgcccctctccgaccccctgcggagggaggttcacgcctgatcgggtggctcggccctctccccgcctctggatggggggaggccatggcacgtccgagcgcgccgctgcctgacctaccgcgacggcagctcgccccagggcgcgctttaggcagggggagccctcctgcggcaccccccggtgaacgtggagccggaggcccccgtccaacgatggttggacgacgtcgccaacttggtcaccactgcccagcggcggttggccgtaagtggccgttccaccgccacaggtacatcacgtacctccaccaccctctcctcgtcagcaaggaggagggcccgtcggatagccacagcctcaaggcgatctacggccccaacgtcgtcaggggcctcggaaagtcggaggcgtcacgatagcctatacggggagcaggacgctcgagtcaacattgagcgtcgacgagacgagcgccgcgctacccgcatgggagaaggcgcctcctcgtctggagtgccgcgtttctcctcgcgcggcggcccgcccctcacgtccaccccagggggaactggttacaaggccttcgtggcgagtctccggaacgtccggtggcccccaaagttttgcctcaacctcacagagaaatataatggcagcatcaatccctccgagttcctccagatctataccacaatcattgtggcggcgggaggggatgaccgggtcatggcgaattatttccccatggctcttaagggtcaggcgcgtggatggcttatgacctagccccccgactccatccactcctgggaggacctgtgccagcagtttatcacaaacttccagggcacatacccccgtctgggggaggaggcggacctacacgctgtgcagcaaaagtacgacgagtccctccgctcatacatacagcgcttctgctaggtccgcaacattattccatgcatcccagcccacgcggtcgtttatgcattttggaacggcgtgcggcacaaccgcaagctggagaagatcgcctccaaggagcctaagaccaccgctgagctcttcgagctagcggacaaggtggctcagaaggaggaggcgtgggcttggaactcccccagcaccggtgcggcggcagcggccgcccccgagactgccccccgctccaagcggcgggacagaaggggcaagcggaagccagcccgctctgatgacgagggccacgtccttgcggctgatgggccctcgcgggccccgcgcagggaaagggccaccgacggcaagacgagctataccgccccttctggtaagggtcggtccgcggacaagtggtgctcggtgcacaatacttatcggcacagtcttgccgactgccgctcggtcaagaacttggccgagcggtttcgaaaagccgatgaggagaagcggcagagtcgacgggagggcaaagccctcacgaccccagccaatgatcagcgagaggagtctaagaagaaggcccccgccgacgatggcgatgacagcgagggtctggagttccaggtacctcagggaactgtcgccactctcgatgggggggcttgcgctcacacatcccgtcgtcggtcacatctgatctgtgaccggcctgtcaccggtcacatttgactggacggacagatgtgcccccacgtcacatctacctccggcagagtggaggtaggtatgacccgtcccatcggaagggtcattcgaggtcctccccatgagaggacggccaccacaattcttcatccattaatgggggattgacaggggtgtcccccgtgttaggcaagggacggcgctgaaccccactcaaggacaaaccgtggcttagcttccaggcgaaggcacgggtcaagatccggtcaaggaagggtgggctcccccccacccgagagaagaatagtagagtcggtgcatgtggtttccccttgaggtataaaaggaggaccttcccaccgaaaagggggggaccaagggaaaaaacctgagctcaatgagaaaggaagtaagggcaatctccagggcttagggacctttgtaacttgtgcctaaatcccatacacagcagtagggtattacgctcctttgcggcccgaacctgtataatcttgttgtgtgcacactacctggtagtctagtgggcggatacgtgattttcagaggcgggccttttcccccggtcgaactcacgaaagggggatcccacgatctcccgctagagaggatcactcctcgacagaagcggaatcgaagataagggctgtcgcgaaaacagagtaagaatcgggtagagtctggatcggctacggtcaggatcggcagagttcgagtcagacagggctagccgatacaaccgattccaagaatacgactcggtgtacatcagcgggtggagttgatatgcttcaagatgattgccacgcatggataaagtcctgaaaaggcaattgtatctattaattaggatattttatgcaaagtccttagagataaatgtgggcaaaagtctgtcgcaaagacttgtggtatcttagagtttgttagagataatagtcgtgtccggtatggacatatcttgtaatactcgggtataaatagacccctagctccatgtaattaatctaacacacacattcaatacaattttggcgcatcgccacccttttactttcattttgtttcaacgagttcttgctttcgggttgagctgcatcggtttcaatcttcaacaagaggtaaaacttgttatggctgcttgtgttctcgggattagtgcttccatctctatgatactctaatcttgtttatgtaattcatcaagttatcatatatcttgtatattcttcggtaatatagtcatctaacctacaatcagctaacatctgttagtagaaggcagccgattaggttaaatagcggtgttagcttggattgtacaagatacttaccactctatgaaacatccagtggcttgattgtctagatattgttcttcttttcatacttaatgctgcatcagttaagtttgatctatcaagtcgtgcttagaatatcaatctctagcctgcttcctggttgccgattagtatagcatcggagtttcagccgatcttacctgatttaactatagttatcctatatgcttgattgacatgttaaatctgccctttatgttaagatcttgttgcatttaagtatattatgcttctgtctgatatattctatttgctttaatatcttaatatagagtggtatcggagtattagccgatatatgctagatctatctaatcggctacgctattaacgtatatagttttgttgttgatttatatttcgatctaagtgatttatactgtctcggcatggcgaccgatctatcccaatcacttgatttaagtatatatcgacataagaattatatattgttaatgtctacagccaatcgagtaggtttagttcttccttaattattcatgactgctgatcgatgcacacatgacatcggtctaaaataaatgatgtcatcagtacccagccgatcggctatcatttatagatttaattacggtttctttgtcttcattttttgttgattgtaggatcaaatcgactggcacgctcatatatccgaaggcgagttttggacctgcactggagttaagcagatcttccaggcctcgtgttttctgtcaacaccatataaattgttgatgcgtgcatgatacatttaaatttttctgtagataattaaatatcacaaattgaagaagggatataatcataataacagtagtaggggtttgaccaattttattcatttagggaaatgcttcgcatagtttattaatcaggcggtggcgttgagctttgcgatttcgtcatggaatgcatcgacgtggtgagctgtaacacacgctgacatcaccctagccccttgctctgttgccttgagcatgacgcagatcggcatagcctttaccatcatcgacatggagagcaccaccctctgcgggtaggtcatcaccctcgccgtcttcccgctgccgaagtcaacatcttcgaatccgatgtttcgccatgatgtcaagtagagcaggctctcatatccatccagacgatggtcatcggcgagctcccgtagcatcgtcatgtcgctgccgccggtcatcttgagctgctccggtatccgctccttggcgcgccgtatgatgtctacaatgtcgttgatgtcggcgttcgccaccgcgccgctcttcgccacggccacgtgcatcgtgctgcagtttccgtagtacccgtccttggctccgagatactttcgcgcattcaccgcgaagagcagtacggcgggggcctccggatttttcatcaccgcccgggtacggcactgccaaagcacggcggcgacagcctcgaacacggtgacgtcgtcgttggttcgtcgtcctcggaatcggatgtggtcgatcaagctcgacgggacggtgatgttgttgaaggtgtggtcgatggatgccttgtggctggagctggacataaactgataaacggccatggcgaagggaggtatggcctgggtggcgttgttgtcgtcgtctaacctgaccgggacgacggacggcgatggcaggccacgggtgagctcgccgacggcttgtatgaactgtgccatgccgaagccgtcagccaggccatggttccatgtcaccccgactacgaagcctccacaggagagtgtggtgacctgcatccacagcagacggtgatgaaggtcgtcgggcgtgcagttgaaggcgagctgctgcaccaccgccgtctcggcgtcgggaggctggtcgtcgacgcaacacatgagctcctccatggtgcagttggcggacgccgccacgaacgtgactccgagctcctcgccggtgcagtcgatgtagaaatcgccgtcgtcgtcgcaggaaaggcggccggcgataggatagtaggggacgagcgcttgagcgagacctctcttgatggtctccgccgtgcactctgattggatggtgggatggtcgaacgcaagtagcactgtggttggcatcatggaactaggcttgtccataggcgacagaacgatcttgctgccggaggtagtcttcaccggcggctgcgatggccggacgaccaccggcgccgacttgctcaccacaatgctcatactttctctatgtctaggctctagctcgctctgagaataagttaggacaagcaattacagatcatgtatacaaccatacaatccttaaacaaaagcatcatagcactggttacctctatggaattgacgagacaaaagtgatcgaagcaatgtcaagactgatgagctatgagcccttttaaggtcttcatatccatcctaaccgttaacatacaattatttcttaatttaaaatatgtttgcatatctgtcaatcaataaatgaatggctttaatggaaaagagtaatacacgtaagagcaagtttaatagtagagctaaatactagctataagctcatctgaaaataatattagtcaacttgtaaaatggcttagctataaggttttctttatttttatcatagtcctttcttttcttctcacttatctagtataggtagaggtaactcttacataagagttagtacctattatctctctcctccacatatgcacgccacgagccaaagaagactgtcaccggttcaccgagagatggatatccatatataagtacatgtgacacagaatgagtttgacgatatacacatagggtagggggcatatcgattttgttagaagataatggatgacaaatttagaatgtcattctaagtgggtagctgagttaacataggtcaaataagatagtgttagaaataatcttgttattagtgcataatcatgtttgcttaatttggtcgcatgtagcaaataaatgtataggtagcaggataggataaggtacccgaagaagctatagtagtagtacgcgagatccgtatacgagtaggcccaagagccgtgcgagacggccgggtatgtgagatgctgcaggagcacacaaatagtggctggttagtagagtcattagcataatagccgggccattaggatcttagttaattactaggtgtgcatatggatgatctagtcgtgtggctaagagtagcatgcggctgctagtggcgcacgttttggcctctaactttgtctatttaagcatgtacttagcatctttgttaattgagtaaaaaagagaaaaacgctgcgtttgtgcagcaccaaactccactgttctttgcctctaaatgtgtgtgtgtttatcaggagtgtgtgcgagtctatctagctaggaagtgattcccaacagatagcaaatcaggttggaagagacggaagtgacttggaagtatagctgagggaaagtacgttagatgctattatatggtgaattgtaaacttttgatgcaataaaactaaaatcgagaactttccttactatagattcaattttacatttaagtagaagcaccaagtttcttataacttcctctctacaaagtttctttagtaatcaaataatgcatgactagagactgtcccatcaaatattaattggtagtatgggctaggagagtgaccgtgcctgcaaggaataaacatcattcgttatatattggtttatgcttgagctctctaataagaaaacatgcacgttcttcacgcagacttgctatagctaactttcaaatagtttaattcttatctactagcgctccaatattaaatatggttttattataggtatacatattaacaccataacggtattacgtccaaattaattaataccctctctactgttgatgttaatcatcacgtacgtcgccacactatgagcatattatgtgcaacctgcaatggcaatcagagacgagtcgtcacaaggaaggtggatgccaccaaaggaacaaaagcatcatagcaatattaacccgccgtggctgtccgcagagagaacgtgaagcaacgtaaagacgaatgagccatgagcccttttatggtgctattttataactctaagggcttcaaaccgatcccaagagtaggtacaatagcaggctcttagccagctgtaaatatgttttaatgagataaacgatgagagagaagagtagcgggctacagatctatagccagctgcagcacagactccaagacacactgtgtgtacgataggtgagatcatatattaatagtatagtaagcaactattgtataaattgactattagattagctatagatgaattggagctattagtgggctatactattatactagctctaagggcatccacaatgtagcatttcagcaggtaataagcattaaatgccctcttcttacccggtagcaaccattgtgagactagtaagtagatgcagcccggtaacacgactacaaccgggtaacaggaattaaactatgcccagttttcctaacaaaagttatagaaagaagtcacggctagagactgccatccatgattttttctgaagctggccctaccttgtttcccactgatatgctgatacattgtagagtgcatgattgcttactgctgcctgtagccctggcccacactactgacacactactaccaagttgggcaagtaacattgctgttgccctaacggttgatatgtaattgttttttgtaacttaaaatatatttgtgtgtgttaattaatgaatggataacttgaatggaaaggagtaagaggctgacaacgaggtcggtgagaggatttcttgagcacttcgagtgtgacagcgaggtcggcgaaaaatcacgtcaggcccaatgccgtagtcaatgtgtgtatccatcgccgccagctcgatcagagagaggaatggtggtggaagaagatgactaaataagagtaacttgcatgtaggtcccacatcaatcttttaatttcgttgatgacctagttgccatgtggatgccatctacaaataccaccatcaatattgtcttgtgagttaaattacatgggttataacagttttttttttggggcgggggtgttccagatatccggtattgcagttgagggatacgaatcagataggacctatatttaaaggagtcaaattggcaggattatatataaggcatatctcctatatgtgggtttttgttgtatgttaataccaaacctaatattatacgggaagatgcccttggaaacagtaataaaattgatgattctggacggaaactgtcttcgctgggtggaaggctctaaagtcctattcaaaaaacacaaggttcccatggttaattttctatttagggtctccgagttctacttgtagaaaaattaaaagtcaatcatcggttctaattggaggaaaatcaattatcgatacaaatataaagcccttatgaggatagagatcattgaattacgagccataaccaccaaccacatcagtagacaatccagaggaaaccgaagccctatttgctgataagctctcgctaagtcatactcggcgagttctaatcgacggattgccttagctagtctattctcctcatttgtaatcattgtagtcttttcctagatatacgtataaactgtgttagagctattactctttttagagggtctgaaccagtataaacccttgtccttgtctagatacaatctcacatatatcctagtatcaacgtcctccgtactttataaataccgtaggtagataaagcccataaaaaagtggtcttatttcttttgtttggcatagctttgatcggtttgcccattaattttgcctggttgagtaggctattatatggtactccctactccctcggtttaatataactgtcaccattgatccatactattgtaaccgtaattttaaaatggttagagtcttcgcaaaaaaatgattagagcataatgataaaaaaattaatacttaagcatgtagtaatattcttggataatatgatatctacatatttatggatttagaatttctttcagaaaagacaaacgaacacaatttaaatatgaatagtgctcggtttaataaatataaacaaatggatagagtggctttcctatgaatttttttgttctggaaacacgttacgagcgttcatatacacacgcacgtactctcctttataaacgcacaaatacacatcctagtcctatagaaaccaccaacagactatgccacataggcatatctcaagagtggtcttgggaccaactaaaaaatacatagctaaaggttgatgtattcatgggttttctctactggtaatgggatacagggtctatgagggtcaagatctgaagagggaggtagacaatgaagagagctagaacatggtcgctcgctagagagaagcgcttgcttgagtttaaaccatatgaagatgtaaacttttttgtgctatattcaatgaatgggcaccgcctcgtgccgatttgttaaaagaataatagattacttgactggatcggatctctacacaatgtatcgatggaagtacaataatagaaaccatgtgccttcgtattattcagttatatgctttcttcacgattaatatttcttcatctttgtttgtactgctatggcatgtattaaaaaactagaaaagtgcccgtgcgttgcaacgggatgaaaatataataaattgaggaaatattgagaaatatttacattatgtaattaattaaaattcaaattcaccatcttctttatacgaagaaactatatgtgtgtgtgtctctgtaattgcattttcatccctgctaaataagaaaatcgcaattacagatatatatgatgttgaagaaaataattaaaaatgaattctaaactgacctggctatatgttaggtctagcgatgtgtttggtctaacatcactgtactatctagttttggagtggcttgataaagcagtcgtgcttggaacgttgggactgccatggaaggaaacacagaaacacagaaaacgtaggtctagcatcactgtactagcttgttttgtcgtgagactgccatggaaggacacacatgaacacacggtcaacagatagacgctgaatcaaaaacgcccggacgaacgattggagttgcatgtaatgttgcgtcttagttgcacatctcctttgaaaagagatgacatcattgagttcacagatctcaagaacgtattttcatcaagtcattttcattaaattgatctcattgacctctattttgaagagcagcgacaacagaaattttgaatgatgcatgattcttgtggggtataggatatatgtatgtatcgtcctaatccaaattgagaacgggatggactgtccaccttgatttttgtttaagagatttataaatcattttataaattatttgtagaatttatcctaaagttcaattaattttccggtgatgtaaatgtgggaaataaaatttcccaaataaaatatagctggatttaatttttattaaattctccataattaattacactatctgaaattctttcagaattttcagagttcaattgttaattttaataatacaaatatcatttcagcatttatttaaataaaaatctaaataaaaacccttctttttctctgggccacttttagcccatttcttctgtcaaactgcagttgagccggcacgctttcttcccttctcctcccctccgcctctggcccttaagcgcaccaagcctatcaagcaaccacaagtctaatagtcctcgcttcgctcctctcactgtcgcgtgggtcctagtgctacaggtttgtctcctacctccagctagactcccgcagcttcaagacgatgtctaaaatcgtctccaccatgaaatctggtggcatccttggagataatccaaaactgagattgaggggtttcgatttttatctcatactctttccattttctgaagaatcaaagcaaaacctcatcgtatcgtgcttggaatcgaggcctatcctaaataagcgaactctagaatttctcatctcagagtccgtttcactagaatttcccatcacgtatacgtatgataacgacgatggacgaaagtagtcgcgaaatccttatgtatttttttgagtaaagtgtacgggtggtctttaaacatgtaggggtatgtcatctaggtccctaaactctcaaaatgaatattcaagtcctagaacttatcatagtgtgtcatctaggtcccaaatcgccacaaccccttcaggatcctacgtggcgttgatgtggcatgccacacggacatgatatggctggcattattttgactgacaaatgggtcccatttaatttttttttcctttttcttttttcttctttttttccctttcttctccttt

SEQ ID NO: 6150 - DNA, 3374 bp, Oryza sativa
tttggacttcttgtaataggctttcctaagtgttcggtcatagtccgttagctttaaggcctccttgtttgtggtggacattcccttgaagaaattcttcacgctcgggtcaataggtatcttcttttcaggactccgaggcttgagttgcctcttcacttctcctgccacataagcgtcaagctcctcttgactgcaactgtacggcggctccttgtttttggtggtgtcaactttgtccttcttcgttgcccttgtgctggcaggaggtggagcttggcgagaccgtgtcttgggaggtgcaggcggacacggtggaggtggaggcggaggaggcggaggagccggaggagatggtgcaggaggaggcggaggaggcggaggagccggaggagatggtgcaggaggtggtggcggaggagctggaggagatggtgcaggaggagacggtggagccggaggagatggtgcacgagacgccgcttgtcgcccagggaggatgatgtaccgtttgcgccatagtataatggcgtggcttgtgtctcgtagatgcgtctcaccgtctcctcctgggtagtccaactcgaggtcctcgtacacggcttccaccagctcaacttcgaccctcgagtatcctgctggaatcggcctgcagtggtaagtccctgaaatgtctgttgggatggccattcccgacgccaccttcacgtgatgagaggttatctattagtaatcaaactaaccagcaacttgcagaacgtacgagtcaaaaatcatatattacatcgagcataccttgattgataagttcttgaagggaatatgcagctcacatggtgtccgttgcgtgatctcatcaacggggcaggtggtgtcgtcatgggtttgcatggcgtccatgctatgtgatactacctgccccgttgaggcgcagctactacgattgcctgatgggctgaccattggaggaggtatgtacggctggggatcgtgtgaccgatgtgctgccatgcgttcatccactttccgggccacctcctcttgcatgctgagttcgtagctcgataccctgtactcaagatctgcaatcttcgcctcagtatctctcttgctcctcatccgactcctgtacgtgtggatgtcctccttgattcccatcttctagggaatcacgcctttccctcgtgttcgtcctagatgctcgagagtctgtagggcgagtgacagctcgtccttctctctgtcgggtcggaacgtgccctgagaagaggcttccactgcgtccgttagtcgattcgtagcctcgcgtatctgatcgctgaagaccaaggagccattaactgggttgagcgttccaccatgagaatagtaccagaacttcgatcgatcaggccatttagcggtggacggttcgatacccctctcaagcaagcttgcctccatctcctcccacttcggcatcgcgacgctatagccgcctgaccccaagtggtgatggtacttcttcttagcggcattttctttgtttctttccatcatcgcctgcccttgttgacctgtcttgtaagcaacgaactcgtcccagtgatcccttagcttcgggaatacatcgaagttcggtgtctgcccccttcaagatgtatttccggtacaaatctcccttgaaggtctagaactgttctgccattttcttaagagtccactgtttcactatgttctctgtacccgcagggagcgtgaacgtctcgagcattgtggtccacagcatctctttctctgattccgggacaaagctgtcatcatccccgcgtgcccttgttctgcgccagtacaccttgctaacaggcacgttatccctcacaacccaaccgctgtggcgtacaaaattcttggctacttgtgccggggcactaggtcggccgtctgcatccacctcagttatgatgtgccgaccctctatcttcttcgcagcacctcgttgtccgcgtgccctcttctgtccagcgtagggatgacttccactagcctcctcctcgttcccctccgcatccctctccacgttcccctcctcgttcccctctgcatccctctccgcgttcccctcctcgttcaagtactggtttggatcctcgttcccctcttcttcgttccagtactggctacttcccgatgcgattgtatcgtacagtatctgttcctcatcgcgatcagccatctgttcatagaagaaatatttgctaagcataatattaacactctactaatcttgtattaaaactcaaataatcatatatgctaagtctaagtgtcatgtatttgtatggtagataatcttatatgctaagtctaattaagtttcgaatattacatctctaataatcttatattaaatctctaacaatcaaatatgttttgaatattacatctctaataatcttatattaaatctctaacactcacatatgctaagtctaattaagtttcgtatattaaacctctaataatcttatattaaatctctaactatctctaacactcaaatatgctaagtctaagtgtcgtgtatttgtacgatagataatcatatatgctaagtctaactaagtttcgaatattacatctctaataatcttatattaaatctctaacactcacatatgctaagtctaattaagttttgtatattaaacctctaataatcttgtattaaatctctaactatctctaacactcaaatatgctagtctaataatctaataatatctaacactcacatatgctaactctaataatctaataatcttatattagaaatctaacaatcttatattatatctctaacaatcacatctttacatcacttgcctgcgcgaattccttcgagggctagctaccacttcggcttgagggacgacgacgacgacgtcttctctgcaacatgcaaaaaaaatgtattagtctaaacgcaaaggaacatataatgtatttcacgttttcaagtatatataatcatatatatatgctaagttcaacaatagtttaattatctcgttcgtacatgtttcgctcgcattcgttctaacacttttagttcaagtgcattcacgttcgttaacgtttcaatcacgtttgttcgcgtttcattcacgttcgtttacgttcgttcacgttcgttcactaacactcacgttcgttcacgtttcagtcacgttcgttcgcgttcgttcacgttcgttcatgtttcattcgcgttcacggcggtgggggcgcggtccggcgccgtgggccggcccggcagtgtgggggcgcggcggcggtgtggcggcagcggcgttgtctcgcgggggcggcgtctcccagcagtgggggcgcgg

SEQ ID NO: 6151 - DNA, 15702 bp, Oryza sativa
gtggaagagagaaaaaatcaaatggcgcatggataccaaggatcgaaccagcgatcgacgtgcaaaacgctagagcatgtgttcactaccaagatttgtaaatttttctattttacaataataattacatctttcttgtactgcagttatatacgagttacgaatgtaattacactgctattatactataattacatttgccagaaattttagggggattttctatcgaatgttagatagacagtctctattttttaatctaaatgacaacgatatgccgttagaaatatatgcaatgcctttttatcattagaaatatacacaatgcctttctgccaaatgtcccaccacccctctcctcacctcgtctcatatcccctttactccttatttttaagtagttgagatattatttttaatttatcataataaatctcaaaaaagcaacttttaggtacccaaacaattattattcgctcacaccgttatatttcttacaattaaatgccgtaggctctctggaccttccattatatttgagagatgaagtgaataattaaagtcatcaaacaaatataatgaaatatctgacgccttgagagaagaatattggagacattgctaggcctttagcctgtcagtcaactttgattaaatttatggtgtgagaaaaatctacttcgtaagtattcttgaaaacgaaatattttgtgttggttcatgttctaaaattttaccggtcgctcaaataatcataaatatgtaaaataaaaataggaaagaaattagtcctgctactatgaaatcatgctatgttaaaataattttactatatgatttaactaagtatatttatatttatgaagtaatatattttgtctttatttcgtaaaaagtcatactatgaatgcacacacacacatacctacgactatttccgaaagactgggccggcatattttgagattaaagaaatcaccacggatgcctcactattgatgggtacgtcacctacaactgaatgcacacacacatacctacgactatttccgaaagactgggcctgcatattttgagattaaagaaatcaccacggatgcctcactattgatgggtacgtcacctacaactgaaagaacaattaatcgtaaatgcaagcacccatatcaagtataggacttgaacccaggtggcaagttccagaacaagaaacctaaccagttgagctacgcttgctttgcaataatgttggatactaaaacaactataattttttagatctatcttattaaaaaaacaagtgtgtattcatggtacatcacatttcaaaaatgttactgcgcaattatatttcatcgttatcgtattcatgttaagctgcgtggaggttctgacccactctacatgaaatgttcatagatggatcacctctcaaactacatcaattataagagtctatataaacctatacatttagtggagtttcatgtctaacacaattcatcctctaataaaccatgataatatatgcaactaagaaaagaaaaacaccttaattttactttacacttacttttactttcgttaacatgttttcttaagaaaagaagtctaccttcttttcaattgcttatagatgttacttaattatgatataatataaagctaataggttagaaaattataaaagcaattaatgccgacgtaaacaatttatggagaaatcgtggcagatgttatccgtttaatatttcactcttataagtgtcttgaactaagcgtaagacacatgtccgcgtgaaagcgtgggctaccttcctagtttcttttaaaggcagatcgagttggtgcaggtatgacgtattgtacgcggtagcttgcagaggtaaatttggactagaaaacttagttaaccgagatcgatcgatcgagctgagtcgctagctagctagggaactcatctatatattacactaccaactaaatatcaccatatataatactccctccgtattttaatgtatgacgccgttgactattcgaccaacgtttgaccatttgttttattcaaaatttttatgcaaatatgaaaatatttatgttatgcttaaagaacatttgatgacgaatcaagttataataaaataaatgataattacataaattttttgaataagacgaatggtcaaacattgaacaaaaagtcaacagcgtcatagattaaaatatggaggtttctttctgtggagattatgggtgccccatacccacacggcgtggttatccgactggttatagcggataacttatatctatggaatatgtaacggatcatgacttgggtattacgtttcctttatattatggaatagcctaaagttctggtttgattatgttgtaaagtagatttaggaaaccgataccgtattggttaaggtttctatcttgtaatcctgccccccatcctatataaggtgggcaggaggccctctagggggcatgagcacatatgatcgtcatatctataatacactcggcggattcaaatcttcaaacatgagtagcgtattacatctcattgagagggcctgaacctgtctaaatccttgtctccgcatccatccacttttaggtctcgtgccctaccccttttattattgccgaattcatgtttcgacagttggcgcgccaggtaggggtgcgccgagttatctatcaagaagtgagatggaaccaattagaagtccccgaatcagattcaatctagcaaggaaaatcaacctcagcaagttagatcgctccaatctccgacgtcaccaatggtggtgaatccttaagattcaactcgccaagatgccggctggagctgctatacagtccgtagccaaaagaatcgtttgtatccaagagatcatcggccacgtctccaactaccagcctgcacaaccctgctcgatcgtgctgctctgcatggaggtcggccacgggaggcaccactgctatctggacaggtgccgatccagttgtcgtcgtcgtcgccgttttctgttatgctcggtgagattgattccgctgagaacagattggacgcttcgagttagacgcggactcggcgcctcgccggaggcgtgtagcagcgcgtcatccaccgcagccatctatcagccgtgtgaagacagctactcgccgggataacaatcacccgtcagcacatgcacttggacatgcaaggatcggctttgcatctacacgcataaacacatgcatgcatggataaaaactgctttccggcatcggcagatttatcgttccaatctattattatgattatgatattatttttaatcatagattgatctgccttttgattcttctttttctctcgcgtgcatatactggcgtttgatggatccatgattacctccgatgacggcatcatgctgaaggactgtcggttacaggggcagatacacgcacagtggcatgcaatactttcagacgcatggacatgcaaattagcatgcgtatatgctgcatgcatacatcaatatatatagcatataatatctatacgttattgctaattgctattcctaatcagtctgattaatatattgggtattttttgcatgtgagatcatcgttggcctatccatccggctgacgtcgccctgatctggctggagcgagctgctcacacgcataatttgcactctgccgtatgcacatatatacacgcgtgcgagcagattgggagcaaacatgtgtgaggaaatatcctagcgttttccaaccatcactgggcctcttcatcttcaccgactagccgcctcgtcagccgccgactagtgtttccgcctgcacagctggcctattatgccgccgtttgttgggcttatatgtctccactgccggcttgccttcgccaccgccaactgatgtctctgcctgcacggctggcctattatgccgccgttgttgggggtctacatcttcaccgccggctcgcctccgtcgccgccgactagtgtttccgcctacacggtcacaccatagttgttgggcgtctacgtcttcacagccggcttgccttcgccgccgctgactggtgcctccgcctacatggctagtctattatgccgccgttgatgggcgtctacgttgtcaccgaccggccgtctcgtccgctgccgactggtgtttccgcctacacggctgacctattataccgctgttgttgggcgtccacatcttcaccaaccggcttgccttcgctgccgccgattggtgtctctgcctacacggctggcctattatgtcaccgttattgggcgtctacgacttcatcgctggcttgcctctgtcgccaccgactgatgtttccgcctatacggatggtggactccgtcaccgttgatgggcctagtcatctacaccaccggcttgcttccgccgccgccgactggtgttttcattgccattgatggacgactttgttcccacatcagccacctctgccatcatcaagaggaatattacaaagctaagtcattattttttcttatatgatattttccttttcctctgcctcactacatcaactggttaaccgttgactagtgagtcgggagctacagatattatatcatatttttcaacaattttcataatatttatcttgattgcttgcgaaataatacgagtaacaataaagtgcctatcgagttatggagttgtatcttcctatgctttccgtttggtttgtcaatggatagtttgcctttgggctgattcctagcacccgggggctcgttggatggaccaagtaacgcaaggtgctaagtattactcggaagaaatcaaaagcatagagataagataatttattttctactcttaataattgcaaaagtacctgagtagtaaacgccaatccgtgaaactttgtcccattaatggcgaactcatgtcacttatatgcatctttgggaagtgcctaggttgactcccgatgcttggggtctatgactagtcgggcagagtgtttaaacgtacggagtcatctgctcagggaaatcaaaattgacaagaggagaaatacatatttataaatattttaaaatacttgaatttttctcgagtattatatttacaccagatactacttatcctatatgtttgttctgtaggatccagatccagatatgcataaaagggattcatggctttaagcttatctcttacgctccaggaatggatcagtcagaacatcaccaacggcttgccttcgccgcggccgactagtgtcaccgcctgcatggctggcctattgtgccgccgttgttgggcgtttacgtcttcaccgccggcttgccttcgccgcacgcgactggtgtcactgcctgcacggctggcctattctgccgccgttgtcgggcgtctacgtcttcaccgaccggcttgccttcgccgccgccgactggtgtcttcgcctacacggctggcctattatgccgccgttgttgggcgtctacgtcttcaccgccggcttgccttcgccgcacgcgactggtgtcactgcctgcacggctggcctattctgccgccgttgtcgggcgtctacatcttcaccgaccggcttgcctttgccgccgccgactggtgtctttgcctacacggctggcctattatgccgccgttgttgggcatctacgtcttcaccgccgccgactggtgtcgccgactgcacggctagcctattatgccgccgttgttgggcgtctacgtcttcaccgaccggcttgccttcgccgccgccgactggtgtcttcgcctacacggctggcctattatgccgccgttgttgggcgtctacgtcttcaccgccggcttgccttcgccgccgccgaatggtgtcttcgcctacacggctggcctattatgccgccgttgttgggtgtctatgtcttcaccgactggccgcctcgtatgacgccaactggagttatcgtcttcacggttggccacctcgtcgtcatcattctacttcttccatcgccgactggttatgccgccgcaggttggtgtttttatcttcacaactacgcgtcttcgctaccgatttgcttctgttgctgcagactcatcttcacttcatcacggctatgcaactttatcaccattatggggtgacttcatcttcattatcttcggcacaggcaaattctattgcctctactttgcaagatttgctacttcaccaaccaagacgtctacaagagctccgacatctcggcatgcatcaccaaatatgatgccatgttattttactacaacaagtggtgttccaatattcaatatttctactcggacatcttcaacacgtatcttcactcaagcaatgactactcgacgacaagaagctacagttctcgactgtatatttagttgttttccaactaaccaaagagtcgggggctacacaaatacaagacgaatacaagactcaaaattcgacaagttttttttgtcaagctgaagcaatcaattaatcagcctacgagtcaactccagaagtcattatcttcatctttgcttcggagcagacattctacttcagcaactcttattatttcactggcaattttggcttctggatgacgacagatctgccagggtagtgtgtgtttttcacgtcaatacttagcctacttgggtagattacaacttgataggtagattccaaggatgaagcaggaggcaaggagtgttcaaactttcaagatgaagaaggcggaccaaaacggaaaagtcactcttcctaaaagctcgaggaagtacaccattcgagtgggggaagatgccaagaaaagattccgtggggaccaccttcaaccactcttgctagctggcgcccaaaagagtataatgacctccaaaatataccaaaatgcccctatgtttgcaaatgtggcaaaggcattatagtaaactcacaaaggcccgtaggggcatagatgtaatctcacatgtatgaccgtggattacaaaagctggtcaaaatcccgtagcagataagacatttttaatacaaaagtaatcagcaaaaagttgtgtgtactgttcgagctcatttctaagtataggcgggagagttcacttttcccgcctatccccaaacttgtccgtaacccaaggtcacgacaaaattctttcctagtgaccatcttattaggtcattacttgactttggtttttggttcatcctttattttactcgatcggatgtcaggtaagattcttaaggtgctatcaaacatatttctcgcatggtacatgacatcggtagcctaacgaatcttgaagtctttttcagtaagtacttattgagtagttcttgaacggcacatttggcacgttcgtatttttcttcctctttctttccttcttctttcaaaaagaaaactttgcatttgcaagaccaattatatgagtcttggcttatcgactaatgttaattgtttaacttttagctaggctgtgttcatttgtgtgtgttggaaacaaatctccgatgcacgacgaaaaatagagtggtccattagcgcgtgattattcaagtatttgctatttttttggatcaatataatttttaagcaacttttgaatagaaactttttgtaaaaaaaccatcatttagcagtttgaaaagcgtacgcgtggaacacgagagagagagagagttgaaaacacaggctgcctaacataaccttaatgttatattctagagtaaattgcgtctacggtacataaacatgataggtgggtgtgatctagtgcaaaaacttgaaaaatgagcatataggtgcaacaacttgactagcgcgttcattactttttattccatataaaaaaagccaccactcagactatctcgaaaaggatctacatgtattacatattgctttcaattagttagttataataataaaataatatgtcaatttaaaaccgaaagatatatggttatcaaaaataagtgcatgactaatcaacatatttattatctcaggttatgaacatggtgaaacacggaaatgaatcatgagccaacgatctagcaaagcgtataattccaggattaatcaacgtatgcattagtgttttggcataaaatatacatgattgtaaagtttactagagcgggagcgcgctttgcgcgctgcaccagcttatctggatcaaaatgcgtttgttcttttttgggaaattatctgtgtttttccttttttggaaaattggttgtgttttttttcctgttttaggtggtgaaaaagaatgaattagtttgaagcattgaattgtgagcatttgtgaaaagggtatcaagatggatagcttattactgtaacggcaggcattttactcgaactacttagatagtataaaggcatgtcattcagctagactgcatgcatatacatactatattctacagcattggtagtagatgcagtagcatcttagatcatacaatgctaaggaaggtagataaggcaacacttatatacaatgataatcatgacaaaaagccatgaacaaaagatcttggttccttagtcctgggtaatttcacaactgccatctgtcttctagctgggacatagctttgtacatatatataagaaaaagtcttgagatggattgcacgtcgacaactcattcactgtgtagatgaattaagagctgagattaggaatgcctttaaattgctaatttgttatgtgtagataggtgagtttgtgtttgaggagtaacctgtcattgcctttttgctgggcatcatccttgaacaatttcttagcaaccggaggtgttgctgtaggtgtaggccttcctctgtttattgaaatgatgtgttagttacaatggaagaaatctttattattggaatgcacctaggagtgatcaaagcacctttttttggctagggtatctgtagggaaggatggggttgcttgtttggcttcttcagcagtttctggtagtccctttcccttgtaaaagaagtggcggttaggtcttaatgaatgagatgaaaggaaagagatgtagtagtaccttattttcagcagtatcaggcagtacaacaattgaagatttatcatgtgaggtgttttctttagcttttgtgtcagttttgggcttgcaaaattaggaaagaagtgagagtggatgtaattcagtatgagtgacaacaagtttaagggtggctataaagtggttaccttatcatcagttttaggtttggtcttgctagactgcatgtgagacactgagacaacaatgcttttcttggtaggtgctgaagaacttgatttgctagttggggtgtcctgtgttccctgagcgatgatgaacttggttggtgttgagatggtttgtcttggttaaatgggctgctgtgattcattgcttgtttcatttggtgttggtgctgtttggacagagctgcttgagcttgctgagacaatagctgatgtcacttgtgaagcatctggggacataaggagtagtggctggtttgaagcaccagcggatataatgctattaacttgtaggcactcttgacttctcataacagtatcccgcgtaaagctaacattccatgcaaaattgctaccaataagtgacgtgatttcacttggaatgtattcactgtttggtggtttttcttcaatgagagattctacgggcctgcgtagtagccgttgtgcgatccttccgaaaaggataaatgtagcattagcatcatcatcgctggcaattaatactactttgtacctgcatgaaaaatggatatggctatagcaatgtgtggatgataattgctaaagatgtaagaggacagagcgtgttctgttatgaaccttggatctgttattccgatgctagaacagctggagtatctgtagctagagccatatggttttgaagttttgtagcatattcgacatgaattgtaccaccaagaatattcattacatatccttctgacagtcacatttactataaaacgtgttccctgcataagaagacaatgaaaatatcatattggtaattatatcatcaaaaagtggatagatgtagttaagatgtgttctagagatagtgtcaaccttgtgtttgtgagggttgatattaaggatttctgcaatactcttttcttctggtacatcctggttgtatcctgtagcaggctcatcaacccacttgattggttgaaagtttgtgctaaagctacatagaagaattgtatcttagattaatggatactgtgaaaaccttgaagaatacagtgatgcacatagattgtaagaataacgttaaataaattaaattacctctcatttagttctgctacttcaggaatatttagatggtaagcttccagttagtgtaaggcctatatatgtggaggaaattattagatattattagttgcatgtagtcaatactacagtaattgaaagtttagaaagaaatgtacctaatcctctataatctttcacaagtgttccaacaaacacagcaacttgagcttgagtttgaccagcattgtatatgtcatcagcatcaaaagaggttgctctttctccccagagtgtgacaggaagagttgaattgctagttttgtagatttggaggggaaaaagtgatttaattttaattggaagagatgacttagtgttaagaatatgtgagatagtttgtgtgaatgctagcgaaaaagattaagtaaataataaatatgtaaatatttagttgtactaaactagccttgcatcgcggatctgtaatgtcctttttaagctcttagcgtttctggacttaggacgtatagtagtgactgcaccaacttcagtgatcacacccataatgtctgtttgcattgcatataaatttaataaaatgatatggcattgcaaaagatgtatataacaataattgcaacacaataaaagtatgttattaccaacgtagaatgattttttctcgacaagggaaggaacatcttcgaatggtgtcagtgaaaatgtaataccagggaaatgaggagggacattaatgtgttcttcaagtgttgtccatttactgaagaggatcattaggttgtttgcaactagcctgtatgttctgtttgcagccctaacagtgaatgagtcaatgtagtaaaccttttcttccttaaggagaggtttcatcttttctgttataggggggtaaatttgggcatgtatgctagtcccctgcagattataaatacaaatcatgttatcaagagaattatcggtatagaaaggaaaatatagaaaatggatttggcacgtaaattattaccatttcatcgagtaagacaagatcagtgtggaaaatttttgtatcatcgttgagatcagtaaagttccatagcctggagacccttgcaaggattcttttgtttgaatctccaaacgatagctgtgaaatcagtacatgcgccatatggaatctgcaataagcacaaaatacttttagtatagacaaaacaacactactatatatgtacaaggaaatgttactaagaagaacagtacatataactgcagcggacaaatcatatactatgtatatagtatatggtacatgtgaaggaggtatatttattccaaaatatatgtacaaaattgcttcttttttagggtaaaagaggttaagcatggagcggcaaagcctgcaacagaaaggtatttcaattattattgataatttaagagaacacataaacatgatatatggaacagtgtgttgaaaagcaccgctggcaatgtagcgctaagcacttcggtgtaaacaatatttcttgtttgtgtaccacatgatccatcgtcattctcaattaatatttttaaacctgatcggcttgttgctcttgaaatagcaacgtataattgcccatgtgtgaaaacaggttttctaagatatacacctactcgttgaagtgtttgaccttggtttttattgatagtcattgaataacaaacacgaacagggaattgtcttctttgtaatgtaaaaggccatttcattttggtagtactcagtgttatccgaggtatgtaaacagtttcaccgatgtttgatccagttaatatgatacattgaagaattctttcacccaaacctgtaactaataatcttgttccattacatagcccaattgattgattcagatttcgaagtagcatgaccacagcagcttctttaagaataagtctatatgtagggaagttagtggcgtctattgagttaagaaactcaggtggatatagcaagtcaaaatctggtatttgttcagagcattttgatattgtatcacaacttgagtatatttttgcatctccaggaagcaaaccaataatatagtcatttatttcatcaactgttgtattattagggcaaacaattgcacgtgaagctaggtattcaggatttttgtatgatgcaaggaaatcagggtatacttcgctgacaatggcatttattttatcaccatcagttataatgagtaaatcatcaggaattgtgatccatgtaggatagctttcaccttcctttgctatcattggtaaagtgccatcaccaacagccaaaacccactggctaaaatcatccatgtcctttttttcatttttaggtagcattgtattaagtaatctcatttttatattcatagttaatattgtcacatgtttccataagtctgagtttgtgaccgatgcattgattatagcacgacgggagcctttaggaacaactggcaatatttgtctgaagtcaccacctaggacaacaggttttcctccaaaaggtataatagaattcaaagggcatgtctcagaaagtatatcacataatgtgcggtctagtgcttcaaagcatcgcctatgtgtcattggagcttcatcccatatgattaatgcagtctcaattaaaagctcagcaagcatagttcctcgttttacattgcaaatacctatttcatcaatgtcaattggtattttaaatcgagaatgagctgttctgcctctaggtaatagcagtgacgctacgcccgatgaagcgacggcaagaacaattttattatgtgatctaagttttgcaataatagcattccacaggaatatttttccagttccaccatggccacacacaaagaaaaaaccaggttgattcgcagcaatacgagaagttatgatgtcgaaaatgttttttttgatcattgttcaattggtgtatcaaagaatttgcatgcatgcttaacataagtggatcaagtgcaagttcttcaatcaatctattattaccaggaatatgcggtacagacgatggatgtggcaggttaaaatcctttatattaccaccactattcgcaaacacattagcaagttcgtggagaagaagattaagcaaatggtcaggtggaatgatacaattcgggttatccaatgctttttttagtttgctatgtatatcatctatcatatataaccaatacttgttaaacaatgatcgcacatcactaacagagcagtaaagaagtatagtcacaaaaagttgtctaaggtgctgtgaagatgcagagactattgcttcatcgaaaagtagataccattcattgtccccctcaaggagccctcgtgcctcacatgcttctctaaatgtggcatagacaatattattaaatgtacgcacatcaacataactttgagcacctttaacaatcattaacaacatgcgtaggtagtaaagttcactagcagttggatgcacataatatattctaccaatttttgcagcaggtgttcgctggcaccatactctagatgacgactcccatgaccactctttcggaaattcacagtatgttaatgaacgggctttagaatattttttgttagcttcaaaccattcagttaacattgaacgcttcgtagcaggactttcaagcactgctcgtaagtccgatcctttctcatatctaacatagtttttcccaggtaagtggacaaccaatcgttcaacaggaggtactctatagtgtatatcaaattcaaacaatcgatgaagtgcctcacaggtcgaaacaaatcttgcatccatgtattctaatatttcatcacgtggagcaaggtcatgattcggtgatgcatttgttgtcttagctattgtttcgaagtagattttagctcggtcttggcctttcatgatatatttaaataaatatttatcaaatttgatttgttacaccactcaacatttatgtgtgcctcgtattttttaagtaatttcatgttataggggacaacagatctattatccaagggaattccattttttataatacatcgtccatcatttcttcgtctataaattgtaaaaccagcttcatcaataatggtttcatcttgaaaatctttagggtagtttttttttagcatttatcgttttttatgcaaggacaacttttgtttgcatcaccacagggaccatgcatcatgaactcgctaaccaattcatatcctagtcgatcagtgtcataatcgggtatttcagcacatatgaagccatctatgatagatgctgacacgtcagcagtgggagctgcgagccaaaccaagcaatgtatgtgcggaagcccacgtttctggaactcaacagtgtagaggactgtaataacttaagagagaatactatgagtgtgctatccttaattcaatatattctatggaccaagagggtataagaatacctgcaagaactttaccaaaagttctgccctctctaatatcagctatgaattcattaaccttcatattaaatacacgaacaatgatatcggctctatcagatggttgttgactaggctcaaatcgaatcgcttcagcaatttcttgccattttgaattacatgtatatgtcacaaagaggtcaagtgatccataaacacggcatattgtcattgcatcttgatagttcatcaccatataccttctccctccagtgaaactggcaggaagtatgacacgctttccaattgaatcaccatcagtgacacctttatcaatcgcatctacgatcccatctacagactcaccacgtaactctttttgatggttgtcacgtcccaaaacgaccctaaaatatatcctctaaattatgcctagaataattaaaatccgtgtgaaagcctccaacaattaaaatgtgcaaagttaaaagtcaaataatgcttagaggatttttgtatatttcctaaaagcctaaaatacgtaaataaattttagtggaattttcagagcacaaataataattgttaagaaataaacaaagttaaaaaagttttataaaaagaaaaaccctaaaaagtcccccttccctcccttgggccggcccggtccatctctccccccctctccctctctcctctccccgcggcccatccggcctctccccgcgcgcgcgccgctgacgggcgggcccgcccgccaccctcgctgacgggtggggcccacccgtcatccccttaatcccgccgctcccgccgcctcccccgcgccctagcgccgccgccgccgcgaatcccgccgcctcccgccgtcc

SEQ ID NO: 6152 - DNA, 935 bp, Oryza sativa
atttattgcggtttggacgagcgcgtcacgccgcatgtaacgcagtgcagcgcgctcgtttatccggtctgtgaccagtcacagaccgatcagatcgtgggttaggtggcgacaggcggtctgacgcacgcctcgccccatcccgtcaggacgagagcctccaagcactcgtccctagccagagccggcgtgttagctcctggagatggcacgttggttccggtcagatatatgccaggcttcatcctaaccattacaggcaagatattgtatgaagaagggcgaacatgcagattgttaaactgacacgtggtggacaagaatgaccgatttgtgaccggtctgacaatggtcatgtcgtcagcagacagccatgttcccacgtcgcgcctgcttccggcggaagtggaggtaggtatgggccttcccatcagaaggtcattcggacggcagccatacaaatctccgtccattaatgaagagaagtcaagttggagggaagagaggatgagtccccacaaaaaagaaagagatggtgcatgtggtatccccttgaggtataaaaggaggaccttgcccacttagaagggatggatgatttttggagagaagaacgatcccagaacgatcgggggctggctggcactttgtagcttcttcatacacagatccaccaaaacacaggagtagggtattacgcttctcagcggcccgaacctgtatacatcgcccgtgtcttgtgtgtttccactctcgcgaactttccacaaaccaagagcttagaacctcacccagggcccccggccgaaccggcaaaggggggcctgcgcggtctcccggtgaggagccccacgctccgtcaagaaggcaggctagagattgatattctaagcacgacttaatagatcaaactcaactgatgcaacattaagtat

SEQ ID NO: 6153 - DNA, 5467 bp, Oryza sativa
tgcagccctttcaaagctatgagtgaagttttgttttctgttaagttataaaaatatatatgcgctcaaaaaagtgtatgtggacatacgacaagtgatagagaaaaaagccgaacgcaatattcatcgaatgtaatatttttccttgtgcatgtatttcttcatttccgtactgaaaggaactcatatgatgcactggattattagaatttatgtggtattggattacaccatcgtgatattcgaactactcacagtcattgtttttatttatttttaaatcctagctcaatgttttaaaatttagtggttgaatagtgcgcgacatttttaaaattgcgtccaccgctccaccaaaccaaactagcacgaaatctctcttatggcaccatcatcctatagttagcgtgaaatctattagtgtgacacctgtgtcgtgctatatatgaggtgacaccaatatattttttcagaagttcttaaaatcggtatattcacgcaaaacactatgcaaaaagtgtgttttcaagaaaaaaaaattcccacatgccaacatacactaggaatctagcctttccattatctattatcttattaaaggaataaaaaaagaagtctccacgttcgctctcacggcctagaaattctcatattaatcagggaaaaagaaaaacagagtccatatagaaatacaatttaaaaatagctaaaattcggaattaaaaaataaggaatattagaagaagagtatagagtccatatagaaatataattaagaaataatagaaattcagaattgaaaataaggaatattagaagtagagtacagagtccatacagaagtacaattaaaaaataatagaaatttgaaattaaaaataagtaatattagaagtagagtatagattccatatagaaatataatttagaaataactaaaattcggaattaaaaaataaagaatattagaagaggagtatagagtacatatagaaatacaattagggaataatagaaattcggaattaaaaataacgaatattagaagtagagtatagagtccacatagaaatacaattaagaaataatagaaattcagaattaaaaataatgaatattaaaattagagtatagagtctatataggaatttaaaactaactaaattttggaataaacataataaaattaaaattagagtttagagtccataaaaaaatacaatttacaaataaccaaacttctaaattaaaaaaacatgggaagaagagtgcaaagtcaatacaggaatacaatttagaagtaaatgaaattcgaaattaaaaattaaagaatattgaaagatgagtttagagtccacatagaaatacaattagaaataataaaaattcagaaataaaaataataatattagaagaagagcctaagtatatatagaaatacaatttacagaaaattcagaattaaaaaaaatattaaaagacgagtctggagtccatataggaatatatataatctacaaataattaacatttaatattaaaaataattaatagctaacacatatatgaaatacaatatgaatattacacattagtagtttcgtaaagatagtacaaaatttaaaattatgtcgctcattttacatatttgaataatacattgagaaaatatatatgctcttatagagagaaaatataatgatgctagccgcacaatctgcgcggaccaccatactagttattaaataaagagaatacctgcaatgtgactgattcctgagatcctgtttcatacaaaaagatctttttgttgttcggtagtttcaccgactgatattccgctaatctccagtctccacagttcaccatctcccttcccacctccgaatgctcttcttccatcatctccattgctcactgcctcactctcgtcagctctctctctctctctctgctagtgcttctaggatccatcatccatggctgcttgcaaagtctacttcttgtgcagcatattgtaggattctattgtttgagaacattttagggagttgcatgttacaggtaaaccgcacttctttttcctgaatcaattctacatatgagctttttttcatgcacaaaaaaagtatataggcattgaatgaatctacttgttcttttttagtagtgagaggtctttttccacttgacaaaatgagaggtctgtttccttaattcagttaaccttcgttctgcaaaggatggttcagtgctttctgttactttgtttgccgatgtactggcgattattccctgaactctgtcttaccttataatgaaaaaagttcatgaaacagagtacaattgttcaaggttatttctgttttacacttcacttcttagttctgtgtttttcgtttatttattttcatgattgattttttttagacaatggcttttatgattgaatatgacaagaaacaggggtagctctaaatctaaatatccaagaaaaagactgtgatagttgacaaaaatatactcatggatgctcattactttttactacagttcaatgcatgtgtaactatagatatatgctttccttgtctacaaagtagggaatctgagggagcaaaaagtttatcacatggagggagcagatgaggagaggccactaattcatcacctgcctccacaggtactattctattaccttaagttggtaccaaatatattgcatctccatgtgacacatgacatgtaaagtcgataattaatttggcttcagtttatcagaaagaaacaagaaatacatgagttctcgcagcaaatttgcacatacatttaacgccgattctgtgtaataaaaattagcactggcattgtcattcaggaacaatgttcgcaatacacctgcgatggaacggttgatatcgacagaaggcccgcactgaagcatagcacagggaattggagagcatgcttcttcattttaggtatttcagagaagttcagaaatattccaaacaaatttaacactttctttgttaaacctgcacaacttttaaccaatatatattgggtctgaacatatatgaactaggtgctgaattcactcaatgcctgtgcttctctgcggtcgtgaagaacttagtcaggtatctgacgagtgtgctccaggaaagcaatgtcaatgctgcccgaagtgtgtcgacttggattggaacttgcttcttcacaccactcattggagccttcttggcggacacattttggggaagatacaggacaattgtaatatgcctctctgtttacagcatagtaagtgcaacaatcagaggctattaactgaataatctaatctatcaagtaaaattgctccatgaacatttcctatttttgtcagggaatgctcattctgacgacttcagcgtcgcttccatttctccttcatgattcctacaacaatggcgacgacattcgtcgtgttgtcgcctacctagggctctacctcattgcacttggagctggaggtatcaagccctgcatgtcggccctcggggctgaccaattcgacggtgccgacccggtagaacgggtgacaaagggctcattcttcaactattactacttctcaaacaacatgggcacgctgctgtccactaccgtgcttgtctgggtgcaggacaacatagggtggggcatcggtttcgcgactccgatgctgctcatgggttttggcctctccatgttcgtcgccggtaggagggtgtacaggtacaggaagctgggaaggagtccattgacaagggtgtcccaggttgtggttgcagctgcgaggaatcacaggctcaagttgcctgatgatagctcactcctgcatgagctgccttcactgaccgaaggtggctataggattcaacataccactcgattcaggtactattgctcatcatatcatcaaaatatatgtctagttactgctgcagacattaacctcaaggtccacaacctagtgataagcttatatatttttcaccatcactcttatgatatgagtggcattttgtgcaactatgtttagagtatgtgttgaaccttaaactaagcaggaatcttctaataacaatttattgaacgatcattgagcttataattataccacgcctaccaagaaaaatctgtcgcgttttgtggactaaaatttcctatatgtggaattcaccttcgtcgattgcttcaagagatatcaacagtttatttttgaaaacaaaagcagaactttgtctcatttcattgataagagttaccaagaaagggatcacacggaaaacaccatcctacaaacttctcaagatcattcctcaaagctacacttaacacctaaaaacaccaatgcaaccaaaaacttaaggatacatcggtttctaatttactctcagagaataattccttgttctttcttgaggcgatttgccatgcgacatatggggtaattaacagcatgttcgaagagctccaaaatctgaaatggatctagagttgtggacctaggaaaagttaactccatcattttaaaatgttttataaattagattcacctgctctgctcttaaagaaaaggaatatgggcttcagctctaccggataaggatccagatgagcttaaacccctgccaggcatgttctaactatttgccactctatagattactttgataatataccacttaattaacagatgttaattaatgattttccaattctaatttttgtaaaggttatttgctatcttaaaagttattactcccttggcctgttccataatacttcttgatatttttgatattaacacgatttacaaaatatatatgtaactatgtttttctcttataatacatacaataaataaatatattttccttttattatagtactttgtaagacaaataatttaaagttattgaatgtcaaagatataaaaatttaatctcaaccttatctaaaatgtctaagaattatgaaccaaacaatgggcccactattttcaaattctcgaaaatctaatctcaaagaaaacataatcccctgccctccctctccgcatggtgtccaggttcttggacaaagctgccatcccgtccgactccgacgacaactcgccggtgcaaccggacccatggaggctgtgcacggtgtcgcaggtggaggagctcaagatgctgctccgggtgttcccggtgtgggcttcgctgctcgtcttcttcgtggtgaccgcacagatgtcgtcgacgctgatcgagcagagcgcggccatggacggccgcgtcggccccttcaccgtgccgccggcctcgctcgccaccttcaacgtcgtcgccgtcctcatctgggtccccgtctacgacgccgtgctggtgccactggcacggcgcgccaccggcaacgaccggggcctctcgcacctgcagcgcatcggcgt

SEQ ID NO: 6154 - DNA, 14793 bp, Oryza sativa
gggatgccctaggcagtggcggcgaaggagaagccgatcggaggaaaaacttttaagtgtcggtggagcatacgagggcgcatagggagtatatatacccctagatctttagtcccggttggtcagagcaaccggcagtaaagaaccgggagtcaagatatctttactcccggttgttctcaccaacctggactaaagatatttttccgctatttccaaattctttttaatcccggttagggttaagaaccgggactaaagataatagcactcaatattgaatttagttgcctatgtatttctaaaatagtaaataatgcattaaaattatttaaagtcaaaaaattaatgacaaaaccttcaaaaaattattgttgtctatagtaaattaagtggataatatataataagcacgtgaatgatttaaaattgttaaaaattctaataatcatatataactaacatatgcatgatattaaattgttaaaaattctaattaacctatgtaaataccacatgcatgatttaaaattaataaaaattctaataatcatatataattagcatatgcatgatattaaattgttaaaaattctaattaacatatgtaaatcccacatgcatgatttaaaacttttaaaaattctaataattatatatacctagcatatgcatgatttaaatttgttaataatcatatataactagcatattcaataaatccaaaatagtttacaacaattacggcaatacatcggcggtgacggttgtccgcacgtactttctcctcactattgttccttccttgtgatcgctatgtgagtaaagggtgtcttcatttgataggaggatgctagggtcaatcgtcaccgtgaaagggggttgcccatcaaactgatcgtaatcctcgtcagttttgtcctctactccgacgatttttcttttgcctgggagaaccacgtggcgcttcggctcgtcaggccctttgaccttctttcctttgctagacatgtccttcacgtaaaaaacatgcgttacatcattggcaaggacaaaaggttcgtccgagtatccaaccttgttaaggtcaacatttgtcatcccactgtcatcaatcgttacgcctccaccagtcaacctaacccattggcaccggaacagagggaccttgagaggtccatagtcaagttcccatatctcctcgatggcaccgtaatacgtaccagttgtaccatcgtgtcccatggcatcgatacgaacaacactattctggttcgtgcttttcatgtcttcggctcttgtgtagaatgtgtacccattgatctcatatccctggaatgtcgcgatcgagctagatgaacccctcgccaggaaggccagttgctggttaatcgtctcgttatccatgagatgttgtcgcagccatccggggaaagtatcaatgtgatgccgtgtaatccatgcatcggacttatcgatgtttctcgagcgaactagagccaagtgctcctcgatgtaaggagccaccaatgaagattgttgtaaaaccgtgaaatgggctttacggaataaattgttgtctaccgtcattattgctttccttccgagagtcccctttccccgtagtctcccttcatggcgtgattcaggtaccccaattgggcgaaggtcttcaataaattctacgcagaattcaatgacctcctctgttccataccccttggcgatgcttgcctctggacgagcacggttacgaacatacttcttcagaacgcccatgtacctctcgaaaggaaacatgttgtgtaggaacacaggcccgagaataccgatctctttgactaagtgcaggagcagatgcatcattatattgaaaaatgaaggtggaaatatcaactcaaagctgacaagacattgcaccacatcattctgaagggcttctaacctatccggatcgatgaccctctgcgaaattgcgttcatgaaagaacatagctttgttattgttgcccggacattgtctgggaggataccccttattataactggtagcagttgtgtcatcaacacgtgacagtcatgagactttaggttagtgaacttcttctccttcgtgcttattattcgctttatattcgtggagtatacagatggtaccttgatgctctcaaagcattgaaacaaactttccttctctgccttgctaagagtgtagctggctggactcaagtaatggctgcctttctcctttggttccgggtgaaggtcgccgcgttgttccatatgcttcagatcattacgtgcttccagtgtatcttttgactttccatctacacctaggaagccaaaaaggtttacgcaaaggttcttagtaaggtgcatcacgtcgattgtgtggcggacgtccaagaattcccaatagggtaacacctaaaatattgagttttttttccacatcgccgcgtgaccatcttcgctctctataggctggctgccaggcccctttccaaacactactttaagatctttcaccatagcaaatactatttttccgctgcgatgtttaggcttcatacggtggtctgccttatgttcaaagtgcttgcctttcttccgtactgggtggtttgcagcaagaaatcgacgatgacccatgtacacaatcttcctacagtgtttaagatacgtactttctgtttcatccatacagtgagtgcaagccttgtaccccttgttggactgcccggataggttgctaagtgcaggccaatcgttgatggttacgaacagcagcgctagtaggttaaattcctcctgtttgtcttcgtcccacacggggacaccttccttcttccataatagtttaagatcttcgaccagtggtcttaggaacacatcgatgtcgttaccaggttgcttggggccttgaataataatcggcatcattatgtacttcctcttcatgcatagccaaggggggaggctgtagatacacatcgtaacaggccaagtgctatggccgctgctcatctctccaaaacgattcatgccatccgtacttaaaccaaaccgtatgtttcgtgcgtcttttccaaagtctttaaattttctgtcgatgtttcgccactgcgaaccatctacggggtgtctcagcatcccgtcctgttgacgttcttcagcgtgccaacgcatcattctagcattccccttgttcctgaacaaacgccttagccatggtattatagggaaataccacatcaccttagcaggaattctcttcttcgttagctgcccgtcaacctcacctggatcatctcgtctaatcttgtattgtagtgctttacaaacagggcatgcttctaggttctcgtactcctcaccgcgatataggatacaatcatttggacatgcgtgaatcttctaaacttccagtcctagagggcagactatcttcttagcctcgtacgttgtatcgggcaatttgtttccctccggaagaatgttcttgacaagtttcaataaatcgccaaatgccttgtcactaacaccattttttgccttccattgcaagaactccagagtggtatccaactttttgtgcccctgctcgcaacctgggtataacgatgttctgtggtcctctaatatcttgtccaatttatgggcccccttttcactttcgcagtcctccttggcatcctgcaacatctgaccaagatcatccgcaacatcgttataatcagcatctctatcctcctcgcccgtttgatttccttcaaatccagcgtactgagcaaagtctggaatattgtcgtcttccacttcatcttcttccatttcaagcccttgctctccgtgggatgtccaacaattatagcttggcatgaatcccgactcaaacaagtgaaaatgaatagtcctgaatgcagaatactccttctgattcttacacttattgcatggacaacaaataaaacccttctgcttgttagcttcggccactctcaaaaaataatgcatgccgtcaataaactctttggaccgccggtcagcgtacatccattgccgatccatctacatgaaataaaaaaaaatcgtacacaaataatcattcgtacaataatgatagtcatacaataatgataaaataatcacaaactctttcaacagtcatacaataatgacataccattattcatacaaaaattataaaatattccgttaaataattcttatttattatttttgaagttttaaattcttttaattttcaatttagtttgttttcttttatttaagattaactttcactatattttcctactcaactattttataaaaccttctttagcaaataaacaaaatttctatatattctttcttttcccacacaaattttctctctcatcaacttacaacaaaattttggagacaaaaaagtgtgcaaaacatagctccaaatgtaatatgacaaaaaaacattggaggatgaagttgctaaccttttaggcacctccgattcgtatataatcaccaaagtaaattcactataatttttggcatgacctcccctcttttttgaagaaattttgaagcttgctcaggctggaggaggaagaagacatatataaaggggtgggactttagtcccggttggtgttaccaaccggtactaaagatcagcgggatctttagtcctggttggtaataccaaacgggactaaagttacgatctttagtcccggttggtagatccccggggggcctgacaagccctaacagcatttaaaccaggactaaagataccaaccgggactaaagatcaaatatgcccgttaccctttttaatcgggactaaagatcatctttaggcccggtttttattgcaaccgggactattgtggaaatagcccgagcgacgaaagatggtttctccaccagtggatggtagtacgtatttatatgtatgattctctcttagcaattaagtggtaccgtggagggctaatccttctttttttcaatcataaatcgggactaaagatcatctttaggcccggtttttattgcaaccgggactattgtggaaatagcccgagcgacgaaagatggtttctccaccagtggatggtagtacgtatttatatgtatgattctctcttagcaattaagtggtaccgtggagggctaatccttctttttttcaatcataaatcgtataagtacgttttatttgttcatctttttccatgagtagttgtacgtacgtgtattgtatacgtacaactactcgcgatagaaattccgtttctgttcgtttttctcacggcaacaagtccgtttctgttcatttttttccgtgagtagtacgtacgtatatgtattctgctcattttttccgtgaagtactacgtacgctacgtactacatagtactactcacgggagcaattcagttttctaaaattcaagggaggttagctggatgtattttaaataaatctaatctaataatttaaaatataaaagattcactaattaaattaaaatcaaggattgtatgtttttttatagatttgtaaggtttctctaatttattagagtaccgtgtgatggcatatgagcatttgtaagagtgtcacatgttggtttatgagtgtttttaaaaaatttaatggacttttagtattagattatatagatatacgatattattttcagatgagcttatagctagtatttagctagatattattttcagatgagctatagctagtatttagctgatctactattaaacttgctattacgtgtattcctctttttcattcaagccatttttttaatagacacaagcaaataaattttaaattaaaaaaacaattacctgttaacagttaatatcgatttgaaaagacaagagcatcttgctattcaagagaggcctaaacaggttttctaaaatgtaaattttaggatttatatcaaaatcaggcctctaacagattcccagccaaggtcctaaaatttacccacacctaaaagcagtgccaatctcgcccagaacttgggaacatgtacgccctcccaatgacactcgattatcgcgccacttttttacctgtccatgctaatttctttctattggcaccattttttcttctgcctgcttccttttttccccttctctcgtcatcattttctttctcacgctagctcgcacacgccgccgtcacttcgccacttaggatttccactgggtcgcctccaatcctccgtccgtgccgtttcattcgccatctcccgcgccgccttcattccatccatagtgccagcgaccgtccatctggtgcaccggcggccctcgtattggtgggcagcggcccttcatcaagtgcgccgaaaacccctcctaacgtgagggtcgtctaggatattaacctgcagactgatgacacagccgtgtagaggatcagctaggccttctgtttttcccacattagaggcaaatctgtcgtcaatacaaccttctgtttttccacattataggaaaaatcttgtatcaatataaccgtggccggcgagggattctcttacggcggcatagaggtaagatagcactttaaaagggctaactccggcatgtatggttctatatatacatgatccgtaatgcttgtcctaacttattctcagatcgagctagagcctagacatagagaaagtatgagcattgtggtgagcaagtcggcgccggtggtcgtccggccaacgctgccgccggtgaagacttccggcagcaagatcgttctgtcgcctatggacaagcttagtgccatgacgccaaccacagtgctgcttgcgttcgaccatcccatcatccataaccatgagggcatccgatcatcctgcattcagatgcaggccacggcggaatacatcaagagaggtctcgctcaagcacttgtccactactatcctttcgccggccgcatttcctgcgacgacgacggcggcgatttttacatcgactgcaccggcgaggagctcggagcgacgttcgcgtgtcatcgacaaccagcccactgacgccgagacggcggtggtgcagcagctcgccttcaactgcacgcccgacgacgaccacctacctcactgtctgctgtgggtgcaggtcaccacgctgtcctgcggaggcttcgtcgtcggggtgacatggaaccatgccgtggctgatggtttcggcatagcacagttcatacaagccgtcggcgagctcgcccgtggcctgccatcggcgccgtccgtcaccccagtcaggttagatgaccaaaacaacgccgtttctcccttcaccatggccttcatgcagttagcagacaggcacaaggtaccagaccttaccttcaacaacgtgaccgtcccgtcgaggttgatggaccacatcatccgaggacgaacgaccaacgtcaccgtgttcgaggcggtcgccgccgtgctttggcagtgccgaacccgggcggtgatgacaaatccagaggcccccgccgtgctgctcttcgcggtgaatgcgcgaaagtatctcggagccaaggatgggtactacggaaactgcagcacgatgcacgtggccgtggcgaagagcggcgcggtggcgaacgccgacatcaacgacattgtagacatcatacggcgcgccaaggagcggataccggagcagctcaagatgaccggcggcagcgacatgacgatgctacgggagctcgccgatgaccatcgtctggatggatatgagagcctgctctacttgacatcctggcgaaacatcggattcgaggatgttgatttcggcagcggcaagacggcgagggtgatgacctacccgcagagggaggtgttctccaagaaaatgcccatctgcttcatgctcaagaacacaccacaaggggctagggtgatttcaggctgtgttaaagctcaccatgccgacgccttccatcaagaaatagccaagctcaacgccaccacctaattaactctgcgagctacctacagtattatataacacatgactctcagatcataataagtaaataaatccatcaaacaaactatatatgcctggtgttatcatgtaccctctcaatttgtgccatttatctataattagatttatcattatatcgttcacgcataaacaattcatgagcctatcctatctgtataataacaagccaggtgctcccttcattttttaatgtattatgccattgaattttttaaatacgcaagaccatttgtcttattaaaaaaataatctaatattcatttgtttttattgagatttgattcatcatcaaatattttttaagcatgatttaaatatttttatatttgcataaaaattttgaataagacaaatggtcaaactttgataaaaagttaactgtgtcagacattaaaatacggaggtagtaatctctattattgtacttcatcaattcgtcatgaagagatctactccctccgttcatattatatgtcgtttgatttttttttctagtcaaactaataaagtttgaccaaacttatagaaaaatttagcaatatctgaaatatcaaattagttttattaaatataacatggaatatatttcgataatatgtttattttatgtcgaaattactactatgtttttatctaaggtaggccaagcttaaaagtttaactagaaaaaaattaaacgacttgtattatgaaacagagagagcagtaaagtaattcttttttaaaaaaataaatcatcacaagacagttcctatttcgttgaatgtagcagcaaattccaaaaacattccgtcaggagagcggagaaaccatgtgctctgttagccctgacaaccatccttgccacctcagttggcgcccctcgccgctgttgcatcgaatacaggaaccaagccaactagagagaatgaatggttggaacacacttttagtggaaataaaagtaacacttaaacttgacaaagtttaaatgcaccgatcacacggctggattgatgtcagtctgaccgcagtactccggccgttctgaccaccgccttgagccggttggaccacctccctatcgccggtatgaccgcctgctagttagaccatacaatgaactccagtcaaaccgtcgggatctagaaaaacacgtatcgatgaaactcttgaaagtagatctactttattgcatcaatatgtgtttacaaagtgcatctaaagctagcattcctctctcaactctttaactaggattgaagcgtcgaagaaaaccctaacttttctctcccaaaaagtcgatttcttctagcctcaacccctcatgtatttatacccacaacctgcttcttgtcactgtattactgcaccaagtctgctgcgccccaatgcagtaatgcttgaagtgtttctcccaggatgcaccctggccgtgtttcagcaaacttttggatatcttaccacaaacaaactgaaccccccctgaaccagatgatgttcacactggtggagaaatcgtttgtagtcccagttcgtaacccccctttagtcccggttgtccaaccgggactacgaatctgggactaaagatagcgatctttagtcccgggtaaaataaccgggactaaagatcgatctttagtcccggttggtaacacgaaccgggactaaagatctatgtaccattttttttatttgcatggccctgtttgctgcatggttgattatatatatatatatatatattacaatacattatatatgcattgtaatatatatattatgcatgtatatagaatacatatatatatatatatgcgtatgtatatatatgtataaatacatatattacacacatatttataatttaaagcacttaacattttatgtacatatatgttaccaaaatatatattaacactaaagtaaatgtacatacatatataaatatatatatacatgcatgtatagtacaattcatttgctcgctagctatagctacgacttcgacgcctgcgttacatcagaagaggaaggaccgacgttatgaattgtcgatccatcgtagtagaattcatcatcgtgattaaggacttcttcgttaatgaaccccatcagttgttcttgaacagccgtgataaaatccttgtgtgggagtttttccctcatgtgaatacgctatcattcgaaaaataatgacatatcaatatatgaaattaataaacaacttaacaaatcgatacgcaatgaaattttgaatggtttatgtatacgtacatcgagctctcgtatggtgtatatttggtttgataggcagtgggcatactcgcatacgtagtagccgcataagttagttccattgtcctgctttgcacactacatgagaaacgatgagagatttaatatactctttatattaactgtaacaagagattcaattcaatataattttggatcatgcatgtactcactggaaaatgaaacctccgtccaagtttttctttccaagtcccgcggaccaattgacggaaccgatcccaagccctacatgtgcagttgcaagctatgattaactaaatattacccgagatcaacataatagcaacagagtcccgcgactttggaatagatggcattatattacatatctatcagttggaagagcttgtcaaaaaccttctcctctttattcattgagtcgtacacagtgactctgcatgcgtccaagtcgaaaaagaacaggacccagtggaatctagaatatgcgtgatatgagataaatatcagaatgtacatgttatatgtatgggaacgaaatttgttcgaacaacaataaaaactcactctgtgttgtacgtcaatagtatgaacgtcttgaaatgctgctgcgttaggagatggacgagattgtcctctgtgtctttctcgtacttgtcgagcatttcggtgttgattttccgagggtcgatgaacccagtatcgtaaaccccgtcgggccctttcaatctccattctacaataatgaaaggaaattattattgcttacacatatgccaggagctaattattgaacgaaacaaatcgaactcaaagatacttacaaaatccatgcgctcagaagagagacgtcgagggcgtcccgatggtacagatcgaagacatccttgaaatggatccatagaacatcttctccttgcaagaagtcggggtttctgatcctcgctccgaacatctctctaccattggcgctcatttccatgtaccgttcatggaatttgtacatttgtgtcggtagggactgcagctgctcaggcctgacaagcggtttaccgagttcaaactagtatgccacttccgccttcgggattggtgcgcctccaaccaactgagccatggttagaccagtgtccgaaatgaaatccgttatgccaaagtcttcgccggtcaccaacggctcgaccacttggtttggttgttctccaagctgaggaactgctttggacttcttgtaataggctttcctaagtgttcggtcatagtccgatagctttaaggcctccttgtttgtggtggacattcccttgaagaaattcttcacgctcgggtcaataggtatcttcttttcaggactccgaggcttgagttgcctcttcacttctcctgccacataagcgtcaagctcctcttaactgcaatcgtacggcggctccttgtttttggtggtgtcaactttggccttcttcgttgcccttgtgctggcaggaggtggagcttggcgagaccttgtcttgggaggtgcaggcggacacggtggaggtggaggtggaggaggcggaggagccggaggagatggtgcatgaggaggtggcggaggagccagaggagatggtgtaggaggacatggcggaggaaccggaggagatggtgcaggaggagacggcgaacccggaggagatggtgcacgagacgccgcttgtcgcccagggaggatgatgtaccgcttgcgctatagtataatggcgtgccttgtgtctcgtagatgcgtctcaccatctcctcctgggtagtccaactcgaggtcctcgtacacggcttccaccagctcaacttcgaccctcgagtatcctgctggaatcggcctgcagtggtaagtccctgaaatgtctgttgggatggccattcccgacgccaccttcacgtgatgagaggttatctattagtaatcaaactaaccagcaacttgcagaacgtacgagtcaaaaatcatatattacatcgagcataccttgattgataagttcttgaagggaatatgcagctcacatggtgtccgttgcgtgatctcatcaacggggcaggtggtgtcgtcatgggtttgcatggcgtccatgctatgtgatactacctgccccgttgaggcgcagctactacgattgcctgatgggctgaccattggaggaggtatgtacggctggggatcgtgtgaccgatgtgctgccatgcgttcatccactttccgggccacctcctcttgcatgctgagttcgtagctcgataccctgtactcaagatctgcaatcttcgcctcagtatctctcttgctcctcatccgactcctgtacgtgtggatgtcctccttgattcccatcttctagggaatcacgcctttccctcgtgttcgtcctagatgctcgagagtctgtagggcgagtgacagctcgtccttctctctgtcgggtcggaacgtgccctgagaagaggcttccactgcgtccgttagtcgattcgtagcctcgcgtatctgatcgctgaagaccaaggagccattaactgggttgagcgttccaccatgagaatagtaccagaacttcgatcgatcaggccatttagcggtggacggttcgatacccctctcaagcaagcttgcctccatctcctcccacttcggcatcgcgacgctatagccgcctgaccccaagtggtgatggtacttcttcttagcggcattttctttgtttctttccatcatcgcctgcccttgttgacctgtcttgtaagcaacgaactcgtcccagtgatcccttagcttcgggaatacatcgaagttcggtgtctgcccccttcaagatgtatttccggtacaaatctcccttgaaggtctagaactgttctgccattttcttaagagtccactgtttcactatgttctctgtacccgcagggagcgtgaacgtctcgagcattgtggtccacagcatctctttctctgattccgggacaaagctgtcatcatccccgcgtgcccttgttctgcgccagtacaccttgctaacaggcacgttatccctcacaacccaaccgctgtggcgtacaaaattcttggctacttgtgccggggcactaggtcggccgtctgcatccacctcagttatgatgtgccgaccctctatcttcttcgcagcacctcgttgtccgcgtgccctcttctgtccagcgtagggatgacttccactagcctcctcctcgttcccctccgcatccctctccacgttcccctcctcgttcccctctgcatccctctccgcgttcccctcctcgttcaagtactggtttggatcctcgttcccctcttcttcgttccagtactggctacttcccgatgcgattgtatcgtacagtatctgttcctcatcgcgatcagccatctgttcatagaagaaatatttgctaagcataatattaacactctactaatcttgtattaaaactcaaataatcatatatgctaagtctaagtgtcatgtatttgtatggtagataatcttatatgctaagtctaattaagtttcgaatattacatctctaataatcttatattaaatctctaacaatcaaatatgttttgaatattacatctctaataatcttatattaaatctctaacactcacatatgctaagtctaattaagtttcgtatattaaacctctaataatcttatattaaatctctaactatctctaacactcaaatatgctaagtctaagtgtcgtgtatttgtacgatagataatcatatatgctaagtctaactaagtttcgaatattacatctctaataatcttatattaaatctctaacactcacatatgctaagtctaattaagttttgtatattaaacctctaataatcttgtattaaatctctaactatctctaacactcaaatatgctagtctaataatctaataatatctaacactcacatatgctaactctaataatctaataatcttatattagaaatctaacaatcttatattatatctctaacaatcacatctttacatcacttgcctgcgcgaattccttcgagggctagctaccacttcggcttgagggacgacgacgacgacgtcttctctgcaacatgcaaaaaaaatgtattagtctaaacgcaaaggaacatataatgtatttcacgttttcaagtatatataatcatatatatatgctaagttcaacaatagtttaattatctcgttcgtacatgtttcgctcgcattcgttctaacacttttagttcaagtgcattcacgttcgttaacgtttcaatcacgtttgttcgcgtttcattcacgttcgtttacgttcgttcacgttcgttcactaacactcacgttcgttcacgtttcagtcacgttcgttcgcgttcgttcacgttcgttcatgtttcattcgcgttc

SEQ ID NO: 6155 - DNA, 8172 bp, Oryza sativa
atggctaaacattatctctaacagccccccctcaatcataacttatccaagttaatattgaacctgaaattctgaaactgttgcacaggaagagatttagtaaagccatctacctcttgatcccctaaggagataaacctgatctctaattgcttacttgcaactctttctctgacaaaatgataatctacctctatatgcttagtacgagcatgaaacacaggatttactaacaagtatgtagctcccatattatcacaccataatcttgcacatggaggtgaatcaataccaatttccttcaacaaagtctatatccacattacctctgccgttgcattagcaacagctttatattctgcttctgtactggacctggagactgtagcttgctttgtagcactccaggataccagatttgatcccaagtaaacaacaaagcctccagtagacctcctatcatcaacagatccagcccaatcttcatctgaaaaagcacttacaagagaagaagaagacatgttaattcttaacccaagattaacaatagacgtcacatatcttaaaatcctctttactgccatcgtgtgttgcactgttggacaatgcaaaaacggacaaaccttattgactgcaaaaggtaaatctggcctggtcaaggtcaaatactgaagagctccaactatacttctgtactttgttgcatcatttattcctaattcagaaccattataagctgagagtttctctatagtagagtgaggagtagaaacaggtttacaagcaatcattcctgcccttttcaacagatctgaagcatacttttcttgtgtcaataacataccatcactaaccttttcaatgccaagaaagtaatgcaaatctcccaaatccttaagggcaaaatccttcttcaaatcacttaacaaagcatctgttgccttctgtgtggagcttgccacaatgatatcatcaacatatattaaaacaaacatattaactcctcctttactttggaagaacaatgaaatatcagcttttgatgctttaaaaccaagatcacataatttgctgctaagcctagcataccacaccctaggagcttgctttagcccatataaagccttatcaagcttacaaatatgattgggtttactcttatcttcataacctcgaggttgtttcatatagacttcttcctctaacaagccatgaagaaaagcattctgaacatcaagttgacgaagtgaccaacctctagagacaacaatagataaaatggttctaattgtagctggcttaacaacaggactaaaggtgtcctcatagtctataccatatctttgtttaaatctctttgctactagacgagccttgtatcgatctaaagttccatcagacttgtgtttaatcttataaacccatttgcaatctataacatttttttccttacttggtggaactaagtgccatgtcctattattcagcaaagtactatattctagatccatagcatttttccagttttgattacagagagcttcatctaggttttgtggtttaccactagcagcaagtaaattatacctgactgttccatcagtgtagaccttctcctttctaatgcctctctatagacatgtcaggggacgtgacggctgttgctgatcagatgtcgttgtcgacgactgctgctgctgtgatgctatactactgcgactgccatcatgactgccgccatcattgcccccctatgtcgcacggcgactggcgctagcagccgacatgtcgccactagaatgggcgacatcaccaccagatgttgtgtcaggctgcacagactgctgtggcggtgatcccagcatggagtcaggaccaggaggagcgggagaatcgccctgggagtcagcgccgtcaggatcttctgcggcaatttctagatgatctgccgcttcattttcttcactattttgtgcactgttttcgtctgaattttctgctgcatgctcaatagagacattagaatgttcaggagaatcaaacatatgatcattcacatttacacccgcactagcaacatcaggattcaacaagttaggtggaagaagaagaatttcagaccgtagtcttgcaccgggcattggaatgcatttgagagaagggaaaatttttttcatcaaagaccacatcacgtgagatatagatcctgccggtagatggatccaaacatttgaaccctttatgaatgttactatagccaagaaaaacacattgtgtagatcgaaattgaagtttgcgggtgttgtagggtcgaaggttaggccaacaagcacatccaaaggttcttaaggaagactaatcatgtttctgttttaacagacgttctagaggtgtggcaaattggataactctagatggtgtgcgattaatgagatatgtagcagctaggaaagcttcatcccaaaattttagaggcattcaagcatgagcaagaagagcaaggccaacctctacaatgtgtctatgcttatgctcagcggagccattttgttgatgagcataaggacatgaaacatgatgactaataccaattttggtgaagaaagagtgtagcttttcatactctcctccccaatcagtttgtatggcaattatcttgtgatcaaagaccctctctacaagttgctgaaaatcaaggaatttctgaaacacttcagattttttctttagcaaatatatccaagtaaatttactaaaatcatttataaaactcacataatacttcctgcccccaaaagaatcaggagcaggtccccatacatctgaaaaaataagttcgagaggcacacttgacacacttgacttaggatatgggagtcggtgactcttagctttctgacaagcatcacagactcctgactcacttatatctcctaaacatgggagactattattcttcacaatttttgaactattgcaaaagaagaatggcgtaaacgactgtgccattgggtgaagctaggcttgatggctccaagggcttgcttgaatggagggatcgacgactgtcgtaggagatataacccattgcggcgaggtcctctaagaagaagattcttggtgtccagatccttaatagcaaagaaatgagaatgaacctcaataaaggcatgattatcaaaggcaagtcgatgagcagaaataagatttttgtgtgcatgcggaacatggagtatatttttgacacataaattgcgtgtgggtgtatgaatttgagaatggcctatatgtttgatttccataccttcaccacttgccgtgtagatctgatctttgccattgtatttttcatgggtcgtcagcttctctagctctcccgtaatatgatccgttgtaccggtatcgatatactagttttgatcaacattatatgatgcagctgctgctaccttggcatctggaacaaaagaatcatcaaacctgtgccaacagtcggcaacaacatgccctatcttgccacagagctagcacgtggggcacggcttggagttgttgtagcggccgcctccattgtagccgcgcccgcgaccaccgcgatccccgcgaccgccattgttgctgaagttcccgcgagctgcgccattgctgccgccatggttgaaggcgaagccgccgatgctgccaccttttccaccgccgccgcgctttgcgctattagcgcaggaatagccatgatttgctgcaatctgtcgcagcttccctctggactcgaaactgagaagttgtgagtaaacttcaaaaattgaaactggttcgtgtttgcctaccaaactggagaccaccggttcgtagtcatcaccaaggccgaccaaaacatagcccatcagttcttcgtcgacgaggggcttgccggctgatgccatctcgtcagcgagtgttttcatcttgctgatgtagttcgatacgctgaggtcgtctttgcgcgtcgtagagagcgcaagccgtgtgttgagggcacgcgatcgcgactgggaggacaccatctccgtgattgccctccacgcctgcgccgccgtgtccattgtcacgacttgcgtcaggatctcctttgacaaggaggagaagaggtagccgaggatttgctggtccgcagccaaccaggcttcgtacgccaggttcatggtttcggtggccctgccaccttccttctccgttggaaccatcaccatctgggacggcgacttggtggcaccggtgagatatccttccatacgtgcgcccctgatcacggtaaggaagttgctgtgggtaagtttgtctaggatcgcttgcctagagaggggattggaggtggcactactgatggaggaagccatcgcccatagatgcaacctcggcgtggcagataggccctgataccatatagaaattatgtaagcattatcacctcgtctcgaggccgcgtaattgtatttatatgagttgggaatagctcccaaacgtggcttacaagaatgagatcggatcagccagagttcggttgtaacagcccaaccttatgtcaaccaatccatatcacatgtgatatttcatgtaacaaactaatggctaaacattatctctaacagtgccctcccctcctccagatccgatgggaggggatacggcggtggcccggcggcggcggcctctccttacctcctcgtcgtggcctgtgaagactagctctacccccccctctctcctctcacctcagtggccactagcgtggaggtgggccaccggatctacccacttctgcgatgttgtcctgctgcttctacctccggtgagtacatgtgccgacgcacatcctctttctctttccatccatctctttctacccgcaccatttctttcccttaacattatcttgatttctagatttggaagaagcttttctctagtagatccaaccgacgacgcgcacggagggatggaggcggagcaatttttgaattttttttaacactaattttggatttattttttatggctgtgaagcatctgctcggcccaaattgagttgagctagttttttttttcaaatcatatacatcaaaggtgccggttcttaaactgacacctttgagtcattctcatcagtgtcgtctccatggtgccagttgggaaatccggcaccgatgggggttacccaaccagcaccaatagcccattctttagtagtgcgaatatcaccatcaatactggttttatctgttagagaagtcactatgcccggttttacggataaggaatataaataggattaaacttatatctgagagagttatattggcctttttccttagtaaaatgcccaaaacagaaaaccctggtcttaacctctcatccgttacgctagcattgctcctattccataaaaagataaaaatgaagaaaaaagtttaatcacttctaaataacgattatacccgttcaaacttttttttataataatacaccttcaagtttatactgccactaactagagtggtaatataaatagatctaaatccttctatcaaatgagatcgacggtttagattgcttcttactaccagtacagagcatgagcatcctagtgggactataattaagtgagggtgtgagatggagtccaggcgttgatcccaacgaggaggttgcacgtatgcgcggatatgcctggctcatgagcgaagctcgatttaaacattcctggcgtcctagctcgggagatacgggcctgcctcgcacgtgcatgcatgtgagctacatgcaaataccccctccgtactataaaaaattcaatcctaactacttcaatcctaactacaaacctgacttgttatttttggacagaatagtaacaatactctctctattcaaaagtctaacacctatttattttattaccaagattaggaagtaattaactcatccaccatatgaaaaaacttatgagcgtgcaatccataagtactaaaatgacttcttttttccgatcaataatttaatttagcacatagtgattaccaataagatttagagtttgaaacatatcaaacaattttagatttctggatggaggaaatatataatatacctgcacgcgggatgcgagacagcgacgaaataccaaagcttgccctaattaaataaataattaattcgacgaagactaggaacgaccaatgatatctattggccaaccatataacactgtggaactgcatatcgaccagtatatatgaaaagtcacggaggaggccagcagccagcagccagcagccagcaggtatgtatgtatgtgtgtttatagcaaatccgttatattatatggttgtaatctctatagtactagatctgtatgactactgtattaattatatgcttacgtgatcctaacttatcaatggtagaacacccagacggatattaatttagaatgagtattgtggtgagcaagtcagcgccggtggtcgtccggccatcggagccggccacatcgacggccgacaagatccttctgtcaactttggacaagcctgttgccacgataccagtgaccgtgctacttgcgttcgaccaccccatccatgacgccaccgcggagaccatcaagacggctctcgctcaatcactcgtccactactatcctatcgccggccgcatttcctgcgacaatgacgacggcggccatttctacatcgactgcaccggcgaggatctcggggtcacgttcgtggccgcgtccgccaactgcaccatggaggagctcatgtgtctcgtcgacgaccaggctcccgacgacgagacagcggtggtgcagcagctcgccttcaactgcacgcccgacgaccttcatcaccgtctgctgtgggtgcaggtcaccactctcaactgtggaggcttcgtcgtcggggtgacatggagccatggcgtggctgacggtcccggcatagcacagttcatacaagccgtcggcgagctcgcccgtggcctgccatcgccgtccgtcgtcccggtcaggttggacgacaagatcgcaacccaagccgtacctcccttcaccatggccgttcatcgcttcatatccggcctcaagccagtatcaaacctcgacgtacgcaacgtcaccgtctcatctagccttatcaaccacatcatcgtcggagctcgtcgtcgtgccaccgtgttcgaggcggtcgccgccgtgctctggcagtgccgtacacgggtggtgatgacggatcctgaggcccccgccgtgctgctcttcgcggtgaacgcacgcaagtacctcggcgccaaggacggctactacggatgctgcaccgccatgcacatggccgtgtccaagtccggcacggtggccaacggcgacatcatgaagttggtcggcatcatacgccgcgccaaggagcagataccggagcagctgaaggcagacgacggcgagatgatgctacggacgatggtaggggagaagcaggtgaatggatacgagagcctgctctacttgacatcctggcgaaacatcgggttcgaggacgtcgatttcggcagcgggaagacggcgagggtgatgacctacccgccgaggatgctgtccatgatgcccaggattgcgcccatctgcttcatgctcaaggccacagaggaaggggtcagggtcatgtcagactgtgttacggctgaccacgccgatgccttctatcaagaaatagccaagctcaaagccaccacctgattataactatatatgcgagctatctataccttcttcaatatgccaattatgatttatctacaataaaaatttgaatatatataccgtgcaagagcatgcatgaacaagtaattctatatgggactcttctacctgtatcactatttcactatacatttatggttctttaatttttagatatggaaatttattactggccactgggctatcaagtgcacatagcctacatctatatctaattaaacaatagagtaaaatgcattagcggtgcttaaacttgtaggattgtgtcatataggtctctaaactcttaaaatacatatctaggttctagaacttgtcaaagtgtatcatttaggtctcaaattgacacatcccctctaggatcctacgtggcg

SEQ ID NO: 6156 - DNA, 12079 bp, Oryza sativa
tcatcaaagattgggcccggtaaatcaggatcatgacccggaggatgatgaaaacaggaagactcaatggtgtcctcctggcatatttacaaagaatcagaagagaagggttcaaagattgagaaactgagaacgcttgcaggaggtcgagcaagagatcaatcaccggctaaagaaaacaaagccgaagcaggaatggcgcgttaagaaacaagctcctgtagccgatgaagcaaagagattggccaaagggaaaggcattgtgattgcgtcggttaacatggtttttaccttgccagccgaatttaggatcgaccaagccgatgttgaggaaacagaagaagaataggctaaattgattctatcaccagaacaagcagtctttaaaaagcccgagggtgcagagaatcggcatcttaaaccattgtatataaatgactatgttaatgggaagccgatgtctaagatgatggtcgatggtggagctgcattaaatttgatgctttatgctacgttcaggaagttgggtagaaacgccgaagatctcatcaaaacaaacatggtactcaaagactttggtggcaatccatcagaaaccaagggtgttctaaatgtggagctgacagtcggcggtaagactattcctactacgttttttgtcatcgatgggaagggttcttacagtttgttgcttggaagggattgggttcatgccaattgttgtattccttcaaccatgcatcaatgcttgatccaatggcaaggcgacaagatagaaatcgtgccagccgacaggtcagtcaatgttgctagtgccaatttagctctttgggagatggacggccttgattgtttatccggcaaagtttgggatggagattttctaaaagtgtccgattctgatatacagccaattgaagatggagaacccaagctattactttgagggcatcgtggagggttcaaacgtctacaccaaggacacagtagatgatctcgatgacaagcaaggtcaaggttttatgtcggccgatgatttggaagacatagatataggtccaggcgatcggccgaggccgacatttattagtcagaatttatcttcagagtttagaaccaagctgatagagctcttgaaagaatttagggattgcttcgcttggcaatattatgagatgcctggactcagccgatcgattgttgaacatcggctacctaccgaaccaggggttaggccacatcaacaacctcctaggagatgcaaagctgacatgctcgaacctgtcaaggctgagattaagtgcttatatgatgctagttttattcgtcgttgccgatatgccgaatgggtttctagcatagttcctgttatcaagaagaacggcaaggagagggtgtgcattgattttagagatttgaataaagctactccaaaggacgaatatccaatgccagtggccgatcagttggttgatgctgcttcaggatataagatattaagttttatggatggaaatgtgggatataatcaaatctttatggctgaagaagatatccataagacggctttcaggtgtcctagtgcaatcggcttgtttgagtgggttgtaatgactttcggcttaaagagtgctggagctacgtaccaaagagctatgaattatatatatcatgatttaatcagctggttggttgaagtctacattgatgatgtggttgttaagtctaaagaaatagaagaccacattgccgatttaagaaaggttttcgagaggaccaggaaatatggcttgaagatgaatccgacaaagtgtgcttttggcgtatcggctggccagttcttgggatttcttgttcatgagagggggattgaaataactcagagaagtatcaatgtgatcaagatgattaaacctccggaggacaagacagaattgcaggagatgatcggcaaaattaattttgttcgaaggtttatttctaatttgtctggaaggttagaaccttttacaccattattgagattgaaggccgatcagcaatctacttggggggcagaacaacagaaggctttggataatattaaggaatatttgagttcccctccagttttgattcctccacagaaaggaatacctttttggttatatttatcggccggtgataagtcaatcggctcggtcttcattcagaagcttgaaggaaaagagagggttgtgttctatttaagtcgtcggctcttggatgcagagactagatattcccctgtggaggagttatgcttgtgtttatatttttgatgtatgaggttaagacattatctactgtccaatgaatgtactatcatatgcaaggccgatgttgtcaagtatatgttatcggctcctattctgaaaggaaggattggaaagtggatattttcattgactgagtttgatctttggtatgagtcacagaaggcgatcaaaggacaagctatagctaattttattgttgaccatcgtgatgattctatcggcttggttgaggttgtgttgtggactttattttttgatgggtcagtctgtactcatggttgtggtatcggcttagttataatctcccctcggggggcatgctttgagtttgcctatactattaaaccttatgcaactaataatcaagcagagtatgaggcagttcttaaggggttgcaattactcaaggaagttcaagctgatactattgaaatcatgggggattctttgttggtgatcagtcaattggcaggagaatatgaatgtatgaatgatacgttgatagtttataatgacaagtgccaagaattgatgaaggaatttcggctagtaactttgaagcatgtatctcgagagcagaatattgaagctaatgatttagcccaaggggcatcgggatataagccgatgatcaaagatgttcagatttaagttgctgtcacaacagccgatgattggagatatgatgtctatcggtatttacgggatccatctcaatcggtttcttggaagttaagatataaaacgttgaagtatacattgttggacgatgagctttattatcggacgattgatggggtgttgctgaaatgtttgagtgccgatcaggcaaaagttgcaatcagtgaaattcatgaagggatatgtggcactcatcaatcggctcataaaatgaagtggctgcttcgacgtgctggatacttttggccgacgatgctggaggattgtttcagatattataaaggttgtcaagattgtcagaaatttggagcgatccagagagcgccggcatcgactacgaatcctattattaaatcatggccgtttagaggttggggaattgatatgatcagcatgattaatccaccgtcaagtaaagggtataagtttatattggtggcaaccgattattttaccaagtgggtagaggcgattcctttgaagaaagttgattctgggatgctatacagtttgttcaagagcatataatctatcgatttggtatccctcaaaccgttacgactgaccaaggttcaattttcgtgtctgatgagtttgttcagtttgccgatagcatgggaatcaaattgttgaattcttcaccgtattatacacaagctaatgggcaggccgaggcatctaacaagagcttgatcaagttgattaagaggaagatttctgattatcctcggcaatggcatactcgtttagccgaagcattgtggtcttatcggatggcttgtcatggatcgacacaggttcctccttataaacttgtttatggacatgaagctgttttgccatgggaagttagaatcgactctagaagaacggaattgcaaaatgatttaacagccgatgagtattacaaccttatggccgatgagagggaggatctggttcaatcacggttacgagcccttgcaaaggttaccaaggataaggagcgagttgcttggcattataacaagaaagtagtgcccaaagatttttcggaaggtgaacttgtatggaagttaattttgtcgattgggactcgggatagcaaattcagcaaatggtcgccaaattgggaaggaccgttccaaattcataaggtggtatctaagggggcttacatgttgcaaggactcgatggagaagtttatggcagagcactaaatggcaaatacttgaagaaatattacccaagtgtttgggttaacgcatgatcggctgatgttgccgatgcatgatagccgatgtgtttacattgccttgagatgaccgatatggttatatcgcacttagttcttttcatattgtaatcggttgtggtttgccgatgtgcaatggtcgatatggttatattgcccttagtcgtttttataattttatcaatgtttttgacattgtaaaattaggggggcacatacatggaaaattgcaaatttttgagcatatttggcagttatgttaatcggcacaaaggattatctagacaagttgaataatagcactagggtatcttagccgagtacaaaaaatttcttgaggtctattatacagaatatcactaagacaaatatcgttggatagccgatatagccctctgcctaatttgttctacttcttctatggcttgggcatcttgagcatcggttccagggatgactttcaaggacttggtcatatcagcgatattcttgatagccgatttcagcctcgccttctgttcttcgatagcttacgggagatcggctaacttcttgtgctccatatccagctcggcgttgcattcttgaagttgtgccatgagatcaatcttacgagcttcaagccgatcaatatttgacttgatcgggccctcagacggctgatcaagcttggacttctcttcgtgcataagctgccgattgtgctggattgtagcttcgatgtttttgcgttcccggcgatcggctaatctctacttggccttctccagcttgaattggtgttgctcaaggtaaacggctggagtaagggcatcggttagttcatccgggagtagagcttggatatctgtgaacctggcctggatcgagccacagttggtcactaagttgtctaatgatgcttctagccgatgagagatatcctcgagcattctcttcacatcatcagacagaggagctacagctttactggtggtgtcttcctctatttcatcgagataatccttgatgtcgaaagaaaacatatcggctaagacctgcaagagataatattatggatggttaaggatcaaaacatgattggctgatctcagatttgtatcaacaaaaacttactggaataacaggagcagctggttgttcttcctcttcgacgttatgactgtctgcaaccgatggagtacggttgcttgattctcgctgcacaagaggtgaaggaggaggaggaggctataaaaagataaatgttagacataattccggccgagattagttaatgagaagacttagaatatcttactggtggagccggtttgagagttggtgctgccgatttcttcctcacggcagttttcttcttctgtgattatacatctatgagtaatcggctgaaaggtaaagtagttacagaggaaatcgaagagagatgcttactctcgaaaaatgagctggggcagaaggagttggaggagtctgcttgggtgaagccgatggtgttctctctgtatcgctcatttcggctgcagcctgatcaatgtcctcttcaatctcttcttcatctagcgcttgttcgatagatggatctagggcagacagatcatcaactggcttggttttctttgatttgattttcttcttgagagctggagctgatgtgtccatagtcgatgatctggtttttcttttcttgcctgcatcagctggttccctgattaagccttggagaagagccgaagtcttgggggcatcatagccgatgaatggaggagatggtccacctccatttggaattattcctggggcatattcgatatcttgccactattgctctggtgtgggggagaagattctgttgtctataaaacagaggattagattaatcaagcgatgaatcggctaataattgttcaaatacgattaataaaataaagacatagctaaggaacaatatctggaaataggtctatcttgaacattgaagccggttgatggaaaagatgcagcttccattcaccccaccatctgtcgaagtttctactcctgaatcttgccaactctatattttcaatgctgcccaatggaggtccttgaagattaagcagccgattcatcattaaggtagatgagattttccctcggcattggatcttatcggcaaaaaataagccaattggaagttggcccattccaaactgcctagcagagctcattggatgataaaattcatatgagacgtaagtgtttcttccttgataaatgccaacaggaaggatacatgggctgattgcagttgagaaaatttctctgggtttctgatatctgtcatggttgatgtcttcgaatctaaagtccaaaggattttccagaagcgttgaatcttcatagaggaaccagactcgagcttctttctggaatccttcataaaagctgcaaaaccaatctttgagcagttcggctgatagctttgctcctgcatcgattggtgtggaggcatattctccgaaggaggtgcatctccgatgagtgcgttcttctctgtcactgtctttaatcggctccagtcttgggaattcagcttctgttacaaatggccgattgacaaacttcatgactactaaattcaaccaggattgcagtagccaccatggtccacccgctccgactactgagccgacagctaacttagccgatgcattatttagcatttggtacaagtagccgaggaggattttgcctaaagggaattgtctctttgtttctaaggcttcggctacagattgccaattggttgtagggccacagcttgatccaaagaagaagaatttctctagccacatcagcaagaaagccacatgttctcggggggtgaccggaccctggcccatgtatgctgcaatatagcccgaccagccgcctatgctcttagtcttgaagtcatattggttttttgtgttcaggctcatagggttagccgatgaggtgatatctagacctgtgatcatgatgatatctatgagagttggggtcatcggcccttggttgaataggaaggcgttgatggtgttgaaccagaaataagtggcagctgccattaggggttcgtccttagctgagttggctatggtaaggtcgagtgcttggccgattccaatttcatcccaatgaactcttttactggccgataagcgtttgaaccatgtgatccagctcttctcgggtgaggttttctctagagatggccaagatttaaaggtattctttcagtgacctagatctgggttggccaatctgaaaggaatcctattggtttcgccattgatgaattcagtaggatcaagactaccgattggaccaagaaaatagtggttctcgtgtgacagacttggaattgcaaccagattggacagatgctacagatgcaagtagggatagagaagaagaatacaggataaggcgagagaaaatcaatctactgtgaaagaaagagatctagccgatgggtacttacctttgcatactcagccgatggtgcggaggacggattggcggaggttgacatcgccgagggcggaaatctggtcggggatgaagtcacctggggatcgccttatgcgtcggaggaatcgccggagagagagagcataaagtttcgcttgagcggtgaaggcggaaataacggtgtgagatttctcaaggacaacagttagtatttaaagagttggagtaacggttagaaaacggcggagtgcgaaacttactcggagttgatacgcggcaaatccggaacattaccaaatctcccgaacttggggggcttgtgttaatgaccaaatttggtaatatcagcatcggagaaggagattagatcgaagtggaatcgaagataagggctgtcgcgaaaacagagtaagaatcggctagagtctggattggctacggtcaggattggcagagttcgagtcagacagggctagccgatacagccgattccaagaatacgactcggtgtacattatcgggttgagttgatatgcttcaagatgattgccacgcatggatagagtcctgaaaattcaattatatctattaattagaatattttatgtaaatttcttacagattaatgtgggcaaaagtctgtcgtaaagacttgtggtatcttagagtttgttagagataatagtcgtgtccggtatggacatatcttgtaattctcgggtataaatagaccccgagctccatgtaattaatctaacacacacattcaatacaattttggcgcatcgccacccttttactttcgttttgtttcgacgagttcttgctttcgggttgagctgcatcggtttcgatcttcaacaagaggtaaaacttgttatggcggcttgtgttctcaggattagtgcttccatctctatgatactctaatcttgtttatgtaattcatcaagttatcatatatcttgtataatcttcggtaatatcgtcatctaacctacaatcagctaacatctgttagtagaaggcagccgattaggttaaatagcggtgttagctaggattgtacaagatacttaccactctatgaaacatccagcggcttgattgtctagatattgttcttcttttcatacttaatgctgcatcagttgagtttgatctatcaagtcgtgcttagaatatcaatctctagcttgcttcctggttgccgattagtatagcatcggagttttagccgatcttacctgatttaactatagttatcctatatgtttgattgacatgttaaatctgccctttatgttaagatcttgttgcatttaagtatattatgcttctgtctgatatattctatttgctttaatatcttaatataaagtggtatcggagtattagccaatacatgctagatctatttaatcgactacgctattaacgtatatagttttgttgttgatttatatttcgatctaagtgatttaaccaatcacttgatttaagtatatatcgacataagaattatatattgttaatgtctacagccgatcaagtaggtttagttcttccttaattattcatgactgccgatcgatgcacacatgacatcggcataaaataaatgatttgtcatctgtacccagccgatcggctatcatttatatatttaattacggtttgtttgtcttcgtttcttgttcattgtaggatcaaatcaactggcacgctcacatatccgaaggcgagttctggacctgcactggagttaagcagatctcccaggcctcgtgttttctgtcaacacgcttttggcacgcccattgggactgattagaagtcagaaagcagttttcctcatggccgagaagccgccaccatcgccgtcttcggctagcccaggttctgttaaagagaagatccagcaattagacctatctgaggttaatgagggcaacgtcatgaccatcactctggacaaattgacacctgatcagaaggagtttgaagcaatgatgcagcaagcacggaaccagttcttgaactcattcatgcagacccgcaagggaacagtggtgcaaaagtatcaggtgcgagtagtggctgatgtccccgggaccggttcttccaaggatggggagatgaaacaagccttaggtggctcggctcaaccgagcaacaaaggtgctacaaatggatcggctcaggagaatcagggtgaccactctcaaggagtacatggagttcaaggtgatggcactcaggggccacgaggaggaagtcttaatcaagatggcagtgcgtcacaggaatttttcaataattttcaagaccgggttgactatgctgtgcacaatgctttcatcaatcaatctggggtattagtcaataccttgtcaaacatgatgaagtcaatagccgatggttcaatagctaaacatcaggctgcaggcccagtttatttgccaggaggtacctttccgaattatcggcctttggtcaccgatattcatccacctattcaagcggttcctcccattgcatcatcagcctagccgacggcgccggtatcgatttccccatctactccgtcaatgtcggcaccaggtcagctggttaatcctcggcagttgatgagagagaacccacagcatagtgggcaggttgcgaatcggctaacgcaggatcaggttgctaccatgtttctaccacttcaacctactgttgatctagtccagcagcagccgattcaacaaacacccccaatccaacaggtcgtacaaccaattcagcaacaggttgtgcagtcagttgaacaaacgccaccaaggcagcagattgtacatccgattcagcagacgccatcaagacagcagactatccaaccgattcaccagcaaggcttgatgaatccatcggctgggcaacatactctgaatcaggttgttccagagcatttggtccatcacgtgcagctggatcatacggtagtacctcagattgtccctgagcacttggtacgaaatattcagccaaactagcagaattaccaggggggcaatttaagttatcaatatcaacctccttccccgcaagaccaatatcagcaagggggattaattcagcctcaatttgctcctcagtacagtcaattcgagcccatgcagcaacaatcgcaaggagcagctcaacaacgaccgtgggccgatgtaattgctgacgtgatgagggaacagttcgggcttaaaccaaaagagactggaaatttatactgacaaccgtatcctgaagggtttgagagagtccctctccctaaccggttcaaagttccagatttttcaaaattctcggggcaagatagtacatcgacttatgagcatattagccgatttttagctcagtgtggtgaagcatcggctgtggatgccttgagggttaggttgttccggttgtctttggctggatcggcttttacttggttttctgctttaccctatgggttgattaacagctgggccgatctggagaagcagtttcatagctatttctatagtggggtacatgagatgaagttgtacaatttgacagcaatcaagcaaagacacgacgagcccgtgcatgaatatattcagaggttcagagagatgaggaataagttcattagcttgagcttaactgatgcccagatagccgatttggcttttcagggtatgattgctccgatcagggagaaattctcgtctgaagactttgaaagcttaccgcatcttacacaaaaggtaactttgcacgagcagaggtttgctgaagctaggaggaattctaggaaggttaatcatgtctgttcttatatgtgtggatcggacgatgaggatgatgattctgagatagctgcagccgagtgggtaaggagcaaaaaggttatgccatgccaatgggtgaagaattctggaaaagaagagaggtatgattttgatattaccaaggctgacaagatttttgatctattactctgggaaatgcaaattcagctccctgctggtcatactattccatcggctgaggaattaggcaagaaaaggtattgcaagtggcacaattctggatctcatactaccaatgatggcaaggtctttaggcagcagatccaatcggctatcgaaggaggcaaaatcaaatttgatgattccaagaagccgatgaaggttgatggtaatccttttcccgtaaatatggttcatacagctggccaaacagccgatgggggccgtgcaaggggttttcaaatgaattcggctaagatcatcaataagtaccaaaggaagtataataaacaacaggagaagcattacgaggaaggtgatgatggtt

SEQ ID NO: 6157 - DNA, 1097 bp, Oryza sativa
tgcaagaactccagagtggtatccaactttttgtgccccttctcgcaacctgggtacaacgacgttctgtggtcctctaacatcttgtccaatttatgggcccccttttcactttcgcagtcctccttggcatcctgcaacatttgaccaagatcattcgcaacgtcgttataatcagcatctatgtcctcctcgcccgtttgatttccatcaaatccaacgtactgagcaaagtctggaatattgttgtcttccacttcatcttcttccatttcaaccccttgctctccgtgggatgtccaacaattatagctcggcatgaaccccgactcaaacaagtggaaatgaatagtcctggatgcagaatactccttctgattcttacacttatttgttggacaacaaataaaacccttctgcttgttagcttcggccactctcaaaaaataatgcacgccgtcaataaactctttggaccgctggtcagcgtacatccattgccgatccatctacatgaaatgaaaaaaaaatcgtacacaaataatcattcgtacaataatgacagtcatacaataatgataaaataatcacaaactctttcaacagtcatacaataatgacatatcattattcatacaaaaattataaaatattccaccaaataattcttatttattatttttaagttttaaattcttttaatttttaatttagtttgttttcttttatttaagattaactttcgctatattttcctactcaactattttataaaaccttatttagcaaataaacaaaatttcaatatattctttcttttcccacacaaattttctctctcatcaacttacaacaaaattttggagataaaaaagtgtgcaaaacatagctccaaatgtaatatgaccaaaaaaaacattggaggatgaagttgctaaccttttaggcacctccgatttgtatataatcatcaaagtaaattcactataaattttggcatgacctcccctcttttttgaagaaattttgaagtttgctctcgggctggaggaggaagaaggcatatataaagaggggggaactttagtcccggttgg

SEQ ID NO: 6158 - DNA, 4788 bp, Oryza sativa
tgaccgatggatccaaatgaccctaaaatcatgaaacaaacctagtcgatgcttcaactcttggattattaccccatacatcgatctattggcgttctcaccagtcaccattttctgaagctttcagactgtcgttacaaggattaattttgaaacacctaattgtaaattttgtttgcggctcaagagccaacaagcagattctcagttaagatggtagaactactcaactacagacaaaaaaaaaagtcaaataagtcagtgctatgtttcatattttaagctaaacccttagccatcaacatctggtgttgaacttgaatttaattgtttgcaaccggtacgatcaacagccattcgcatcattatctaaaacaaatgatcatcaggcattgcatatgttgagtatgaaaactttcttgctactgaaaaattaacgcagaatacttccaagaaagggtaagaaaatattaacatataacaaaatctaaaaaataatattactacctccatctcaaaatatagtaatcttatactagatgcaatggaatctactttcctccgtttcacaatgtaagtcatcctcacttacattgtgaaacaaagtgagtatctagattggaagtcctaacatgtattacattggtcctaaaagtgatatattttaggatggaggagtaacatgcattattaaagcagctcatcaatgccactctggttcttgttagagcatgtagcccagctcacacaagtagtccaacttgtcacattagatccgctccaccatatatctaatcggaaccataactttaggtttcgagactacacatcccaaaagacgttatatatagtcgcctcgcgttgtccatggatatacttcatctatcattgaaagtgttggcaccttttttggcaagaagacaattatgatcgggacacctaaacatgttgtggtgatatggagtcacaaccacctcgatctagaccaagaagggtttttttaaaactaaaccggctagcggagccggtttagagatcaaaatcagcctctaggtcgatttagattgagatggacgaactattaaaactaaacccatctcgtgggtgaattggaaagtttaaagaacaaacctacaaagggcatcacactctcacagcgaaggcggacaatttatggcgcaaatcaacaaatatggatgaactattactaggtagaagataaagtagaaagcatggctaaaaagcaaagataaaagaacgattcaatagattatagggattgtggtctatggttagaatcgaaccagccatagcccttataaaggggtcgctcttgccatctacggaccctttccatgtcttacttggggtagagaccaattagaactcaagaaataccttccgaagcaaggaaacctgagacccgacaaaattggactcggcgtcagactgagccagtctgaccggcccaacaccccggccttatgacggcggttagaccggccccgtgaaggataccggatcatttccaaattcgtccatattttcctatttttgttctaggtgccaaatttgggtgttaacacatgccccctacctttttggcgaacttgcgagccgaaaagcatacaacacatggtcttagggtgacaatctatattggccataagggcttccaagtgcctagtagatctttctctttagagcactgctcccgtcctgcattttgtaccgcatggtacatgtaccatgtggaaccaaaacccatccagccgttgattttgcaagggtaggattggaacaggcaaagaagcgaggcaccgctccatcctttgattttgcgcgacttctcccccaaatcagacacgagacccgcctaccagacatcgtaaaccctagccgccgaacaaatgtccgccttctgaatcacgccacaaatctcgccgacgtcgccgcccgaaatcacatcgccgccggaaacatttgccgccccaaatcacatcgccgccggaagcatctgccgccacaaatcacatcgccgccggaagcaactgcagccccaaatcacattgccagaagcaactacggcgtagcagttgccatcgtctgagtcgctggagcagccgccattccccttgagcggtgtacatcaccggcgaagaagcccttgcgatgcggcggctcaattgggacaaatcgctagggttaccccttcactccagcactcatcgatccagatattgtgaaaagacatcagtgcctttgcaccaaacgttccaggtggtaccgcgtggtaccgtgaattcctaaccattagatctgtgcgaatcaacggcgcagattttgtacctcgttggtaccgcgcggttcctcgggggtgtgctgtacgataaaattcctattctctttatagtgtcctaacatattagcaattttcttagagtgattcacataactcagcatagatattcccaactaaatgattacccattgagcacctcgcacttggaccctaacggtaaaatcgttttttgatgccaagtccctaatcttgaaacgatcttactccaattataaaacttggctatacttctcctttcatctttttagtccattccaaagtcttcaagccttcatcggtccctttgtcactgttagtgtcttataactattggctgataaatcaactcactgaacataggagaatcaaccagctgaataatacatcccccaagccaattgataagttccacgatgccttatagcatttcatccataagatttcaggttgaccggtatctaaacatgtatcttgaaaatactaactccatggtttggcaatgcaattctttattaaacaaaatatatttaaatgcttattgccgaactctccaatagatcttatccgatcaaccatcttgcttagatcatggaagtattaaactagtggaatcctccaattggtaaaattgaatttcatagcacatcaaccgaattttataggatcaattcggctatataatcaaatttaagctcatgcccccagctacatactgtgggttgccatccccggtcagggcggcattaaagttatggtctgaccagttctatattcggtcagaccggtcgagaagctacgattagatcattcaagaagcattggtcagaccggtgtggttgcggttagaccgacctgatctggagtaatcaagcaccggcttttagaacatgcctctcctatctttatggccagatgtttggtgtgtcaaattactggtcaacatgatttctcaagtggctattttaaataactaggaaggtagccgcgcattcgcgcgggcatgtgtcgtacgcttagttcgaaacacttataagagtgaaatattaaacggataacatctgccacgatttctccaaaaattgtttacgtcggcattaattgcttttataattttctaacttatattatatcataattaagtaatatctataagcaattgaaaagaaggtagacttattttcttaagaaaacatgtcaacgaaagtaaaagtaaggtgtttttcttttcttagttgcatatattatcatggattattagaggatgaattgtgttagacacgaagctccactaaatgtatgggtttatatagacactaataattgatgtagtttgagaggtgatccatttatgaacatttcatgtagagtgggtcagaacctccacgcagcttaacatgaatacgataaagatgaaatataattgcgcagtaatatttttgaaatgtgatgtaccatgaatacacacttgtttttttaataagatagatctaacaattagaaataatggttctaccggtttaaaaggcataggtgtattccaaaaatgtagcataaaaattatagttgttttagtatccaacattattataaagcaagcgtagctcaactggttaggttacttgttctggaacttgccacctgggttcaagtcctatacttgatatgggtgcttgcatttacgattaattgttctttcagttgtaggtgacgtacccatcaatagtgaggcatccgtggtgatttctttaatctcaaaatatgccggcccagtttttcggagatagtcataatggtaggtatgtgtgtgtggattcatagtatgactttttacgaaataaagacaaaatatattacttcataaatataaatatacttagttaaatcatatagtaaaattattttaacatagcatgatttcatagtagcaggactaatttctttcctatttttactttacatatttatgattatttgagcgaccggtaaaattttagaacatgaaccaacacaaaatatttccttttcaagaatacctatgaaatagatttttttctcgcaccataaatttaatcgaagttgactggcaggctaaaggcccagcaatgtctccaatattcttctctcgaggcgtcagatatttcattatgtttgtttgatgacttgaattattcacttcatctctcaaatataatggaaggtccggagaggctacggcatttaattgtaagaaatataacggtgtgagcgaataataattgtttgggtacctaaaagttgcttttttgagatttattatgataaattaaaaatattatctcaactacttaaaaataaggagtaaaggggagataagacgaggtgaggagaggggtggtgggacagttggcagaaaggcattgtgtatatttctaatgatagaaaggcattgcatatatttctaacggcat

SEQ ID NO: 6159 - DNA, 1134 bp, Oryza sativa
tacccatgaattcagaaccccagagtccgcacatcctcaaatacaaagcacttccctagttagatgtaggttagacttcccgttcgagaaactctaccttctacctgccctcaatttatgcacgattaatgaatgccacctgggtggaagcgagaggtggaaatggaaggtcttagttcggaggtgggatctctacctgatagttgcattgccattcatgatgatcccctggcattcgtccattcagccattcaccattcacccattcaactggaattttggttgaatgccggaattgtgtccacaaattgtggatggatagttggttggctggctggatggctggctggatggctggctggatggatggtgaatggctggcggcggttcggttgctttgaagcatttgttgctatctaaattccatttaaggtcgtaccttatcgcccagcatcatcttattctctatttgtattccctccatctttcagatacggatgtagccttggatgtgcccgtgcccaatgaagaggaagagcgcaacatgaaacgtaagtacaaaagtaccggacacccacccagatcccaatagaatccgccaaatcctgcgggaaattgtaatcccattcaccagctcctacatttaattaacaagagaactattgtatttatctaacacctggattatctccacctttcatttgatccctatttatagattacgctgcgttgctaacgggccgcacctcctatttcctcaagggtgaggaaatgaagtccatgtacaccacctacaatccgcagaatgtggtggccaccgcccgtttcctgttccacaagaagaatctatactactccttctacacctcatcgcgaatcggtcgtccgcgtgccattcaattcgttgatgatgcgggtgtaatcctggaggagcatcaactggagaccaccttggcgggcactctcagtgtctatcagaatgccacgggcaagatctgcggtgtctggcgacgagttccacgtgattacaagcgcatcctgcgcgacgatcgtctccatgttgtcctcctctggggcaacaaacagcaggccgagttggctctggccggaaaggtggccaaatacacggcctgc

SEQ ID NO: 6160 - DNA, 39745 bp, Oryza sativa
tctttttcgttttcttctcattcttctttttttcctttttttctgcacgggtcacagagaaaggagaagaaagggaaaaaaagaagaaaaaagaaaaaggaaaaaaaaattaaatgggacccatttgtcagtcaaaataatgccagccatatcatgtccgtgtggcatgccacatcaacgccacgtaggatcctgaaggggttgtggcgatttgggacctagatgacacactatgataagttctaggacttgaatattcattttgagagtttagggacctagatgacatacccctacatgtttaaagaccacccgtacactttactcaaaaaaatacataaggatttcgcgactactttcgtccatcgtcgttatcatacgtatacgtgatgggaaattctagtgaaacggactctgagatgagaaattctagagttcgcttatttaggataggcctcgattccaagcacgatacgatgaggttttgctttgattcttcagaaaatggaaagagtatgagataaaaatcgaaacccctcaatctcagttttggattatctccaaggatgccaccagatttcatggtggagacgattttagacatcgtcttgaagctgcgggagtctagctggaggtaggagacaaacctgtagcactaggacccacgcgacagtgagaggagcgaagcgaggactattagacttgtggttgcttgataggcttggtgcgcttaagggccagaggcggaggggaggagaagggaagaaagcgtgccggctcaactgcagtttgacagaagaaatgggctaaaagtggcccagagaaaaagaagggtttttatttagatttttatttaaataaatgctgaaatgatatttgtattattaaaattaacaattgaactctgaaaattctgaaagaatttcagatagtgtaattaattatggagaatttaataaaaattaaatccagctatattttatttgggaaattttatttcccacatttacatcaccggaaaattaattgaactttaggataaattctacaaataatttataaaatgatttataaatctcttaaacaaaaatcaaggtggacagtccatcccgttctcaatttggattaggacgatacatacatatatcctataccccacaagaatcatgcatcattcaaaatttctgttgtcgctgctcttcaaaatagaggtcaatgagatcaatttaatgaaaatgacttgatgaaaatacgttcttgagatctgtgaactcaatgatgtcatctcttttcaaaggagatgtgcaactaagacgcaacattacatgcaactccaatcgttcgtccgggcgtttttgattcagcgtctatctgttgaccgtgtgttcatgtgtgtccttccatggcagtctcacgacaaaacaagctagtacagtgatgctagacctacgttttctgtgtttctgtgtttccttccatggcagtcccaacgttccaagcacgactgctttatcaagccactccaaaactagatagtacagtgatgttagaccaaacacatcgctagacctaacatatagccaggtcagtttagaattcatttttaattattttcttcaacatcatatatatctgtaattgcgattttcttatttagcagggatgaaaatgcaattacagagacacacacacatatagtttcttcgtataaagaagatggtgaatttgaattttaattaattacataatgtaaatatttctcaatatttcctcaatttattatattttcatcccgttgcaacgcacgggcacttttctagttttttaatacatgccatagcagtacaaacaaagatgaagaaatattaatcgtgaagaaagcatataactgaataatacgaaggcacatggtttctattattgtacttccatcgatacattgtgtagagatccgatccagtcaagtaatctattattcttttaacaaatcggcacgaggcggtgcccattcattgaatatagcacaaaaaagtttacatcttcatatggtttaaactcaagcaagcgcttctctctagcgagcgaccatgttctagctctcttcattgtctacctccctcttcagatcttgaccctcatagaccctgtatcccattaccagtagagaaaacccatgaatacatcaacctttagctatgtattttttagttggtcccaagaccactcttgagatatgcctatgtggcatagtctgttggtggtttctataggactaggatgtgtatttgtgcgtttataaaggagagtacgtgcgtgtgtatatgaacgctcgtaacgtgtttccagaacaaaaaaattcataggaaagccactctatccatttgtttatatttattaaaccgagcactattcatatttaaattgtgttcgtttgtcttttctgaaagaaattctaaatccataaatatgtagatatcatattatccaagaatattactacatgcttaagtattaatttttttatcattatgctctaatcatttttttgcgaagactctaaccattttaaaattacggttacaatagtatggatcaatggtgacagttatattaaaccgagggagtagggagtaccatataatagcctactcaaccaggcaaaattaatgggcaaaccgatcaaagctatgccaaacaaaagaaataagaccacttttttatgggctttatctacctacggtatttataaagtacggaggacgttgatactaggatatatgtgagattgtatctagacaaggacaagggtttatactggttcagaccctctaaaaagagtaatagctctaacacagtttatacgtatatctaggaaaagactacaatgattacaaatgaggagaatagactagctaaggcaatccgtcgattagaactcgccgagtatgacttagcgagagcttatcagcaaatagggcttcggtttcctctggattgtctactgatgtggttggtggttatggctcgtaattcaatgatctctatcctcataagggctttatatttgtatcgataattgattttcctccaattagaaccgatgattgacttttaatttttctacaagtagaactcggagaccctaaatagaaaattaaccatgggaaccttgtgttttttgaataggactttagagccttccacccagcgaagacagtttccgtccagaatcatcaattttattactgtttccaagggcatcttcccgtataatattaggtttggtattaacatacaacaaaaacccacatataggagatatgccttatatataatcctgccaatttgactcctttaaatataggtcctatctgattcgtatccctcaactgcaataccggatatctggaacacccccgccccaaaaaaaaaactgttataacccatgtaatttaactcacaagacaatattgatggtggtatttgtagatggcatccacatggcaactaggtcatcaacgaaattaaaagattgatgtgggacctacatgcaagttactcttatttagtcatcttcttccaccaccattcctctctctgatcgagctggcggcgatggatacacacattgactacggcattgggcctgacgtgatttttcgccgacctcgctgtcacactcgaagtgctcaagaaatcctctcaccgacctcgttgtcagcctcttactcctttccattcaagttatccattcattaattaacacacacaaatatattttaagttacaaaaaacaattacatatcaaccgttagggcaacagcaatgttacttgcccaacttggtagtagtgtgtcagtagtgtgggccagggctacaggcagcagtaagcaatcatgcactctacaatgtatcagcatatcagtgggaaacaaggtagggccagcttcagaaaaaatcatggatggcagtctctagccgtgacttctttctataacttttgttaggaaaactgggcatagtttaattcctgttacccggttgtagtcgtgttaccgggctgcatctacttactagtctcacaatggttgctaccgggtaagaagagggcatttaatgcttattacctgctgaaatgctacattgtggatgcccttagagctagtataatagtatagcccactaatagctccaattcatctatagctaatctaatagtcaatttatacaatagttgcttactatactattaatatatgatctcacctatcgtacacacagtgtgtcttggagtctgtgctgcagctggctatagatctgtagcccgctactcttctctctcatcgtttatctcattaaaacatatttacagctggctaagagcctgctattgtacctactcttgggatcggtttgaagcccttagagttataaaatagcaccataaaagggctcatggctcattcgtctttacgttgcttcacgttctctctgcggacagccacggcgggttaatattgctatgatgcttttgttcctttggtggcatccaccttccttgtgacgactcgtctctgattgccattgcaggttgcacataatatgctcatagtgtggcgacgtacgtgatgattaacatcaacagtagagagggtattaattaatttggacgtaataccgttatggtgttaatatgtatacctataataaaaccatatttaatattggagcgctagtagataagaattaaactatttgaaagttagctatagcaagtctgcgtgaagaacgtgcatgttttcttattagagagctcaagcataaaccaatatataacgaatgatgtttattccttgcaggcacggccactctcctagcccatactaccaattaatatttgatgggacagtctctagtcatgcattatttgattactaaagaaactttgtagagaggaagttataagaaacttgttgcttctacttaaatgtaaaattgaatctatagtaaggaaagttctcgattttagttttattgcatcaaaagtttacaattcaccatataatagcatctaacgtactttccctcagctatacttccaagtcacttccgtctcttccaacctgatttgctatctgttgggaatcacttcctagctagatagactcgcacacactcctgataaacacacacacatttagaggcaaagaacagtggagtttggtgctgcacaaacgcagcgtttttctcttttttactcaattaacaaagatgctaagtacatgcttaaatagacaaagttagaggccaaaacgtgcgccactagcagccgcatgctactcttagccacacgactagatcatccatatgcacacctagtaattaactaagatcctaatggcccggctattatgctaatgactctactaaccagccactatttgtgtgctcctgcagcatctcacatacccggccgtctcgcacggctcttgggcctactcgtatacggatctcgcgtactactactatagcttcttcgggtaccttatcctatcctgctacctatacatttatttgctacatgcgaccaaattaagcaaacatgattatgcactaataacaagattatttctaacactatcttatttgacctatgttaactcagctacccacttagaatgacattctaaatttgtcatccattatcttctaacaaaatcgatatgccccctaccctatgtgtatatcgtcaaactcattctgtgtcacatgtacttatatatggatatccatctctcggtgaaccggtgacagtcttctttggctcgtggcgtgcatatgtggaggagagagataataggtactaactcttatgtaagagttacctctacctatactagataagtgagaagaaaagaaaggactatgataaaaataaagaaaaccttatagctaagccattttacaagttgactaatattattttcagatgagcttatagctagtatttagctctactattaaacttgctcttacgtgtattactcttttccattaaagccattcatttattgattgacagatatgcaaacatattttaaattaagaaataattgtatgttaacggttaggatggatatgaagaccttaaaagggctcatagctcatcagtcttgacattgcttcgatcacttttgtctcgtcaattccatagaggtaaccagtgctatgatgcttttgtttaaggattgtatggttgtatacatgatctgtaattgcttgtcctaacttattctcagagcgagctagagcctagacatagagaaagtatgagcattgtggtgagcaagtcggcgccggtggtcgtccggccatcgcagccgccggtgaagactacctccggcagcaagatcgttctgtcgcctatggacaagcctagttccatgatgccaaccacagtgctacttgcgttcgaccatcccaccatccaatcagagtgcacggcggagaccatcaagagaggtctcgctcaagcgctcgtcccctactatcctatcgccggccgcctttcctgcgacgacgacggcgatttctacatcgactgcaccggcgaggagctcggagtcacgttcgtggcggcgtccgccaactgcaccatggaggagctcatgtgttgcgtcgacgaccagcctcccgacgccgagacggcggtggtgcagcagctcgccttcaactgcacgcccgacgaccttcatcaccgtctgctgtggatgcaggtcaccacactctcctgtggaggcttcgtagtcggggtgacatggaaccatggcctggctgacggcttcggcatggcacagttcatacaagccgtcggcgagctcacccgtggcctgccatcgccgtccgtcgtcccggtcaggttagacgacgacaacaacgccacccaggccatacctcccttcgccatggccgtttatcagtttatgtccagctccagccacaaggcatccatcgaccacaccttcaacaacatcaccgtcccgtcgagcttgatcgaccacatccgattccgaggacgacgaaccaacgacgacgtcaccgtgttcgaggctgtcgccgccgtgctttggcagtgccgtacccgggcggtgatgaaaaatccggaggcccccgccgtactgctcttcgcggtgaatgcgcgaaagtatctcggagccaaggacgggtactacggaaactgcagcacgatgcacgtggccgtggcgaagagcggcgcggtggcgaacgccgacatcaacgacattgtagacatcatacggcgcgccaaggagcggataccggagcagctcaagatgaccggcggcagcgacatgacgatgctacgggagctcgccgatgaccatcgtctggatggatatgagagcctgctctacttgacatcatggcgaaacatcggattcgaagatgttgacttcggcagcgggaagacggcgagggtgatgacctacccgcagagggtggtgctctccatgtcgatgatggtaaaggctatgccgatctgcgtcatgctcaaggcaacagagcaaggggctagggtgatgtcagcgtgtgttacagctcaccacgtcgatgcattccatgacgaaatcgcaaagctcaacgccaccgcctgattaataaactatgcgaagcatttccctaaatgaataaaattggtcaaacccctactactgttattatgattatatcccttcttcaatttgtgatatttaattatctacagaaaaatttaaatgtatcatgcacgcatcaacaatttatatggtgttgacagaaaacacgaggcctggaagatctgcttaactccagtgcaggtccaaaactcgccttcggatatatgagcgtgccagtcgatttgatcctacaatcaacaaaaaatgaagacaaagaaaccgtaattaaatctataaatgatagccgatcggctgggtactgatgacatcatttattttagaccgatgtcatgtgtgcatcgatcagcagtcatgaataattaaggaagaactaaacctactcgattggctgtagacattaacaatatataattcttatgtcgatatatacttaaatcaagtgattgggatagatcggtcgccatgccgagacagtataaatcacttagatcgaaatataaatcaacaacaaaactatatacgttaatagcgtagccgattagatagatctagcatatatcggctaatactccgataccactctatattaagatattaaagcaaatagaatatatcagacagaagcataatatacttaaatgcaacaagatcttaacataaagggcagatttaacatgtcaatcaagcatataggataactatagttaaatcaggtaagatcggctgaaactccgatgctatactaatcggcaaccaggaagcaggctagagattgatattctaagcacgacttgatagatcaaacttaactgatgcagcattaagtatgaaaagaagaacaatatctagacaatcaagccactggatgtttcatagagtggtaagtatcttgtacaatccaagctaacaccgctatttaacctaatcggctgccttctactaacagatgttagctgattgtaggttagatgacgatattaccgaagattatacaagatatatgataacttgatgaattacataaacaagattagagtatcatagagatggaagcactaatcctgagaacacaagccgccataacaagttttacctcttgttgaagatcgaaaccgatgcagctcaacccgaaagcaagaactcgtcgaaacaaaacgaaagtaaaagggtggcgatgcgccaaaattgtattgaatgtgtgtgttagattaattacatggagctcggggtctatttatacccgagaattacaagatatgtccataccggacacgactattatctctaacaaactctaagataccacaagtctttacgacagacttttgcccacattaatctgtaagaaatttacataaaatattctaattaatagatataattgaattttcaggactctatccatgcgtggcaatcatcttgaagcatatcaactcaacccgataatgtacaccgagtcgtattcttggaatcggctgtatcggctagccctgtctgactcgaactctgccaatcctgaccgtagccaatccagactctagccgattcttactctgttttcgcgacagcccttatcttcgattccacttcgatctaatctccttctccgatgctgatattaccaaatttggtcattaacacaagccccccaagttcgggagatttggtaatgttccggatttgccgcgtatcaactccgagtaagtttcgcactccgccgttttctaaccgttactccaactctttaaatactaactgttgtccttgagaaatctcacaccgttatttccgccttcaccgctcaagcgaaactttatgctctctctctccggcgattcctccgacgcataaggcgatccccaggtgacttcatccccgaccagatttccgccctcggcgatgtcaacctccgccaatccgtcctccgcaccatcggctgagtatgcaaaggtaagtacccatcggctagatctctttctttcacagtagattgattttctctcgccttatcctgtattcttcttctctatccctacttgcatctgtagcatctgtccaatctggttgcaattccaagtctgtcacacgagaaccactattttcttggtccaatcggtagtcttgatcctactgaattcatcaatggcgaaaccaataggattcctttcagattggccaacccagatctaggtcactgaaagaatacctttaaatcttggccatctctagagaaaacctcacccgagaagagctggatcacatggttcaaacgcttatcggccagtaaaagagttcattgggatgaaattggaatcggccaagcactcgaccttaccatagccaactcagctaaggacgaacccctaatggcagctgccacttatttctggttcaacaccatcaacgccttcctattcaaccaagggccgatgaccccaactctcatagatatcatcatgatcacaggtctagatatcacctcatcggctaaccctatgagcctgaacacaaaaaaccaatatgacttcaagactaagagcataggcggctggtcgggctatattgcagcatacatgggccagggtccggtcaccccccgagaacatgtggctttcttgctgatgtggctagagaaattcttcttctttggatcaagctgtggccctacaaccaattggcaatctgtagccgaagccttagaaacaaagagacaattccctttaggcaaaatcctcctcggctacttgtaccaaatgctaaataatgcatcggctaagttagctgtcggctcagtagtcggagcgggtggaccatggtggctactgcaatcctggttgaatttagtagtcatgaagtttgtcaatcggccatttgtaacagaagctgaattcccaagactggagccgattaaagacagtgacagagaagaacgcactcatcggagatgcacctccttcggagaatatgcctccacaccaatcgatgcaggagcaaagctatcagccgaactgctcaaagattggttttgcagcttttatgaaggattccagaaagaagctcgagtctggttcctctatgaagattcaacgcttctggaaaatcctttggactttagattcgaagacatcaaccatgacagatatcagaaacccagagaaattttctcaactgcaatcagcccatgtatccttcctgttggcatttatcaaggaagaaacacttacgtctcatatgaattttatcatccaatgagctctgctaggcagtttggaatgggccaacttccaattggcttattttttgccgataagatccaatgccgagggaaaatctcatctaccttaatgatgaatcggctgcttaatcttcaaggacctccattgggcagcattgaaaatatagagttggcaagattcaggagtagaaacttcgacagatggtggggtgaatggaagctgcatcttttccatcaaccggcttcaatgttcaagatagacctatttccagatattgttccttagctatgtctttattttattaatcgtatttgaacaattattagccgattcatcgcttgattaatctaatcctctgttttatagacaacagaatcttctcccccacaccagagcaatagtggcaagatatcgaatatgccccaggaataattccaaatggaggtggaccatctcctccattcatcggctatgatgcccccaagacttcggctcttctccaaggcttaatcagggaaccagctgatgcaggcaagaaaagaaaaaccagatcatcgactatggacacatcagctccagctctcaagaagaaaatcaaatcaaagaaaaccaagccagttgatgatctgtctgccctagatccatctatcgaacaagcgctagatgaagaagagattgaagaggacattgatcaggctgcagccgaaatgagcgatacagagagaacaccatcggcttcacccaagcagactcctccaactccttctgccccagctcatttttcgagagtaagcatctctcttcgatttcctctgtaactactttacctttcagccgattactcatagatgtataatcacagaagaagaaaactgccgtgaggaagaaatcggcagcaccaactctcaaaccggctccaccagtaagatattctaagtcttctcattaactaatctcggccggaattatgtctaacatttatctttttatagcctcctcctcctccttcacctcttgtgcagcgagaatcaagcaaccgtactccatcggttgcagacagtcataacgtcgaagaggaagaacaaccagctgctcctgttattccagtaagtttttgttgatacaaatctgagatcagccaatcatgttttgatccttaaccatccataatattatctcttgcaggtcttagccgatatgttttctttcgacatcaaggattatctcgatgaaatagaggaagacaccaccagtaaagctgtagctcctctgtctgatgatgtgaagagaatgctcgaggatatctctcatcggctagaagcatcattagacaacttagtgaccaactgtggctcgatccaggccaggttcacagatatccaagctctactcccggatgaactaaccgatgcccttactccagccgtttaccttgagcaacaccaattcaagctggagaaggccaagtagagattagccgatcgccgggaacgcaaaaacatcgaagctacaatccagcacaatcggcagcttatgcacgaagagaagtccaagcttgatcagccgtctgagggcccgatcaagtcaaatattgatcggcttgaagctcgtaagattgatctcatggcacaacttcaagaatgcaacgccgagctggatatggagcacaagaagttagccgatctcccgtaagctatcgaagaacagaaggcgaggctgaaatcggctatcaagaatatcgctgatatgaccaagtccttgaaagtcatccctggaaccgatgctcaagatgcccaagccatagaagaagtagaacaaattaggcagagggctatatcggctatccaacgatatttgtcttagtgatattctgtataatagacctcaagaaattttttgtactcggctaagataccctagtgctattattcaacttgtctagataatcctttgtgccgattaacataactgccaaatatgctcaaaaatttgcaattttccatgtatgtgcccccctaattttacaatgtcaaaaacattgataaaattataaaaacgactaagggcaatataaccatatcgaccattgcacatcggcaaaccacaaccgattacaatatgaaaagaactaagtgcgatataaccatatcggtcatctcaaggcaatgtaaacacatcggctatcatgcatcggcaacatcagccgatcatgcgttaacccaaaacacttgggtaatatttcttcaagtatttgccatttagtgctctgccataaacttctccatcgagtccttgcaacatgtaagcccccttagataccaccttatgaatttggaacggtccttcccaatttggcgaccatttgctgaatttgctatcccgagtcccaatcgacaaaattaacttccatacaagttcaccttccgaaaaatctttgggcactactttcttgttataatgccaagcaactcgctccttatccttggtaacctttgcaagggctcgtaaccgtgattgaaccagatcctccctctcatcggccataaggttgtaatactcatcggctgttaaatcattttgcaattccgttcttctagagtcgattctaacttcccatggcaaaacagcttcatgtccataaacaagtttataaggaggaacctgtgtcgatccatgacaagccatccgataagaccacaatgcttcggctaaacgagtatgccattgccgaggataatcagaaatcttcctcttaatcaacttgatcaagctcttgttagatgcctcggcctgcccattagcttgtgtataatacggtgaagaattcaacaatttgattcccatgctatcggcaaactgaacaaactcatcagacacgaaaattgaaccttggtcagtcgtaacggtttgagggataccaaatcgatagattatatgctcttgaacaaactgtatagcatcccagaatcaactttcttcaaaggaatcgcctctacccacttggtaaaataatcggttgccaccaatataaacttataccctttacttgacggtggattaatcatgctgatcatatcaattccccaacctctaaacggccatgatttaataataggattcgtagtcgatgccggcgctctctggatcgctccaaatttctgacaatcttgacaacctttataatatctgaaacaatcctccagcatcgtcggccaaaagtatccagcacgtcgaagcagccacttcattttatgagccgattgatgagtgccacatatcccttcatgaatttcactgattgcaacttttgcctgatcggcactcaaacatttcagcaacaccccatcaatcgtccgataataaagctcatcgtccaacaatgtatacttcaacgttttatatcttaacttccaagaaaccgattgagatggatcccgtaaataccgatagacatcatatctccaatcatcggctgttgtgacagcaacttaaatctgaacatctttgatcatcggcttatatcccgatgccccttgggctaaatcattagcttcaatattctgctctcgagatacatgcttcaaagttactagccgaaattccttcatcaattcttggcacttgtcattataaactatcaacgtatcattcatacattcatattctcctgccaattgactgatcaccaacaaagaatcccccatgatttcaatagtatcagcttgaacttccttgagtaattgcaaccccttaagaactgcctcatactctgcttgattattagttgcataaggtttaatagtataggcaaactcaaagcatgccccccgaggggagattataactaagccgataccacaaccatgagtacagactgacccatcaaaaaataaagtccacaacacaacctcaaccaagccgatagaatcatcacgatggtcaacaataaaattagctatagcttgtcctttgatcgccttctgtgactcataccaaagatcaaactcagtcaatgaaaatatccactttccaatccttcctttcagaataggagccgataacatatacttgacaacatcggccttgcatatgatagtacattcattggacagtagataatgtcttaacctcatacatcaaaaatataaacacaagcataactcctccacaggggaatatctagtctctgcatccaagagccgacgacttaaatagaacacaaccctctcttttccttcaagcttctgaatgaagaccgagccgattgacttatcaccggccgataaatataaccaaaaaggtattcctttctgtggaggaatcaaaactggaggggaactcaaatattccttaatattatccaaagccttctgttgttctgccccccaagtagattgctgatcggccttcaatctcaataatggtgtaaaaggttctaaccttccagacaaattagaaataaaccttcgaacaaaattaattttgccgatcatctcctgcaattctgtcttgtcctccggaggtttaatcatcttgatcacattgatacttctctgagttatttcaatccccctctcatgaacaagaaatcccaagaactggccagccgatacgccaaaagcacactttgtcggattcatcttcaagccatatttcctggtcctctcgaaaacctttcttaaatcggcaatgtggtcttctatttctttagacttaacaaccacatcatcaatgtagacttcaaccaaccagctgattaaatcatgatatatataattcatagctctttggtacgtagctccagcactctttaagccgaaagtcattacaacccactcaaacaagccgattgcactaggacacctgaaagccgtcttatggatatcttcttcagccataaagatttgattatatcccacatttccatccataaaacttaatatcttatatcctgaagcagcatcaaccaactgatcggccactggcattggatattcgtcctttggagtagctttattcaaatctctaaaatcaatgcacaccctctccttgccgttcttcttgataacaggaactatgctagaaacccattcggcatatcggcaacgacgaataaaactagcatcatataagcacttaatctcagccttgacaggttcgagcatgtcagctttgcatctcctaggaggttgttgatgtggcctaacccctggttcggtaggtagccgatgttcaacaatcgatcggctgagtccaggcatctcataatattgccaagcgaagcaatccctaaattctttcaagagctctatcagcttggttctaaactctgaagataaattctgactaataaatgtcggcctcggccgatcgcctggacctatatctatgtcttccaaatcatcggccgacataaaaccttgaccttgcttgtcatcgagatcatctactgtgtccttggtgtagacgtttgaaccctccacgatgccctcaaagtaatagcttgggttctccatcttcaattggctgtatatcagaatcggacacttttagaaaatctccatcccaaactttgccggataaacaatcaaggccgtccatctcccaaagagctaaattggcactagcaacattgactgacctgtcggctggcacgatttctatcttgtcgccttgccattggatcaagcattgatgcatggttgaaggaatacaacaattggcatgaacccaatcccttccaagcaacaaactgtaagaacccttcccatcgatgacaaaaaacgtagtaggaatagtcttaccgccgactgtcagctccacatttagaacacccttggtttctgatggattgccaccaaagtctttgagtaccatgtttgttttgatgagatcttcggcgtttctacccaacttcctgaacgtagcataaagcatcaaatttaatgcagctccaccatcgaccatcatcttagacatcggcttcccattaacatagtcatttatatacaatggtttaagatgccgattctctgcaccctcgggctttttaaagactgcttgttctggtgatagaatcaatttagcctattcttcttctgtttcctcaacatcggcttggtcgatcctaaattcggctggcaaggtaaaaaccatgttaaccgacgcaatcacaatgcctttccctttggccaatctctttgcttcatcggctacaggagcttgtttcttaacgcgccattcctgcttcggctttgttttctttagccgttgattgatctcttgctcgacctcctgcaagcgttctcagtttctcaatctttgaacccttctcttctgattctttgtaaatatgccaggaggacaccattgagtcttcctgttttcatcatcctccgggtcatgatcctgatttaccgggcccaatctttgatgaacaggaacccttgcatgcttcagtcgattgcccttaatatacgaccggcttgaactctctgcaacgttaccgcatccaggatagtcttcaatatatggcagcctcataccctcattccaacaaaatctaaagaactcacaaccccaatgaggatcgaaaccatcatcaccttcctcgtaatgcttctcctgttgtttattatacttcctttggtacttattgatgatcttagccgaattcatttgaaaaccccttgcacggcccccatcggctgtttggccagctgtatgaaccatatttacgggaaaaggattaccatcaaccttcatcggcttcttggaatcatcaaatttgattttgcctccttcgatagccgattggatctgctgcctaaagaccttgccatcattggtagtatgagatccagaattgtgccacttgcaataccttttcttgcctaattcctcagccgatggaatagtatgaccagcagggagctgaatttgcatttcccagagtaatagatcaaaaatcttgtcagccttggtaatatcaaaatcatacctctcttcttttccagaattcttcacccattggcatggcataacctttttgctccttacccactcggctgcagctatctcagaatcatcatcctcatcgtccgatccacacatataagaacagacatgattaaccttcctagaattcctcctagcttcagcaaacctctgctcgtgcaaagttaccttttgtgtaagatgcggtaagctttcaaagtcttcagacgagaatttctccctgatcggagcaatcataccctgaaaagccaaatcggctatctgggcatcagttaagctcaagctaatgaacttattcctcatctctctgaacctctgaatatattcatgcacgggctcgtcgtgtctttgcttgattgctgtcaaattgtacaacttcatctcatgtaccccactatagaaatagctatgaaactgcttctccagatcggcccagctgttaatcaacccatagggtaaagcagaaaaccaagtaaaagccgatccagccaaagacaaccggaacaacctaaccctcaaggcatccacagccgatgcttcaccacactgagctaaaaatcggctaatatgctcataagtcgatgtactatcttgccccgagaattttgaaaaatctggaactttgaaccggttagggagagggactctctcaaacccttcaggatacggttgtcagtataaatttccagtctcttttggtttaagcccgaactgttccctcatcacgtcagcaattacatcggcccacggtcgttgttgagctgctccttgcgattgttgctgcatgggctcgaattgactgtactgaggagcaaattgaggctgaattaatcccccttgctgatattggtcttgcggggaaggaggttgatattgataacttaaattgcccccctggtaattctgctagtttggctgaatatttcgtaccaagtgctcagggacaatctgaggtactaccgtatgatccagctgcacgtgatggaccaaatgctctggaacaacctgattcagagtatgttgcccagccgatggattcatcaagccttgctggtgaatcggttggatagtctgctgtcttgatggcgtctgctgaatcggatgtacaatctgctgccttggtggcgtttgttcaactgactgcacaacctgttgctgaattggttgtacgacctgttggattgggggtgtttgttgaatcggctgctgctggactagatcaacagtaggttgaagtggtagaaacatggtagcaacctgatcctgcgttagccgattcgcaacctgcccactatgctgtgggttctctctcatcaactgccgaggattaaccagctgacctggtgccgacattgacggagtagatggggaaatcgataccggcgccgtcggctaggctgatgatgcaatgggaggaaccgcttgaataggtggatgaatatcggtgaccaaaggccgataattcggaaaggtacctcctggcaaataaactgggcctgcagcctgatgtttagctattgaaccatcggctattgacttcatcatgtttgacaaggtattgactaataccccagattgattgatgaaagcattgtgcacagcatagtcaacccggtcttgaaaattattgaaaaattcctgtgacgcactgccatcttgattaagacttcctcctcgtggcccctgagtgccatcaccttgaactccatgtactccttgagagtggtcaccctgattctcctgagccgatccatttgtagcacctttgttgctcggttgagccgagccacctaaggcttgtttcatctccccatccttggaagaaccggtcccggggacatcagccactactcgcacctgatacttttgcaccactgttcccttgcgggtctgcatgaatgagttcaagaactggttccgtgcttgctgcatcattgcttcaaactccttctgatcaggtgtcaatttgtccagagtgatggtcatgacgttgccctcattaacctcagataggtctaattgctggatcttctctttaacagaacctgggctagccgaagacggcgatggtggcggcttctcggccatgaggaaaactgctttctgacttctaatcagtcccaatgggcgtgccaaaagcgtgttgacagaaaacacgaggcctgggagatctgcttaactccagtgcaggtccagaactcgccttcggatatgtgagcgtgccagttgatttgatcctacaatgaacaagaaacgaagacaaacaaaccgtaattaaatatataaatgatagccgatcggctgggtacagatgacaaatcatttattttatgccgatgtcatgtgtgcatcgatcggcagtcatgaataattaaggaagaactaaacctacttgatcggctgtagacattaacaatatataattcttatgtcgatatatacttaaatcaagtgattggttaaatcacttagatcgaaatataaatcaacaacaaaactatatacgttaatagcgtagtcgattaaatagatctagcatgtattggctaatactccgataccactttatattaagatattaaagcaaatagaatatatcagacagaagcataatatacttaaatgcaacaagatcttaacataaagggcagatttaacatgtcaatcaaacatataggataactatagttaaatcaggtaagatcggctaaaactccgatgctatactaatcggcaaccaggaagcaagctagagattgatattctaagcacgacttgatagatcaaactcaactgatgcagcattaagtatgaaaagaagaacaatatctagacaatcaagccgctggatgtttcatagagtggtaagtatcttgtacaatcctagctaacaccgctatttaacctaatcggctgccttctactaacagatgttagccgattgtaggttagatgactatattaccgaagaatatacaagatatatgataacttgacgaattacataaacaagattagagtatcatagagatggaagcactaatcccgagaacacaagcagccataacaagttttacctcttgttgaagattgaaaccgatgcagctcaacccgaaagcaagaactcgttgaaacaaaatgaaagtaaaagggtggcgatgcgccaaaattgtattgaatgtgtgtgttagattaattacatggagctaggggtctatttatacccgagtattacaagatatgtccataccggacacgactattatctctaacaaactctaagataccacaagtctttgcggcagacttttgcccacatttatctctaaggactttgcataaaatatcctaattaatagatacaattgccttttcaggactttatccatgcgtggcaatcatcttgaagcatatcaactccacccgctgatgtacaccgagtcgtattcttggaatcggttgtatcggctagccctgtctgactcgaactctgccgatcctgaccgtagccgatccagactctacccgattcttactctgttttcgcgacagcccttatcttcgattccgcttctgtcgaggagtgatcctctctagcgggagatcgtgggatccccctttcgtgagttcgaccgggggaaaaggcccgcctctgaaaatcacgtatccgcccactagactaccaggtagtgtgcacacaacaagattatacaggttcgggccgcaaaggagcgtaataccctactgctgtgtatgggatttaggcacaagttacaaaggtccctaagccctggagattgcccttacttcctttctcattgagctcaggttttttcccttggtcccccccttttcggtgggaaggtcctccttttatacctcaaggggaaaccacatgcaccgactctactattcttctctcgggtgggggggagcccacccttccttgaccggatcttgacccgtgccttcgcctggaagctaagccacggtttgtccttgagtggggttcagcgccgtcccttgcctaacacgggggacacccctgtcaatcccccattaatggatgaagaattgtggtggccgtcctctcatggggaggacctcgaatgacccttccgatgggacgggtcatacctacctccactctgccggaggtagatgtgacgtgggggcacatctgtccgtccagtcaaatgtgaccggtgacaggccggtcacagatcagatgtgaccgacgacgggatgtgtgagcgcaagcccccccatcgagagtggcgacagttccctgaggtacctggaactccagaccctcgctgtcatcgccatcgtcggcgggggccttcttcttagactcctctcgctgatcattggctggggtcgtgagggctttgccctcccgtcgactctgccgcttctcctcatcggcttttcgaaaccgctcggccaagttcttgaccgagcggcagtcggcaagactgtgccgataagtattgtgcaccgagcaccacttgtccgcggaccgacccttaccagaaggggcggtatagctcgtcttgccgtcggtggccctttccctgcgcggggcccgcgagggcccatcagccgcaaggacgtggccctcgtcatcagagcgggctggcttccgcttgccccttctgtcccgccgcttggagcggggggcagtctcgggggcggccgctgccgccgcaccggtgctgggggagttccaagcccacgcctcctccttctgagccaccttgtccgctagctcgaagagctcagcggtggtcttaggctccttggaggcgatcttctccagcttgcggttgtgccgcacgccgttccaaaatgcataaacgaccgcgtgggctgggatgcatggaataatgttgcggacctagcagaagcgctgtatgtatgagcggagggactcgtcgtacttttgctgcacagcgtgtaggtccgcctcctcccccagacgggggtatgtgccctggaagtttgtgataaactgctggcacaggtcctcccaggagtggatggagtcggggggctaggtcataagccatccacgcgcctgacccttaagagccatggggaaataattcgccatgacccggtcatcccctcccgccgccacaatgattgtggtatagatctggaggaactcggagggattgatgctgccattatatttctctgtgaggttgaggcaaaactttgggggccaccggacgttccggagactcgccacgaaggccttgtaaccagttccccctggggtggacgtgaggggcgggccgccgcgcgaggagaaacgcggcactccagacgaggaggcgccttctcccatgcgggtagcgcggcgctcgtctcgtcgacgctcaatgttgactcgagcgtcctgctccccgtataggctatcgtgacgcctccgactttccgaggcccctgacgacgttggggccgtagatcgccttgaggctgtggctatccgacgggccctcctccttgctgacgaggagagggtggtggaggtacgtgatgtacctgtggcggtggaacggccacttacggccaaccgccgctgggcagtggtgaccaagttggcgacgtcgtccaaccatcgttggacgggggcctccggctccacgttcaccggggggtgccgcaggagggctccccctgcctaaagcgcgccctggggcgagctgccgtcgcggtaggtcaggcagcggcgcgctcggacgtgccatggcctccccccatccagaggcggggagagggccgagccacccgatcaggcgtgaacctccctccgcagggggtcggagaggggcggagtccgcgagccgcgtcggcggtgacgcgggttgcgactcccgctggcaccttcactcctggaaggagtaagggtctgcacctccacctcttcctctaaaacctccaccatgatcgttggggccggaggaaggcttggagcggaaggaaacgacttctcttcgaagcgcgcgaaatccccctacctggcgcgccagctgtcgaggaatgatcctctctagcgggagatcgtgggatccccctttcgtgagttcggccgggggaaaaggcccgcctctggaaatcacgtatccgtcccctagactaccagctaatgtgcacacaacaagattatacaggttcgtgctgctaaggagcgtaataccctactgctgtgtatgggatttaggctcaagttacaaaggtccctaagccccagagagtgcccttacttcctttctccttgagctcaggttttttctcttggtcccccccttttcggtgggcaaggtcctccttttatacctcaagggataccacatgcaccgactctactactcttctctcgggtggggggggcccaccctaccttgaccggatctcgacccgtgccttcgcctggaagctaagccacggattgtccttgagtggggttcagcgccgtcccttgcctgacacgggggacacccctgtcaatcccccattaatggatgaagaattgtggtggccatcctctcatggggaggacctcgaatgacccttccgatgggacgggtcatacctacctccactctgccggaggcagatgtgacgtgggggcacagctgtccgtccagtcatatgtgaccggtgacaggccggtcacagactagtcattcctgaccatcgcgcgccagttgggcatgccgcacgtctgcccctaccgcattgaatgcggcagggggcagttggggcgctgcgttcattaaaggaggttcggcttgggccccctccccgcttgctccccccgccagatggcggataggcgagggcccgaggggcacgacgtgacaccccgaggcctcggggcaaaacgggcgagggcccgaggggcacgacgtggcaccccgaggccccctggccgctcctgcgatccgcggggtacgggggtagggccatgctgtaggtcatgcgccaggatgggaaaggtaaattcccctcattccacatacccccgggcccacttcaccgatagcttcgatctaatctccttctccgatgctgatattaccaaatttggttcgttaacatatgtgccttgtatcaatgtatatttaaaaatgtgtcaatcaagctgaatataataagaagcaagatgatctctattattgtactgcaccaatgcatatcgtgtagagatccagtcaaaagtaatcattttttttaaatgaatagacacaaagacggtgctatttcattcattgaatatagcaaaaagaaaaattgcatcctctaagggctgcaaattaaggatctatctaaaccaattcggtttgaagaaaaacaaagaatttagattcctaatgattaactactacaagtgccattcggtttgtaggaatgaggtatagaaaaaccaaagaaatttttttgttttcctccaagttgtagagagaaaactagaaaaattttcatttaatttactctaaactcttgaaaaaatttcctatggattggtgtgtgcatacatttccactccttcacttttcctatttctgtgagtagaaacttctcataggattaggaaaagtggaggaatagaaaagcatgcatacttcaatccgtaagaatttttccatgaggtttatgtggatggaaagtttcctttcttctctctgcaacttgtagaaaaagaaaattttctttgattttctatatctacattcctacgaaccgaatgacattcataggatccttagaaatccaaatcctttgaaattcctcccaaacgaatacaccctaaaccaaacaatccctcagtataaaaggaagaaaaacatgtgactaaacatggttgaactcaagcaagcgcttcactacagcgcacatccacattcttgcgctcgtcgtggcctatctccttctcgaggttttgactcttgacactatagcctataatcccatgtgaatgcaaccatggtcagagttcctttgacatggtagttgtttcaatcttttttctctccatcccaaagtgatggtggcagctaatgtttcttggacatataacagccttccagtgcctcatcttcttctctacttcttaataatgataccctggtcagggttgtggaacctttagggtcaagggtattacgcaaccctcctgctacacaaagcagttcaagagggtcccgtaattctacagaaaatattggagacacaaagtttaggggtgagactctctttactattcaatcctccaatcaactgtacaaatgattagccccctcctctctttatatagtgcattccaatatatgaaaggttcgttgatgggcccattaagtgtatttgggccaggccttcatcggccaagcctaaagtttcttaacactcccccttgggcactcaccgcgtgatgtctatgcctcgttaaaactccataaaaacccagtgggaaaaattgcagaaagagtacatagcatacgcatgtatgtcacatagattgccttattaaaaaccttgataagaaactgcaagaaaacttatctaagggaaaaagagtacaatttacccaaattcttgtatcgattttcttaatcgtttttgggtacttgattctttagttcatgcttttgttaatagactggcagaattccccccttgaattttgcatctcttttaagtgtgaaccatcaaaactcgttgctcttatgttttcaaaagatagtccgagtgatgcttcaatggtcaaatcttgcatgatttttccataacttgtagagatcatacaatctattagtgttggtgtgacgcacatatcattatcttcttgataatgattttggggtttgggcaaagctcgaaccatgttacttgctagaaatggtgaactatatccaaggaacctatgtattctcacattctgatattctatggttcacttcttcatgtgttgtaggtttatgagccaaagaaacgtaggtttctacctattttatctcaaacttgttcggaaagagtgagctttctttctttatgcgatgatattaagatcatcaacttggtttgggacttttaatgcttgtatgcgagtgcccaatccaaaatttctttaaccattcattgtcaactacaggtcagctttgcgggttgatcttttagttgattttaaactccaggttgactgccaatgatttgctgtatgaagagaatatttcccatagcaggtctcattaccaattcctattggttgtatgtgacacttatgtgagtatccatcgatatatggggatatgcaattttcttatgcttctattctttgacatgggcatgatcctttcattttaccggcattggtgtgcactccaactgctggttttcttccttgataggaagatgtggtatacatgttctgaggttccataccatttgccagctctgaacaggctccccctcaaattctggggttacttttagtgactatgagcttgaaagttcctttcgtcccattttcaccatacgtctccagttactttagagatttaaggagccggagttcttgtcctatttattttttgaggcatctggacaagatgaggtatacctttgcattcttcggtatttcaccctcctccggtgcattacattcgggtaatgcaacttagtcatgctctccagatcacaaaagtgataggtagttatccaattcttatgtgtgctttccatactttcattcgctggttcttgattaaatgtgcatccatcctttctttgaccatttttcctgacatttatcattttaagggttatttctctccccctaaacgactgaaaataatccttcttattgtcaaggaatttaggataagttcgtacctctgttaaaaatttccattttttttcggtgggagcccttatggttgtgggacatgcacgtgtgtcgagtcaacactagtattcttttaagtggacaacacatttcgaatagtccggttattgatatttcgttgtctttggagctaagagtccattgaagtggcaggaatttcaataatggtgcggtggacatttttagtcctattcttgtggacgtccggtacttagtgcttttcttaatgtgctgatgccaacatgcatgatcttgcaggatcgatttggcaagagcgtagtgtcaattagacacaattgaagcttttcataagtgcagtatgtatcggatgatccattaatgggctaaatatgtatgtgaattcatgtggcatgcgcgaattcattccggtatacctttcaaggtatgtcgaaatttatgtggtggtcgatgtttgacatgcatccgatgttcgatggtatgtgcgaccagagtgaccacgggttatgcagccgatgcaactatggcgcatggtaggagttgcatggcgcgacctaatgtggcatgattcgtccagtcccccagtacagcaaggttgctagttggtgcatcgtacagcatttagtgcacggagctagtagcggccttagtgttcatcatgatgctgtatgatgcatgccaatgtctggtgcaagtctggcgcgaggcgctcaggcagtgcgcgtgacaaatatctcatcgtggcgatacgacagatgatgtgagattgtttgtgctatattcatttgcaagatactaaattctaagaaacactgactatgagatagcctattttagcctacatttcttagtgaggacattgatctcgcatgcttaggtgatgagtatgcttctctcatcttctagttcccacaagggaacttttctgcgagagtttgccattctcaagaaatttgaggtgtaatcgtttttctaccgaaaaacaatatcctttacaatcattgcatgcagttgtgaaggtagttcacgtctttgcatagattgaacttgtctcatgtctctcaatattacactttgtggtgcttttgttccacaatgttcctctttaccttaggctatgcatattgtctatgtgaataaagtaaaatatcactacttcaaggcaagaagtaaaactttatcatatagcaaaatgcaacataatattggaaataaagtctagccatgcaaggcgaatcacgaaataaatgttgtgctctcatagagcttacaaaaccattattcaaaaatgttcataatgcaacttagctcaaaataaaataggagcatcaaatactcaaatggaatcaaccagagtattgagctctgcaaagatctgctcctgggtgacggcctcttcatttgcttcgcctgctgcagctgtaggggcgtcaagtggagggagtagccgcagtgacggcctcacccatgtgtgcttctgcggacgccttgggcttcctgctggcctggtatgcatcgatgacgtgctggggctcctcgcaaatatggctccagtgaccccaattgccacagttgtagcatgtctagtcctgctggccatatgccttgtcattgcgaggtggcttggcttccttcttgcccttgcctccctgtgctccctgggcagctggagcttttccctctgacttctcagctaccttcttcccaccacgcttgcccctcttcctctggacaggcttgcggaccttgtaactgctagcattgacttcaaggccaacactcttgccaggcggttgggagacaaagttcttgcggagaacctcgtcatgagattcagacacctgcatgatgtcgatcatctcgtcatactccttgtatgacgcttgcctgtagttacaagcgctctgcacagtgctagggtggaaggtggagagtgtcttctcgatcttctccgtatccgtgacaaccttgtcgcagagggagaggttagtacagatctggtgcagcgtggagttgtactcggagacgctcttgaagtcggcgaacctcaggcgagcccagtcctgctctgcttggggcaggatggtgtacttcaacttctcgaaccgcttcttgagtatggtccaaagagtgagtgggctccgcaatcccatgtactcattcttgagcgtggcgcaaaggtggtgccgtaggaagtgcagcacccgatcgttctcatcaggggtaggcgctcggtcctgcggggtgcccatcccgatcgtctggcggagcttcttggctccaaggacgatctagacatcggatccccaggtcaggtagttctggccatgctaagctagttcggcgaactccttattcgtgatccctgacattttattgcaaaagtactacaataagatagttgcaactatttcatgctttttccaatatttatattcatagggaatgcgaataaaaagtgcaaaatattaaataaataaatactagagttcatattaaaatgcatacaaatattcatacaaaaagaaaaggtgcaaaagttgcatatattcatataaatactgaaaacgaaaaattaaaaatattcattaacagtaataaatgccttaataaatttaaattcaaattttataagacagaaaatgcttaaatatggaatataagcgacatttgtaaaattcaagggcctatttctaagttttacatgcggggaatggataaaaatgaacgtttccgaaattctacggtcctatgcgcaaaaggtttccacgctgggagttatgcgcgtaatttttagaaaatctaggagcctttctgcaaaatcgccaatctatttccttctttcttcttctttcctgcggggccatgcggggtgcggccggcggcggtgcgcggctgcgcgtggtggcgcgcgcggcagcggcggcgcatgcggcagcgccatgcggggcgcggccgacattgcggcgttgcggtgcgcgcgcgggcgctagaggcgctgtgcggtgggcgtggaatcgggcagcggcgctgtgcggggcgcggctgttggaagctcgcggcagccgcgcgcggcgtgcggcgacgccgggcggggcgcggccggcggcagctcgcggcaatgcgaacggctgctacgacggcgggcggcggtgccgtgcggggcacagccggcggcggctcacggcggtgcggcggcgtggtcggcgtcgcaacgtgatgccatgctgcgtcgtgtctccgatccgtgcttgcattggtgaggttcgtctctgccatgatggatgatgccgagaaaaccccaatcaactagatgccgacgactccacctcggcgacggcggttttcatcgggagttacaaaaacggaacgaggaacatgcaaagatttccttttttctaaattcaatctacaagatgcaaagaggattcacgaagcacttcaagagggtccagtagagcttcgtacccgataacgtattaagcaaccctcatgctacacgaagcagtccaagagggtcacgtaattctacagaaagtggagacataaagtttaggggtgagactctttattatttaatcctccaatcaactgtacaaatgagtagcaacgatggtcagagttcgtttgacatggtagttgtttcaatcttttttctctccatcccaaagtgatggtggcagctaatgtttcttggacatataacagccttccagtgcctcatcttcttctctacttcgtaataatgataccctagtcagggttgtggaacctttagggtcaggggtattacgcaaccctcctgctacacgaagcagtccaagagggtcccgtaattctacagaaaatagaaacacaaagtttaggggtgagactctctttactattcaatcctccaatcaactactctatttttatagtgcattccaatatatgaaaggttcggtgataggcccattaagtgtattttggccagaccctcatggtccaagcccaaagtttcttaacaaggggcacctttgccctgagtaattagtggtttgggccaagggaccagatcatggattgggccttattgctcaactaaaaatggatcatggtgctaatgaaattctatttttgcctatataagtcactcagcctactcaaccaggcgaaatgggcatttcaattttttttcctttccgtggaaaccaggcagaccgttctgtgtatggcgaccaacaggaggaatttcattttgcctctctcaagtatgccacgagttctattaattcatctccctcaaccacaaaagttggtgtagagactatcttaactattaaaaccaaatcaatttgccttcccatacggttttaatgttaagtgtctatacataggaatcgggaaaaaaaaatccagtgagacgttcaacagattcatcacacacttgctatgcacactcatatagtacaaatagttgatacctcacgctttactgcgagatatacgagtgaatgcatgctatacgttataatcaatcaataactcccctaaccgtaccctttttctccgcgtttttaattattttcgggctatctcgttgctttacacatcgctcctcctcctcccggctcctcgcacgtgcctgcgtgcggtcaccagtccaacaattttttgggcgctgtaggggcgtgcgcacgcgtcggtctcgacggcaggttggaaccggtttcattagtaggctattttgtaaaaaaagtctttgcgtttccacaaaatatcgtatacgtccttggactggttcacaacccgttgtgtttgttacgaaaaagccctcctatttcacaaaaatacaatgtgaaaaatagaaaattccgttttaggggtagcgctataaacataaaaaacaaaggggtttttccaaaaaacaaccacatataccccaaaccctaaccacgagttgttccccactccccacatcacggccgccgccccacccacgccctgcgcctcgtgctcggcgccggcgccggcgcgggactccccccacctccgtccgccctcccgcagtcgcctccctcgtcgtccgccctctacccgccgccaccgatgtcatccgtcctccccccgttctccgttgactctccttgcaggccgtgcgacggcgcggctcgtggcctcgtcttcggtgccgccgtagtcagatccggccctcccgcggctggatccagctccgctgccgccggatctggcggccggaggagacggcgcgacggaggaggatgaccgcgataggttcgtacgacgaagcggcggaggccgatgggtgtggcaccatcgtcgccttcatcgtccgccttccctgcgacaccacactcccccccttgttctccccccaccccacccaccgacaacgaggcttgtggcggcggcgcatccggctgtgcacgggcgctgtgccaccgccgcctgtcatctcaatcgggtgcttttttggcccgattgagatggcttccttgtgacggcccactaatttcaggtattttagaggccatcatagatgagaggatctgtactagtataagtatgtttgaataatgtgaaaatgatgtggagataatgatgtggcattgcttgcatattgagttctaaaaatacaacaaaattataaatgatatgtcatatttgcatgatatttgaaatactctagataataattactagtgtgtgtgatgatgtggtagcttgcatgtgattgaaaaatgtaattaatacttaagacttgtagcgagaatcacgtgaaaaaattatttgctcgagcactaatccttagacacatatgagttaatattggttgtgatatctctcctgttacttatatcagttatgaatgttcgtggggtaacatatgacggaataacctatgcactgtcaaatttgctttatattttactactggtgagactatttggtcaaaacgtagttaatatatttataaatttctagataaacgatgagtagccactgttaattatttagaaaaaaaaaagagaaagagagcatgactattctatgtgataattttttaatatcaaatatagtcctaatattttccaacatacgtctagtttattagagaacggatggatgtttgcttgtaataagtataaagattcgagaagagaagtacggtacgtagtatgtacagtacatatttatatgtacatgttagaattgtttttagttttttgcggtgaacagaagtaatacgtatgcatgaatgtttctctcgtacgtagcaattaggtgggacagtcccaatcgtaattaaatcgtaagtacatttttttgttcgtttttttctgcgagtagtaagtatgtatgtttacatacaactattcacggatattttttttattcaggaaggttagctgagatgtattttaaataaatctcatttagtgtccatcaacttaaataaaaatcaagaatttgattttttttcagagtttgtagtaaagtaactcgttaattacagtgccgtttgtagagtacttatgtatatacacgagagatttattttctcaatctagtgaatcactagtggagaaaccgtttgtagtcccggttcgtaaccccctttagtcctggttgtccaaccgggactacgaatccgggactaaagatagcgatctttagttccgggtgaaataaccgggactaaagatcgatctttagtctcggtcggtaacacgaaccgggactaaagttcggtcagatacgtggccggttgattcatctttagtctgtgtaccattttttttatttgcatagccctgtttgctgcatggttgattatatatatatatatatgtattctatatatatgtattgtatatatatatatatattacaatacatatatatagaatacatatatatatatatatgtatctgtgtatgtgtatatgtataaatacatatattacacacatatttataatttaaagcacttaacattttatgtgtatatatgttaccaaaatatatattaacactaaagtaaatgtacgtacatatataaatatatatatataaatgcatgtatagtacaatttatttgctcgctagctatagctacgacttcgacgccagcgttacgtcagaagaggaaggaccgacgttatggattgtcgatccgtcgtagtagaattcaccatcgggaataaggtcttcttcgttgatgaaccccatcagttgttcttgaacagccgtgataaaatccttgtatgggagatttttcctcatgtgaatacgctatcattcgaaaaataatgacatatcaatatatgaaattaatatacaacttaacaaatcgatacgcaatgaaattttgaatggtttatgtatacatacatcgagctctcgtgtggtgtatatttggtttgataggcagtgggcatactcgcatacgtagtagccgcataagttagttccctggtcctgctttgcacactacatgagaaacgatgagagatttaatatactctttatattaactgtaattagagattcaattcaatataattttggatcatgcatgtactcactggaaaatgaaacctccgtccaagtttttctttccaagtcccgcggaccaattgacggaaccgatcccaagccctacatgtgcagttgcaagctatgattaattaaatattacccgagatcagcataatagcaacagagtcccgcgactttggaatagatggcattatattacatatctatcagttggaagagcttgtcaaaaaccttctcctctttattcattgagtcgtacacagtgactctgcatgcgtccaagtcgaaaaagaacaggacccagtggaatctagaatatgcgtgatatgagataaatatcagaatgtacatgttatatgtatgggaacgaaatttgttcgaacgacaataaaaactcactctgtgttgtacgtcaatagtatgaacgtcttgaaatgctgctgcgttaggagatggacgagattgtcctctgtgtctttctcgtacttgtcgagcatttcggtgttgattttccgagggtcgatgaacccagtatcgtaaaccccgtcgggccctttcaatctccattctacaataatgaaaggaaattattattgcttacacatatgccaggagctaattattgaacgaaacaaatcgaactcaaagatacttacaaaatccatgcgctcagaagagagacgtcgagggcgtcccgatgataccgatcgaagacatccttgaaatggatccttagaacatcttctccttccaagaagtcggggtttctgatcctcgctccgaacatctctctacccttggcgctcatttccatgtaccgttcatggaatttgtacatttgtgttggtagggactgcagctgctcaggcctgacaagcggtttaccgagttcaaacttgtatgccacttccgccttcgggattggtgcgcctccaaccaactgagcaacagttagaccggtgtccgaaatgaaatacgttatgccaaagtcttcgccggtcgccaacggctcgaccacttggtttggttgtctccaagctgaggaactggtttggacttcttgtaataggctttcctaagtgttcggtcatagtccgatagctttaaggcctccttgtttgtggtggacattcccttgaagaaattcttcacgctcgggtcaataggtatcttcttttcaggactccgaggcttgagttgcctcttcacttctcctgccacataagcgtcaagctcctcttaactgcaatcgtacggcggctccttgtttttggtggtgtcaacttttgtccttcttcgttgcccttgtgctggcaggaggtggagcttggcgagaccgtgtcttggaaggtgcaggcggacacggtggaggtggaggcggagaagccggaggagccggaggagatggtgcatgagaaggcggaggaggcgtaggagccggaggagatggtgcaggaggtggtggcggaggagctgaaggagatggtgcaggaggagacggtggagccggaggagatggtgcacgagacgccgcttgtcgcccagggaggatgatgtaccgtttgcgccatagtataatggcgtgccttgtgtctcgtagatgcgtctcaccatctcctcctaggtagtccaactcgaggtcctcgtacacggcttccaccagctcaacttcgaccctcgagtatcctgctggaatcggcctgcagtggtaagtccctgaaatgtccgttgggatggccattcccgacgccaccttcacgtgatgagaggttatctattagtaatcaacctaagcagcaacttgcggaacgtacaagtcaaaaatcatatattacatcgaggataccttgattgataagttcttgaagggaatatgcagctcacatggtgtccgttgcgtgatctcatcaacggggcaggtggtttcatcatgggtttgcatggcgtccatgctatgtgatcctacctgccccgttgaggcgcagctgctacgattacctgattggctgaccattggaggaggtatgtacggctagggatcatgtgaccgatgtgctgccatgcgttcatccaccttccgggccacctaatcttgcatgctgagctcgtagctcgataccctgtactcaagatctgcaatcttcgcctcggtatctctcttgctcctcatccgactcctgtacgtgtggatgtcctccttgaatcaaatcttccagggaatcacgccttttactcgtgttcgtcttggatgctcgggaatctgtagggcgagtgacagctcgtccttctctctgtcgggtcggaacgtgcactgagaagaggcttccactatgtccgttagtcgactggcagcctcacgtatctgatcgctgaagaccagggagccatcaactgggttaagcgttccaccgtgagcatagtaccagaacttcgatcgatccggccatttagcggtggccggttcgatacccctctcaatcattcttgcctccatctcctcccacttcagtattgcgacgctatagccacctaaccccaagtggtgatggtacttcttcttggcagcgttttccttgtttttgaccatcatcgcttgcccttgttgccctgtcttgtcagcaacgaactcgtcctaatgatcccttagctttgggaatacgtcgaagttcggtgttagtaccttcaggatgtatttcttgtacagatgtcccttgaagctcttgaactgttctgccattttcttaagagtccactgtttcactatgttctccgtacccgcagggagcgtgaacgtctcgagcattgtggtccacagcttctctttctctgattccgggacaaagctgtcattatccccgcgtgcccttgttctgcgctagtacaccttcctgacaggcacgttatccctcacaacccaaccgctgtgtcgtacaaaattcttggctacttctgccgggacactaggtcggccgtctgcgtccacctcagttatgatgtgccgaccctctatcttcttcgcagcacctcgttgtccgcgtgccctcttctgtccagtggagggatgacttccactagccgcctcctcgttcccctccgcatccctctccacgttgccctcctcgttcccctccgcatccctctccacgttcccctcctcgttcccctctgcatccctctccacgttcccctccttgttcaagtactggtttggatcctcgttcccctcttcttcgttccagtactggctgcttccctctgcgattgtatcgtacagtatctatttctcatcacgatcagccatctgttcatagaagaaatatttgctaagcgtaatattaaaactctactaatcttgtattaaaactcaaataatcatatatgctaagtctaagtgtcgtgtattagaaccctagataatcatatatgctaagtctaattaagtttcgaatattacatctctaataatcttatattaaatctctaacaatctctaacaatcaaatatgctaagtctaattaagttccgtatattaaacctctaataatcttatattaaatctctaacaatctctaacactcacatatgctaagtctaattaagttccgtatattaaacatctaataatcttatattaaatctctaacaatctctaacactcacatatgctaagtctaattaagtttcgtatattaaacctctaataatcttatattaaatctctaactatctctaacactcaaatatgctaagtctaataatctaataatcactaacactcacatatgctaactctaataatctaataatcttatattagaaatctaacaatcttatattatatctctaacaatcacatctttacatcacttgcctgcacgaattccttcgagggctagctaccacttcggcttgagggacgacgacgatgacgtcttctctgcaacatgcaaaaaaaatgtattagtctaaacgcaaaggaacatataatgtatttcacgttttcaagtatatataatcatatatatatatatatatatatatatatatatatatatgctaagttcaacaatagtttaattatctcgttcgtacacgtttcgctcgcgttcgttcgcgttcgttcacgttcgttcgcgtttcgttcacgttcgttcgtgttcgttcacgtttcgttcatgttcgttcacgtttcgttcgcgtttcaatcacgttcgtttacgtcgttcgcattcgttcacgtttcgttcgcgttcgttcgcgttcgttcaagttcgtttgcgttcgttcgcgttcgttcacgtttcattcacgttcccctccacatccctctccacgt

SEQ ID NO: 6161 - DNA, 6525 bp, Oryza sativa
agtaaagattcgtaacaacaaccgggattaaaggtcttatctttaatcccggttgttgttacgaaccgggagtaaagatatctttactcccggttcttctcaccaaccgggagtaaagatatttttccgctatttccaaattcttttttaaacccggttaggattaagaaccgggactaaagttaatagcactgaatattgaatttcgttgcatatgtgtttctaaaatagtaaataatgcattaaaaattctaattaacatatgtaaatcccacatgcatgtcgtgaccgagaaaattgccttttcccgaacgctagtgtattaatcccagtcccaggaaaagccggggtacaccacacaaacatgatacaaaaggcacatctttattatatcgataatatttacattattacaaaggcacttcaggcctgacaaacaaaaataaacagcagcggactagcgggcctacggctccatcttcacaggcgctcaactggggtataagccaggactccacctaggacttcttctccaaagcttcttttactgaagggaggaaagatagagcaagaatgagtacaaccacagtactcagcaagtcacaccgggagatgcatgattaatgcaagggagtacaaggggtaataatataggggttaagtttggcagtaaacagcatttaaaagtcacttagttgcccaaagctattttataaatacgatcctagagctacatagtattattaatcaaggccgtggacccacacgaacctgccttaacccaaggcctacgatgattcagaccgaactggcaacccgacctgggtcccaactcgtcccaagccaacccaggccaacctttccacattttagttgttaagaaaattttaagaattaaaccactaacttgggtacattgctaggcttgcccatatccaagggcacggctattcgaatagatttactctgatcagaggtgtacatctttacccacaagacacatctttactccgcattccatggccttggaacccgtcgtaaacatgtgacataacccttcacccatcctagccgtgaataaaagtaccgacccaaccctgcctacggtcgatatcccgggacaggcaggccaggattgagcccctagcaacaggatctagaccgggtgcgccacacgcataggggtgagaccacccgcgtactagtccagtgccatggcatctcgactaacgggcaccgacccgtgtagtcttcatttgcctagacatctcgattaccgagccgcagctcgtgtagccttcatttgcctcagagatatccatcgtcgcaacgacttcatccatctctatccgtgtccttttgtttaggactagactgagcaccgatttaagccttacccattagacatgtggttagtacggtagtgctttgcaacagagacccgagcttaatccttatattggccggggtgctacttcccataactggcatgcacccaaaccccaccggaaaacatgttttaggggttttgaaagaggaagagaggggtatgtccaattccaccataagccaaccattccatagtatccaagtgatatgagaattcccaaagtctaaagttataaaaccacctaatgttgcctaattaatcagcgaagaatctacctaaattcatactagtggaaccatgaatagagtacccactagttggggttttgttttcctagggtgaacaaggtgataataaacaatagcaataataataaggtcataacaaaggattaataggaagtgctaaataaaacagtgataacgcgggaatttaaataaagcggtaatgcagtaatttaaatcaaaataattttataaactgggattcaatatgctcaagggagatgcgacttgccttgctcagagagaatggccttccgaaccttcggcgacgaccgcaaaccacgcttcgagaacctccggaacgacagaagctacgcgaagcacacaagcaaagctacaagcctataaaaaagcaataacaatacataaaaagaaagcacacggttctttaggttataacaaacattaggagacttgaacgggtcgattcggagttcgtatgatcaagatatgatcatccgaagtttaatgctgttacatggagatttacggattattgtgattaggttttgcaattataaaatatgtataagcgctagcctggaaaagacaggaaggctgcgccgttgacatacggactccacatgtcaacctaagggaccacggtggaccgggtacacagagacggtccacgggtcgacagaagcagatcccgtgtgtcaaccgaggcgagtggccgacaaacggactccactagacaccacacgggctgcacacttggaaaccacgcggctaccgagcggacacactatcacggtcaccacacgcacaagcgaacgactaccgacaccggtacacgggtaccggggtcgacaaccgcacaacgggcacggggcgacacaaaaagaatgaggacggggcagcgaaggagagatccttaccaccacgcgacgaggcgagggaacgacaacgacgaacgggcgcggcggagacggccgggaacgacggagacgaaaggcgaggggacgacttcggcggtgatccttggacgaaggcgagacgcggccggcgtaacgcttggcgacgcggaggcgaggacgaagacgatgacggggctgcggcacttgacggagcgaggacgacgaacgagaacggcttgacggagggacgaacgccacgacgaccgggaacgacgggaggactacgacgacgatgaccggggctggcaaggaggcgacgtgggcagccggcagcggctgcacggagacgaggacggagtggaacacgccgctgtgatgccgacgacggaggcggtgccgcgagacgacgagtcggcgaggaggaatgaccgaccggaggagtcgtcgacgaggacgaacggagatgacgataacgaacaccggcggggttcagatggaggggaggcgaggccgagggcaaccttgacgctgtgatgccggaggtggtggttgcgcggccgacggcgcacgggtggaggaagggccgactggggaaattccggcaaggcggatggagaggccggcgcggcacggcggtgttccggcgaaaccgagggcaggccggggtggagggtgacgccgcaatgtcgacgaaggatacggcgacgtcggccgacgctcgggcgcggcgatcggggcgactgaaggcggtacagtggcggcaacgccactgttttgctggcgaggacgcgtctccaggggtctccgcgcgaaacggagggcaggccgggggagaggaggctgctgtgacgacggggaaggcaacggcacagccggccggcgcgctgacgcggcggcagggcggctggaggcggccggcgcgggggaaagagaagggcgaccgcggggaggggtgatacgaccacggtgaggctcgggatgaggctaaaacgatagaatggaggatggggattccattttatagcggagggaagcgagccgagcacgggaggagcggggaaaggcggcggaaaaggcgcccggcggccatggaaggcggccatgaatggcgcagccgttccggtcaaaatagtgcacgatcaaaggggagattaggggaaatagggagaggaaggaaaggggattaattccccccaattaattttggaatccaacgcttaaatcgcgcagatttgagggaggaacgaactagggttttcacgggagagagagaggagctgtgcgggaggaggacgacgaccgggcgggtgggacccacgtggccaggcgcgcggtcagcgcacgcatgtgcgcggcacgggcgggagggcgccgctcggcttgtgcccggaggcggcccacgaggagaggagggagaggcagcccgggagggagagggaggaggagggagctgggccgaggggaaggagggagggcggcccaagagagagagggaaggaaaaagagagggaggaagagaggactttggccgcgggccgagagagagagaggactttgggccagacttggcccaaaggaggaaggaggattatttttaggtttttctttttattaaactttgatcatagttgttgttgcttaataaatattttcggtgctctgaaaatttaagtaaaatttgagtgctctttttagaccaaggagaatttaacgaaaattctccgggccacattcgaaattttcttgtacgcattttaatgtttgccaatttctttttgaattttaattaattctattattccttttagaaaatgatttttatttcaggatgaatttatcaggacgtgacaatgcatgatttaaaacttttaaaaattctaataatcatatataattagcatatgcatgatattaaattgttaaaaattctaactaacatatgtaaatcccacatgcatgatttaaaacttttaaaaattctaataatcgtatataattagcatatgcatgatattaaattgttaaaaattctaactaacatatgtaaatcccacatgcatgatttaaaacttttaaaaattctaataatcgtatataattagcatatgcatgatattaaattgttaaaaattctaactaacatatgtaaatcccacatgcatgatttaaaacttataaaaattctaataatagtatataattagcatatgcatgatattaaattgttaaaaattgtaattaacatatgtaaatcccacatgcatgatttaaaacttttaaaaattctaataatcgtatataattagcatatgcatgatattaaattgttaaaaattgtaattaatcatatataactagcatattcaatacatccaaaatagtttacaacaattacggcaatagatcggcggtgacggttgtccgcacgtactttctcctcactattgttccttccttgtgatcgctacgtgagtaaggggtatcttcgtttgataggaggatgctagggtcaaccgtcaccgtgaaagggggttgcccatcaaactgatcgtaatcctcgtcagtcttgtcgtctactccaacgattttttttgcctgggagaaccacgtggcgcttcggctcgtcaggccctttgcccttctttcctttgctagacatgtccttcacgtaaaaaacttgcgttacatcattggcaaggacaaaaggttcgtccgagtatccaaccttgttaaggtcaaccgttgtgatcccactgtcatcaatcgttacgcctacaccagtcaacctaacccattgccaccgaaacagagggaccttgagaggtccatagtcaagttcccatatctcctcgatggcaccgtaatacgtgctagttgtaccatcgtgtcccatggcatcgatacgaacatcactgttctggttcgtgcttttcatgtcttgggctcttgtgtagaatgtgcacccattgatctcatatccctagaatgtcgcgatcgagccagatggacccctcgccaggaaggccagttgctggttaatcgtctcgttacccatgagatgttgtcgcagccatgcggggaaagtatcaatgtgatgccgtgtaatccatgcatcggacttaccaatgtttctggcacgaactagagccaagtgctcctcgatgtaaggagctaccaatgaaaatgtgtcattatattgaaaaatgaaggtggaaatatcaactcaaacctgacaagacattgcaacacatcattctgaagggcttctaacctatccggatcgatgaccttctgcgaaattgcgttcatgaaagaacatagctttgttattgttgcccggacattgtctaggaagccaagaaggtttacgcaaaggttcttagtgaggtgcatcacgtcgattgcgtggcggacgtccaagaattcccaatagggtaactcccaaaatatggagttttttttccacatcgccgcatgaccatcttcgcactctataggctggctgccaggcccctttccaaacactactttaagatctttcaccatagcaaacactgttttcccgctgtgatgtttaggcttcgtacggtggtccgtcttatgttcaaagtgcttgcctttcttccatactgggtggtttgcagcaagaaatcgacgataacccatgtacataaccttcctacagtgcttaagatacgtactttctgtttcatccatacagtgagtgcaagccttgtaccccttgtttgactgcccggataagatgctaagtgcaggccaatcgttgatggttacgaacagcagcgctcgtaggttaaactcctcctgtttgtcctcgtcccacatgaggacaccttccttcttccacaacagtttaagatcttcgaccagtggtcttaggaacacatcgatgtcgttaccaggttgcttggggccttgaataataatcggcatcattatgtacttcctcttcatacataacctagggggg

SEQ ID NO: 6162 - DNA, 7289 bp, Oryza sativa
agtgtcacatcaacacagacgcggggatcaaccctccgtgcccccggttggtggtgtcggctgtagagcctttgtggcgagccttcggaacgtccgttggcccccaaggttccggcccaccatcgccgaaaaatatgacgggagcgtcaaccccgccgagtttctccaggtctacacgaccgggatcgaggccgccgggggtgacgacagggtcatggcgaatttctttcccatggccctgaagggacaggcacggggttggataatgaacttgccacccgcgtccttccactcttgggaggatttgtgccaacagttcaccatgaactttcaaggcacatatccgcgcccaggtgaagaagcggacctgcacgcagtacagcgaagggatgatgagtcacttcgctcgtacattcagcggttctgtcaagtccgcaacaccataccatgcatccctgcacacgcggtgatctacgcgttcagggggggtgtgcggcacaaccgcatgctcgaaaagatcgcctccaaagagccccagactaccgcggagctttttcagctcgcggaccgagtggctcgcaaggaggaggcctggacttggaacctctccggttccggtgtggcggcttcggccgcccccgggtccgccgctcgatcagggcggcgggacaggaggaggaagaagaggtcggcccattccgacgacgagggtcatgtcctcgccgtcgaaggcgtttcgctggccacccgaaaggggaggcctgtgagcgacaaaaggaaggaagccgacgctccctgacctcggctacttggaggagcgaaggtggcgcgcggcccttcgagccgcgcgctaccagcagagcctgcggcgctaccatcagcgccacgtccgggcccgatcactctgcgtcgatgacctcgtcctacgccgcgtccaaacgcgtgctggattgagcaagctctcaccaatgtgggagggtccgtatcgagtgatcggcgtcccccggccgggctccgttcggctggccacgggcgacggcacagagctgcctaacccgtggaacatcgaacaccttcgtcgcttctacccctagtgggggtcgggtgtcaggtcttgggctcgggccaaccccgcacccccccgggcgtgcagggttggccgggggcttatcttttttctcttctgtatttcaataaaagcattttcgatttcctaaaggctgtatctgtgctgttgtttccttttaaaggatcttgacttgaaataggtcactcgtgttcaatcctgctctcgggggctcgggtcggctaaaatcgccaaacggggcccagaaccgagccgtgccccggggcgtgatgaactccgggggggaatcggcaaaaacccacaatcgggtcacccataaccctcggtcaccacgctcccggcctggccagtctcgacatgtggatctccccaggcactagccccgacccgagccatttgaggactaggacctgggcacgagcccttgttcaagccaagacacaaaaggaccgtggcacaggcatcgtcgtctcatacacacaacaaatagaattgacacaaaaaatttcctctttatttgattgcagattaaattagtctatacaagaagggggcccgaaggcctcggaacaagaaggaaaagctattaagattggcggaggcctgggggctcactccgacgcgcccgggtagccggcctcgccgtcgctgtcgtccgcaccgtcgtcaccgcactcctcgtcggagttgaaggcaaacgcgagccgaggggccgctcattattgtcggtcggttttcccttgctgatgcgcgcgatttgcgaccgccgggattctgcccgaagagagagagagcagggaggagaggcccccgagtcgaacggcggcccaaggccccagacggccggagctggccctccgcctgcttgtccgacggtgccaggcgcccccgacccccaggatggccccgaggccactgcgggaaggccgcgcctgtcgtcctccgaccccgaggtcgtcggcacagaagacgagtgcaccccgcgaggccgcttggacaaagagcgccccagggatgtggcccctagcgaagaggatcggccccaccgaaaggtgcagcggcccgtctactttgttagtgaggccctccgggacgccaagacccgataccctcaggcccagaagatgctttacgctattctgatggcttcgaggaaactgcgccattatttccaagcgcatcgggtcacggtggttacgtcttatcccctcggccaaatcttgtataaccgagagggtactggacggatggtgaaatgggcaatcgaactctctgaattcgatttgcgctttgaaccacgccacgcgatcaagagccaggccctcgccgactttgtggcggagtggaccccagctcccgagctcgtctccgcccccgaggccagctcgggcccatcgcagctgcctcacaccgccctctgggtgatgtagttcgacggcacctgtaggaaccggccccacctatcaccaggccttagaagtggcgtcacgcccgaccgcttccctcggggagggcgatcgccctggcataacgccgggggctactgtcggtgacatgggaccgggagtatcatgacttagagacttgaggcagacacgatcacccacatggcctaaccccctcggggggggtcgggcccgagggtgatacggccgcccttctctttgtctccccgaggggtcggaccgctcccgtctcggccccgagggccgaggcgccccgaccccttgtgggttttgcgccgcgtatatggggtaggtgagcatagcggggctcacctaaccacatttattgcggtttggacgagcgcgtcacgccgcatgtaacgcagtgcagcgcgctcgtttattcggtctgtgaccagtcacagaccgatcagatcgtgggttaggtggcgacaggcggtctgacgcacgcctcgccccatcccgtcaggacgagagcctccaagcactcgtccctagccggagccggcgtgttagctcctggagatggcacattggttccggtcagatatatgccaggctttatcctaaccattacaggcaagatattgtatgaagaagggcgaacatgcagattgttaaactgacacgtggtggacaagaatgaccgatttgtgaccggtctgacaatggtcatgtcgtcagcagacagccatgttcccacgtcgcgcctgcttccggcggaagtggaggtaggtatgggccgtcccatcagaaggtcattcggacggcagccatacaaatctccgtccattaatgaagagaagtcaagttggagggaagagaggatgagtccccacacaaaagaaagagagggagagatggtgcatgtggtatccccttgagatataaaaggaggaccttgcccacttagaaagaaaaaaaagaaaaagaaagaagaacgatcccagaacgatcgggggctggctggcactttgtagcttcttcatacacagatccaccaaaacacaggagtagggtattacgtttctcagcggcccgaacctgtatacatcgcccgtgtcttgtgtgtttccactctcgcgaaccttccacacatagactaggagcttagaatctcacccagggcccccggccgaaccggcaaaggggggcctgcgcggtctcccggtgaggagccccaagctccgtcaaatatctacagccgatcgaatagatttagttctttattatctatttacaaccaccgatcgatttacatatgacatcggctcaaagataaatgagatgtcatcggcacctagccgatcggctatcgtttataggtttaaccgcggtttctttgtttttatttcttgtggattacaggatcaaatcaactggcacgctagcatacccgaaggcgagttttggacctgtactggagttaaccagatctcccaggcctcgtattttacgtcaacagcggggtgtataggagtatagttctagagccgccgacgtttgacgggacttctaggaaataaaaaaatgaattctaacaatagctatgtttgatttttagaatcacaatgaccataaagagtaggcggcggacgggctatagagaagcatagtggcatcgtttgatgagacttctaaaaattataaaaaataaaacctcacaagacaataaactctaaaaactacaaggtccaatttttaaaggttcggaatttctaaaaagtaaaaaaaaaatgataatcatgttcgattttaaaatctcaatgacaataaagaagggaggcagcgggcgagccctagagaagttcaatggcaaagtcgctgatggtttggcaggacttttagaaagtaaaattgaacccaaacgataattatgttcgatttttaaaatctcaatgacaataaagaaaagagataatggacaggccatagaggagtataatggcaacgtttgacgggacgtctagaaattataaaaacgaaatccaacgtgacaataaactctataaactataagatccaatttttaaaggttctaaggagaatgatagaaatagtggtagatcgagcaagcaaataaagaaggaaatgacataatgggtagcaactggtgtgacttttaaataactatataattaaaaacacggggatgataagttttggtctttcaaagtcttaagacaatgagatagctatttaataaattttaattaaaatcatactaaaaatatatgattttgtttggatgctagccgcgcaattgcgcgggccacccatctagttttatttaagctagtgaatatttgttcaaattctagtatactactaaatacctgagtttttttttctttttctgaattttatgaaatttttatctaaccgaaatgaatgcaaactatctaaagtaaaaaattttaggttgacaatctatctaagggcctgttcactttgatgccaaaaaaaccttaccaaattttggcaaatgccaaaattttggcaactggtaggatttcttatataattaccaaaatttggcagcaaattaaatgtagccacttttttagtaactttaccaaaatttggtaaggttgaaaatggcatcaaattaaacagacctaaagtaaccaggttgacaaattcaatgaatgccatgtaggatgaatttgtcaacctgagttcattacagtacattgagtttattatttccaaattttatctaagctagtgaatattattttctttttcttgttcaaactatctaaagtaaccagtaaccaggttgacaaattcaagttttatccaaccgttttgaatttgtcaaccttgttactttagatatatagcttgccatgtaggatgaaggttcataatatagaagtgatgcaatggtggattttaacaaccagcctgctctgaagcatagcattgattcaagattggaaattggagatcatgccttttcattttaggtaatatcgaaaaggtcatgttgattcaagatttcatttttacggtcctcttttgacctctttaacattcaaaagcaacctatattgaatcttctttggcttcttggctgatacatattgggaaaaatattgggtaatcataatttttctctcaatttaaataattgtaagtgcaataagaaaaatattaactggccaatctatttagggccatattttatatgccaatagtaatatatcttttaatcacgggatgctcattccgacgatttcagcatcaattctagtgcatttgcatttgttcggcattcattgtgttgcggtgtatcatgggctctaccttgtctcatttggaaccggaggcatcaagttctgcacttcagccttccgggctgatcagtttgatcttgctgacctactagagacgaataaaaagtgctcatcactaattcttcaactgctactacttcttgatcaacatcggatcccagctatcagcaattgtgcttctctaggcgtgggacaacattggttggggggtcagattctgatgagtctctgtatcgcagtgttcgtggccggtagaagggtgtacaagtgaaataaacctgatgaagaaagtctagtgaaaagtgattcccgatgatttttgcgtctgtaagaaattgacatctgcaactatctgatgatagctcaaccctccatgagttaccgttaactacagaatcaaatttcaagacccatcatactagtgaattcaggtacttgaattgtcaccaaatacaagctgctgcatgttggtaataagaaagtttccaattttgaaattttgttttcttgttgtgagatgtttgttttgcaaagtataggtcctgccattacttaaaatatagtccgtatatgcatcgccactccaacatgagtagtgttgcacacatccatggagtagctttctacaatagctatggtctactcggcattgctcgaatcaaagcactttgccggccacagccaatgcaatgagcatcatgtggaatgctccatcctgcctcaacctcagcgccgccaagttgttcgactgcattggcatgattgaattgttctatatatgaccagtccccagacaccatgaagagcctaagctttgtgcttgggcagctcggcattgcagctgggaactatctcaactccagcatcctcagcattgttgtggtaatgacacgtcgcatgatggggctcgcctgggtggttcccatccaacctaaggcttcttttggttgagttgggaacccatccctccggtacagaaaacgaagcagtccattagcacatgattaattaattatttgctaattttttttaaaaaatggatcaatataatttttttaagcaactttcgtatataaactttttgcaaaaaacacaccatttagcagtttgaaaagcgtgcgcgcaaaaaatgagatgggggagttgggaactccaggaaacgaacagagcctaaatgaagtgcacctagactactgctgctactgttataagactttttagcattatccatatctatttatttatctatctattatatactaaaagtccattaaacttgctataaacgctcctaaaccgccacgtagcaatctaaaatcgctctcaaactatcacatagcattaatatctatctcttgatttttagttaatatggtgggtccaatattctaaaccgttagatttgattgagatgtaaaacatagagcccaaacg

SEQ ID NO: 6163 - DNA, 5569 bp, Oryza sativa
ttgttcttatcctcatctccgatactgatataaccaaatttggttgttaacacccgcccgctgcttctcctttttattgtcattgagattttaaaaatcaaatatgattatcaatggggtttatttttttactttctagaagtcccggccaccgccttgttcatttgcttcacggcctgcttatcgtccctccttttaatcgtcattacgattctatttggtgttttattaacagtttttatatgtcgtatcaaccgccaccactctactcctttatagttatgttgcttaatttatctcgtcatgtgttttagatggtcttttctttcagtagtctttatgtttatcaaaaattttagttatttataaattgtattcctaattgaaatcttatttttctttttctaatttcagaatttattttttcaaattttaattaatatcgtattgtgttcttttaatattcttattttttattttcaatttcatttgttttaaaattgtatttctacttgaactctcttttagtttttctaattttggatactattttatttttattttaaattttaattaatctcgtattgggttcttatatggattcttcttttaatattgctttttttaattcttaatttcagctaattttaaattgtattcctacttgaactcttattttattttcttttgctaatttcggatttatttatttttattccgaattttaattaatctcgtattggactcttattttaatatttcttattttttaattccgaatttcagttatttttaaattgtattcctacttggactctcatttccttttctaattttgtattttattttatttttatttcaaattttgattaatctcgtattgggttcttatatagaaacttatttcaatattccttatttttaattccgaatttcagctatttttaaattgtatttctacttggactctcctttcctttgctaattttggattttattttatttttattttgaattttgattaatctcatattgggttcttatatggaaacttctcccaatattgcttatttttaattccgaatttcagctatttttatattgtacttctacttggactctcctttttctttttttttctttttctccgattaatgtgggaatttctaccccccacagcgaatgtggtacctcctttcaaagctgttttaataatataactagctgggtggcccgcgcaattgcgcggctaagcacctaaacacaattataaattttttggtataattttgcttaaaatttattaaatagctatcttgttgtcgtaagactttaaaagaccaaatcttatcatctccgtatttccaactatatattaaaatttattaaatagctatcttgttgtcataggactttgaaagaccaaatcttatcatctccgtatttccaactatatagttcttaaaagtcagaccagctgctacctcttacttctgtcatatccttctttatttgcttagatctaccactatttctattcattctccttgaaacctttaaaaattggatcttatagtttcgtttttataatttctagaagtcccgtcaaacgctgtcattatgctcttctacggtccgtccactgtcttttctctttattgtcattggaattttaaaaatcaaacataattactgttcgggttcatttttttactttctagaagtcccaccaaactgtcaggggctttgctattgtactcctctatggctcgtccgctgcctcccttctttattgtcattgagattttaaaatcgaccatgattatcattgtttttttactttttagaagttacgaaccttaaaaattggtagtttttagagcttattgtcttattgggtttcattttttatagtttttaaaagtcccatcaaacgatgccactatactcctcgaaggcccatctgccgcctactctttattgccattgggattctaaaaatcgaacaaaactatcgttagaatttactttttattttctagaagtcccaccaaccattggcagctctgtaactatactcatatacaccccgcccgctgcttctcctttttattgtcattgaaaatttaaaaatcgaatatggtatcaatcgggtttatttttttactttctagaagtcccggcaaccgccttgcctatttgcttcacggcctgcctatcgtccctccttttaatcatcattaggattcgatttggtgttttattaacagtttttatatgtcgtattaactgccaccactctactcctttgtaggcctgctacttaatttatctcgtcaaatgttttagatggtcttatacatgcatagatcatactggcgaagatattgtaccttaaattttatttgccatgtcttataaaatacgaatatgtttaggccagggtgaccgacgggggtggagcaggatcgagcgctccccccctccccgtgcgcacgttccctggccccaccacgtgtctcaaaaaaatatttcacctggtgtactcataatgttttactatctatagatttaatgttgcagtgaattaaaatattattttgtaacaaatcacccacatattttggaaaccctctattaagaaaagtcgtttcatttatttgttccactaaaaatgtttcacctagtgtactcacaatgtttcactacgtatagatctaatgttgcagtaaacaaaacttcttttgcaacaaatcacccacatattttgaaaattctctattaagggaatttgtttttttgttccacaaaaaatgttccaccaagtgtactcacaatgtttcactatgtatagatctaatgttacagtgaactgaaacattcttccgctatttgctaaaatattgtttttatataaggtgaaataacgccggatttgataataagctaaaaaaatttcgtcggaatatatccatgtgtggtcttgttttgaatatttaattgcaacgaatttaatggtgtaatcggatcatgatttggataaataatttaagagaaaaaagagtttaaagtggttttgcacgcatgcatggctctgacgttatgctgacgttagcgtccgattttttcacgcttggatggggcgcccgatcggtagtctcatcctataaaataatgtatatctatgttgatttcttcgtagcatacttgctttgcttctagatcgattgtgggctatctccgcccaatgtctctgctatcttggcatgtgcatacggcatgacatgcatgcagtgttctccctctttactatcaatggccatatatatatggcacgtatattttccagccacatatgaaacgtggatcactatagttcaatttgcactctaattaccatctaaacatagattaatgtaatttgtctgattactgtccataagaccatagcatccatactcagacaacctgtccgactcctaatcaatcaacatgtccgacttctattcattcaacatgtccgactcccatatttcctattagatcaaagttgctttctatttagactcaatattgtcatgaataatctacaccactaaaatctagtacaactacgatttaacggtgtaaatatttatccttttatccgattaatgtgggaatttctaacccccacagcgaacgtggtgccttctttcaaggctgttttaataatataatagataatagatttggaactttcagccagtagaccatccaaccagtaaccatcataaacccaaaatttttggtccgaaattgtgaatccttgttatacttagagatgcaggatcacaattcacatcaaggtgatataatagcacctggcgagaggctggtgatgaatcagaggcctctgatcatctgctgcatccattatggcctcactgctaaagcctacaatcttaatattttggtacgtaaaccaacaatgctaagtaactcgtgacgaaggaattacacacatcccgatgtacttgtcaagcatctcctataatcatcgttctcaaagctctaaatggtactaagaaagcacctttgttgtacatgttatggagggcgtggtatgtccgaaatgaccagattcatagcaaaaggcatggcaaaaaacctgggtctgtagcctttcttgtcgattatgaaaacacattgttgccgatccgacaactaatgatgacaaagggaaatgaaagatgtatgttgaacaaactgagaatgtagggcatggtatctctgaaatgatcagattcatatcaaaggcatgaccaaaatcagcttgtgcagaatgagaaatggcaatgccaccagaaggacatgcgaaggttaacatggatgtcactttcaagaaagaaactagtgaatcaagtggtggaattaattatcgtgagagatagcaggggtctggtgttgctggcaactagcccttgcaattatgcagctctgtggtgctggctgaggcactagcctgcttagagtgactccgggtggcaatggaatggattcatacgccgcagcttctccacgccccctttgtcggttcaggcatgcagctcatgttgcgccagccatgaaaatgatggtcttgttcttagcgtctgatgagctcgcagacgccgtattcgtgaatcgtgatggagtaggcagccatggaggtgaggcagggcaaagctagggcacacaacgagagacgggggcgatgtcattggaagtgttggcacgtgctttgctcaaccaagagcgtgggggcagcagccaacctttggcctcgtacattacatcaactagatgatgccccgcgctttgctgcgggatatatgttagataatggagaaataatgaaatgatttggattgaaatattatgaaaatgatttgagaatgatgatctagcatgtgtatgtttagttttagaatgaagtaatttgttgggctttgtgtgcttaatgggttgatgcagcatgcttgaatttaggttttataagtgctaataaatacaatgcttccatgttgagctttaggtgtttataattagtaggcattagcttcatagaaagaagaggttagaaatttacatggatgccacaaatctattttccagatatacccttgtactacacctactacaccaactttcagctctagtagaaataatctaatggatggctcatccaagggtactttacaaaatccaataatttagtttcctcaacagcagtagtcctctggtcatccatctacagaacatcatctaactatatcatataaccaagattaattatccactcctaccaaaaagcgagagattaacttattcactgacaagcaggccgaggcattagataggagcaggtcgttgtctccatttccccatctgtgttaaaagcaattgaaatcccctactaatccccatcacgaccatctccaccaaatctgccccaaatccaaatggaagaattagaattcgtcacctctccagccacttcgcttactttgaacagtagcagcagcagcgcagagaaaaataaaaaatc

SEQ ID NO: 6164 - DNA, 31924 bp, Oryza sativa
tcatcctccccaatctctccttccttctctaccggctaggccgctttctcctaaaaaaataaagtgttttcagcggtggcagagtggcggggaggttgaggagagggcggaagcagggtgatgagatgttggagccgaaggagctcgagggagccgatgtggtagctatggtgagctgagtagcttgtaagtctgatatagtgaggtcaggtaggcgccggcttcaacccaatgtggccggccaggcctctcgcgtaaagcagcgacgcgacgatcgatgaccacaaaacggttcggtcgccttgagcagatcctcctcctccttcctcccctcaacctcaaggaagatgggaagtcgccgccatcgagctgcatagcgcgagtcaatcttgtatgctgcttggtagtattacagaacacagcaattaagaagagggtcatcaagtgcaagaggcacccacacatggaaggtggcaagggcatgcatgcattttctagctgcacccatcaggtactgtcatgaggccaacatgtgggtcccactgggcagtgatataagctaggaaattggcattaatttgggtagtactgaggaagttatttcaaaaaacatacaaactctgaaggctagagaggaggctcaagccttgatctgtgtggctcaagagagattgaaaaagaaagaggtagaagataggttaccaagtgcaattgaaatagatggctgtgtgtcacccccaaaaaatgctaggggcaaagagctgtgtgcaaatgggggtgacaaacagcaacaatacagttgtatcatgatgaatattctgttttcgaatgtgaggggtttggggaatcctggtagaagagagcagttgacagaaatattaaggaagaataaagtagaggtggtttgtttgcaagaaacaattagagtgagttttgcagccaatgaattggatagattctgtggggggagggactttcactggttaactaaaccggctgagggtcattctgggagtttgttaatgggggttaacttggagatggtggatgtagtggaagttgacctaggggagtttttcataagtatgttggtagaatcaaaaagagagaagaaaagatggaggattgttaatgtatatgggccagttcaaacagataagaaagatagatttctccatgaattgactgagatggtgctggtggagcaagaggctgtaatgatagggggagactacaatttagtaagaagtgctgaggaaaagtctaatagtataatcaacaagagatgggctgccaaatttaatgcttttatttctactgctgaattaagagagttacatagagggggaggcaaatataccaggacaaacaaacaaacaaatccagtgagggaagttctagatagggttttggtgtctgcttcctgggataatctggaccccttcactgttgttggcggtatggcatgaggcccttcgaccaagcctgccgaaaccatgcgaccagcgaggattcaagcccgaggcgtcaagaatagtcaaggcgaagctaacatggcgaagactatggaacaacgacggcgaggggcggagaatcgcgcggatctcgccaagccgaaggcctcttgggcgaaggatgtatggcgaagagtgtacgtcgaagggagacaacttcgccatagcaagtttggcctcacgggggccaatgaggccgaactatctcgacaagcctagtggccgttgggccaacaacagcctgacggcccattaggtgcccgtgaatctcaattacactgtatacccatgtaaattcccctgtgtaacctaaaccctagtagtaagaacctataatgagcctataaatagtcccatagggtcatgtaatagggggatcaaaaaattctcaatttaatatacttcacttcttttcagccaccattgagtgaccacgtccttcgacgtatgcggttgtcgtttcgacaacagctggtgccgaccttggggacctctgagcgaaaccactgagagcaaatgccaccgaagagggtcgtgaaggagaaggttacaaggcgaaaggaaaacgaagccggggaggatatggccgtcgaagagggagcagagccttcggcgtccattgccgaagagggagggccgccgcctgcctctgcacccgcaccatcattaccgacctcggctcctgtcgtctctgggcaggtgccgaacacagctgacatggcgaaggcagccgcggcggcaagggcactccagaccagggcggaggtcctttcgacaagccaaccgctggtgtcccaaactgtatcagcacagccggcgatggcaccgactgcgcttgccgccgctcaagtcaatcctgaccctgaaacacaagccgaagccgacatggaggccatgcggcaaaacatgacacaactccaagacatgcttcgacagatgcaagaacagcagcaggcatatgaggcggcgaggcgggccaaggccgcttcggccctaatcctacagtattcggcaggctatgtcccaccccaagtctttccacaagcgccgatccagccccttctgccacaggccacgcaagcgccagtgtacttcgccgggcagccttcgactgcagccctgcacgtgcagccgcaagctcagcgtgtcgctgcccaagcacactctcaaccacctggccaagtatcgcaagcaatggcagaaggggcttcggctctgcaagcacagcttcaagctttccttcagcaattcaaccaaccccacaacatttcaagtacaaccccttcggcccagccggagggaaatacaggtcaaggtgcgcctagttggttgccgtcgaaccagccgggtccgggggcttcgccttggagtcaaggaccgcagttcgacttcgtcaatgttgctccggcaccaaccgctcggccacaagcaccgacaccaggcttcgggacaaaccaagcaccaaaccaggtcgccatggcatggacccagactacgtttgacccatccatggcgcctcaccaagcatcaccaatcggagctgggcagccgaacatcatgatacaacctcatgcgcaagccatgacttcacccttcgccacgccatacccgcagcaaggtgccgtgaacagggtaggggacgaaaaggggctaccactgagtgggggaatcaagaatcgtccaatcccaccccagttcaagttcccacccgtcccgcgttactcaggcaaaaccttcagcacaggcgaaaacagacgcgaagagcaaatattgttcgatgttgtcgacatcccgtacaaatacaatgccatcttcagccgtgcgaccttgaacaagttcgaagtcatttcccaccacaattatcttaagctcaagatgcctggcccgacaggagtgatcgtggttatggggctccagccttcggccgcctcaaagggcgatctggccataatcagagctgtgcatattgttgaggccgaaccgcatgaccggccgaagcacgcaccaaaacccgcccctcatggcaaggtaatcaagatacagattgatgatgccgaccccacaaaactcgtatcgctgggaggtgacatgggcgaagaagaggccaagaatatcctagaggtgctcaagagaaacatcgatatcttcgcctggggacctgatgaggtgggagatgtttcgaaagatctcatcatgcaccacctggcagtcaagccggatgccaagccaaggaaacataagctacacaagatgtccgctgatcgccaagaagcagcaaaagccgaagtccaaaaattgctcaaggctgggttcattcaagaaatcaaccaccctgagtggctggcgaacccggtgctagtgcgaaaatcaaacggcaaatgacacatgtgtgtcgatttcacggatctaaacaagtcatgtccgaaggacaatttccccttgccacggatcgaccagcccgtggattcgacagctagctgcgagctcatgagcttcttggatgcatactctggctatcaccagatccacatgaacccggccaacatccccaagacagccttcataacaccattcggcaccttttgccacctcaggatgcctttcggcctgaggaatgccggggcaaccttcgccaggctagtgtacaaggtcctttacaagcagttggggcgaaatgtggaggcttatgtcgacgatatcgtcgtaaaaagccgcaaggctatcgaccatgcatccaacctacaggagaccttcgacaacttacgtgcggcgggtatgaaactaaatcctgagaagtgtgtttttggtgttcgcgcgggcaagttgttgagtttccttgtttctgaaaggggcatcgaggcgaaccccgagaaaatcgatgccattcagcaaatgaagcccctgtcgagtgtacgtgaagtacaatagctcacaggtcgaattgcgacactcagtcgattcctctcaaaggcagccgaaagaggtctgcccttcttcaagaccctctagggcgcgggaaaattcacctggacaaccgaatgccaagcagcattcgacgagccaaagcaatatctgcaaagcccacccgctctgatcagcccagcaccaggaagcgaactgctactgtacctagtggcttcgccagtagcagtcagtgctgccctcgtccaagaaacagagtcaggccagaaaccggtctatttcgtctctaaagcattgcaaggagcgaagacaagatacattgaaatggaaaaacttgcttacgccctggtgatggcttcatgcaagctggtagaaggtcatgttgacaagtcctttgaggcaaaggaagaaggaatgaagaggtatttgaaggctgttcggtctatggaaaaatgcttcgcaggcataacggtcgaacatttacctagaggccagaacgaggaagcagacaccttggcgaagtctgctgcttgtgggggcccacattcgctgggcatcttttttgaagtcctatacgcaccaagtgtgcccatagagagcttggaggtcatggcaatcgaccaggcagaactgggcaatgatccagaggactggcgaacaccgttcgtaaagtacctcgattgtggctggcttccggaagatgaagcagaagcaaagcgccttcaactcagagccgcaaagtacaagatggtctcgggccaactatatcgttccggggtgcttcaacctttgcttcgctgcatctcttttgccgaaggcgagaaaatggcgaaggaaatacaccaggggctctgtggcgcacaccaggacgtaagagcagttgcctcaaaagtgtttcaacaaggtgtgtactggcccaccgtgctgaaggtctgtgtcgagcaggtcaagaaatgcgaaagctgtcagcgccatggccgaagcccaactgcgccccaataagagctgcagcacatcgcactcaggcatttcgccagataggggttggacatcattgggccgttcccggtggcgcgaaacgggtagaagttcgcaattgtggccgtcgaatacttctcccggtggatcgaggccgaaccactcggcgcgatcacctcggcagtagtatagaagtttgtatggaaaaacattgtatgccgtttcggagtgccgaaagagttcatcactaacaacggcaagcagttcgactctgacaagttcagagagatgtgcgaagggctaaacctggaaatcaggtttgcatcggtcgcgcacctacagtcgaatggggcagccgaacgcacaaatggtaagattctagaagcactaaagaaaaggcttgagggggcagcgaagggcaaatggccggatgaaatgctgtctgttctctgggcccttcggacaacccccaaaaggccaaccaagttcagaccgttcacatcgctcgccgaatgtcgaaaccgcaacagcttgttttgggaagcaaccaaccgaacacccttacattcgattaatatgaaaaaaaaaagtgcttctttcagcacagaacgctacagatcgaaaacggacgccgaaagctgaaaagtcagtagacctatttcgctaatatacgcaaaggggccgacatgctctgacctaacgaaagcgcaaaatgtgacaatgcgaagaatagcgaaaaggaaataaaacacatctttattagtttcaaaaaaataatcgaagaatacaagttttacaacatgatacagcccagcttacaagtaaattacaccttcgcccccacagccaccttcgccccctaaggaatggttgggtgagctgggttcgtcatcactactaatatcgtacatgaccctgagaggggaggggggcaaaacacaggctagactgtatcgacgctgggagatcgcctcctgccgatcggtcttctgatggttccgccaaaagcgaaccatgtcctccaaacgctttgtatgaacatgatcgtagtcctccagggtctgcccagggtgcgcccgcatccagccggcaaccttcacaaccgtatagatgttgccgtttatcatcatatcgcgataaacaggccaaaacgcacatcgcgcctttggcaaacccttaacagccacgaacttcttgttcctgcttcgccaatcaccaagagggggccgaacacacaattttcggtgaacaccctgctaaaataagtgcagaaagggcaaagagcgaagtgcaaagttaggactctgcagggagagagtgggcgaaaagagtaaacactctgcagcatacaaaaataatgcgagaatgatgcaagcatatataccaaaagacatcgaccataataagtggctaaactttgagtcatccattccatatatccaaaaggccgttttcggctacagtaaggagggaaaagggccatcggccaaatgtacattgttcgccttccgtggcaaacacaagaaaagctacaaaaatctaaggagagggcggagggcctcacacctctgggtgatcttgggcatcgcctcgacccactccggccgccgcgtcctccccttcgccctggtcctccgcctccgccttcgctagtttctccagaaggtgcgccttggcggcaaattggccgtccttctgccagaactatctccgccacgcgcgaagcgcgagcgaaacgtcctctgcactgatctcccagtcccctttcacatagttggggaactcggtgacgtgttgtcacgtcctgataaattcattccgaaataaaaatcattccctaaaaggaataatagaattaattaaaattcgaaaagaaattgtcaaacactaaaatacgtgccagaaaaattcaaatgtggtccgaagaatttttgttaaattctccttggtctaaaaggagccctcaaattttacttgaattttcagagcaccgaaaatatttattaaacaacaacaacaattaacaaagtttactaaaaagaaaaactaaaatcctccttcctcctttgggccaagcccagccaaagtctccctctcctcctcctcccggcccacctcttccctccccctcccgacccagctccctcccctcccctctctctcccgggcctgcctctccctcctctcctcctgggccgcctccgggcccaagccgagcggcgccctcccgcccgtgccgcgcatgtgcttgcgctgacggcgcgcccgcatgggtcccatccccgggtcgtcgtcgtcctcccgcccggcctccttcctttctctctcccgtgcaaaccctagtgccaatcctccccaaaatccacgcgattcaaaccgaggtttccaaaattgattagggggttttaatccccattccttcctcttcaattgcccctaattttccccttgaatagcgccttaaatcgccaggaacggacgcgccaaccccggccaccttccatggccgccggccgagttttccgccgccgttccccgctcctcccgtggccggctccttccctttgcctataaaatggaaccccctcgctccgttccctcgttttagccccttcccgagctcccccgtggccgcaccacctctccccgcctcctccttctctttcctcggcgccggctaccctccagccgcctgtgccgcctctcccgtgcggcggctgacgtcgccaccaccttcctcggcctcgcaggtgtcccctctacgccggcctgccctccgtttcgcacggggaccaacggagacgcttcctcgctggtgtacagtggcgttgccgccactgtaccacctccagccgcctgtgtcgctttgccagagcgtcgtcttccatcgtcgctgcctctcccggcacagcagcgccatcctcttccccggccaggccacggcatcgctcgaatttcgccggaacgtcgtcgcccgcgccggtctcgccctccgcctcgccggagttccttcggcagccccttccgccgtgcccgtgcgtcagccggcgctgccgtctcctccctcggcacggtgacgtagccctccacctcatccactcctcggattcgcccggaagccgccgcacatcgccgcgaacctctccatccgcctcgccggaatttccccggtcggcccttcctccacccgtgcaccgtcggccgcaccaccaccacctccggcatcgcagcggcagggtcgccctcgacctcgcctcccctccatctgaaccccgccggtgttcgttatcgtcgtctccgttcgtcctcgtcgacgactcctccggtcggtcgttcctcctcgccggctcgtcgtctcgctgcgccgcctccgtcgtcggattcgcagcggtgtgttccacgccgtcctagtctctgtgcagctgccgccggctgccctcgttgcctcctcgccggtcccggtcgtcgtcctcatcgtcgtggtgttcgtccctccgtcaagccgttctcgtccgtcgtccgcgtccatcaagcgagccgtggcagccccgttgtcgtcttcgtcctcggctccgcgtcatcaagccttgtgccggccgtgtctcgccttcgtccaaggatcgccgccgaagtcgttccctcgccgttcgtctacgccgcgcccgttcgtcgttgtcgttccctcgcctcgtcgcgtggtggtatggatctctcctctcgctgccccgtcctcatcctttcggtgtcgccccgtacccgttgtgcggttgtcgaccccagtacccgtgtaccggtgtcggtagtcgttcgcttgtacgtgtggtgaccctgttagtgtgcccgctcggtagccgcgtggtttcacgtgtgcagcccgcgtggtgtctagtggagtccgtttgttggccactcgcctcggttgacacacggggtccgcttccgtcgacccgtggaccgtctctgtgtactcggtctaccgcggtcctttaggttgacatgtggggtccgcatgtcaacggcgcagccttcctgtcttttccaggctagtgcttgcacatgttttatagttgcaaaacctaattataataatccgcaaatctccatataacagcattaaacttcggatgaccatgtcttggtcatacgagctccgaatcgatccgttcaagtctcctaatgtttgttataacctaaagaaccctgtgctttctttttatgtattgttattgcttctttataggcttgtagctttgcttgtgtgcttcgcgtagtcttcgtcgttccggaggttcccgaagcgtggtttacggtcgtcgccgaaggttcggaaggccgttatctctgagcaaggcaagtcacatcatccttgaacatattgaatcccaatttataaaattattttgatttaaattaatgcattatcgctttatttaaattcccgcgttatcattgttttatttagccatgcctatttatctttgttatgaccttattattattgctattgttattattaccttgttcaccctaggataaacaaaaccccaactagtgggtactctattcatggttccactagtatgaatttaggtagatgcttcgctgattaattaggcaacattaggtggttttataactttagactttgggaattctcatatcatttggacactatggaatggttggcttatgttggaattggacacacacctccccctctattcaaaacccccaaaatggttttaggctgggctcgaggtgcgtggttgggttttgttagtcgtacctcgggtattataaggattaagctcgggcctctgttgtaaagcactaccgtacttccacatgtctagtgggtaaagcttagtttgtggctcagtctggttataaacaaaagtacacggatggagatagatgaagtcgggggtcgatggacatctctaggacaaataaaggctacacgagctgcggcccggtagtcgagatgtcatggcacagggctggtgtcctgctgctaggggctcaatcctgcctgcctgtcctggaggttccggccgtaggtgggttgggtcggtactcttgtttatggctaggatgggttgggaactatgtcacgtcttccgtccgtataccgtggtggtatgtggcacgtggttacacgtgaggaagatgtgtcttgtgggtaaagatgtacacctctgatcagagtataatctattcgaatagccgcgccctcggttatgggcaagcctagcaatgtacccaagttagtgttttaattcttaaaacctgcttaacaactaaaatgtggaatgggtggcctgggttggcttgggacaagctgggacccagggtcgggttgccagctcggtctgaatcatcgtaggccttgggttaaggcaggttcgtgagggttcacggccttgattaataacactgtgtaactctaggatcgtctttataaaatggctttgggcaactaagtgacttttaaatgctgttttctgcaaaacttaacccctatattattaccccttgtacccccttgcattaatcatgcatctgccggtgtggcttgctgagtactgtggttgtactcattcttgctcaatctttcccccccttcagtaagagaagctttggagaagaagtcttaggtggagtcctggcttataccccagttgagcgcctgtgaagatggagccgtaggcccgctagtccgctgctgtttattttttattgtcaggccttaagtgcctttgtaataatgtaaatattatcgatataataaagatgtgtcttttatatcatgtttgtgtggtgtaccccggcttttcctgggacggggattaatacactagcgttcgggaaaatgtatttttctcggtcgcgacacgtgctcgcagccgcactactgcagaaggcccatggtgaaggccactgacactcgcgcacagcaatcgccgtacgcggtggcacaatccgagatcgcaccaccggcttgttgggtccactccgagaagtcgaagacggaggcgtcctcgccaggaactcctcgaacccacgcccccatgtcggagagggcaaggcgaagtgtttggcgcgccgtcttcgcagaagcggtggctttcgccatctcccgcgaaaaccgctgcgactcctccgcagctctcgcctcagctttactgacctccaggcgaagagcctccatcttcagctcggtgagattgtaatagtcagtcagcgccacggaatgggctctttccttttcaagttcgactctgaggcggtcgacctcagttctagactctcttcctttatccacatcggccctaaggcgatcaacctcagctctggcctctcttcccttctccagttctgcctggagtcgcttgttttcggctttcgcctccttgaaggtgttagcgagggcctctatctgcaaacccttgcggcctaacacgtcatccttggcccgaagtcggttcctgaatccatcaagacgggcccacacggttcgcttagtcgaacagtgagccgcaagaatctggatacaaggaaaatcagacgaagggagcaaatgtaaattgagggttctataagaaagaaacaaagaataaacaaaaagagagctaaaaaaaagggggcatacccaaagcgccaagcttttgatagcggaacacccctcgtcgaactcattcagttcggtgaatagactcggggtgctggcaggcgagacaaggttgcttacccactcgacaaagggaatgagctccgcccgggtctcaaaatcgccaggggcaaagtggggcgccacgagagaataatccgaggcagatgtttcgacggccgcccccttccccttcggctagaccagcggcgaaacgaccggctgacacaaggggcttccgaaaaccctagccgcagcttgcacgacgcgatcagcggaggctgaggccacggcagcgccactgccacccgctctgctaacgtcgatcgaaagaacgggggcggtcgaaagatctaagcaatgaccggcgggcgaagtcggggtttcgtcagaagactcgtcgtcgctaaaaacacgaccaacgttgacgagtcctctcttcttggcggcctttttaactggactccccttctccaccttgccagctgaaaacgcgattagcgctctcgccacctccgaatcccttcgatgaaggggggagctattcgactctaccccggtctcattgtgccccggacttggagtgggagtgtagccaggggtttcaacgcggttttcgaccgcgtcgtccgcagcccttccgaccatggcctccgcctcctcttcctcctcgccttcctcctcgtcgtcacgatcttcgacgtcgtcctcgtcgtcggcgtcagaatgagaggaggaaggggcccttcgcttcctaggggccagcttcacttgcccgcgctgtcgtaaacccgatttgcccggccggccgcctgtcgtgtaagcaactggctgtactcgacaaccgacacgtcgccgatcatcctctgggcttcggcgtcggcctgatcggtagccatattaagcgtcgaattaggcaaaatagcgaaagctgtcagaagtgtgtagcgaaaggtgcagtctcaccgttcgtcccctcaggaagaaccagcttcggcaagccatcgacctcttcgctttggtcaaccgcgacctaccacgactgggagaggggaaaaatgcgaagcatgcagaactcctctaccaagtcgcgacagctaaggcgggagtaaactttgcgcagcaagacgaaccgtgcttccatagcaccgtccacggtgatcttgggtttccggttcggcgcaatcgccttgcgccgacaccggagggatttcaccgactcagatccagcctcgaaggggatggtgtgatagaaccacctcaccatccgatggcgatcccacttcgacatggcggcattcaccggccaaagatcggagcgctcggggcaaacattaaagttcacgctaccaaacaccgtcttcttcgttccggccagggtaatcaccgtcttcgaattcacggtggcgaaaaatatggctccaagagctcggcgctgggttcaaacccggatgtccggcatgcccagtcgaagatggcgatccggaccagcgccgacggactcaactgtgggagctccacctagaaaaggcgaaggatctccggcaacaacacgttgcacggaaaccgaagccccgcctcaaagaagacggcgaacaacactgtccgattgtcgacgggcttcggtaccacggccttccccagggcaaaagcctgcccctccaccaatgctccagagctgaccaacttcgccagctcggcatcgtccatgagagagagccccaagaaggcggtggtgtcgtcgtcgattcggccggggtctggccctttcaccgaaacagggtttggcttgcgaggggccatggcgaagggtgtgccggcggtggcgaaggaaagaacggaggaagagagcgtgtgcggtaaaaacagcaagtgtggtggtgaaaaggaaaaagggggggaatatatagcccacgtaggcgacggttcgcctacccaccaataggaaagcaccacgtgtcgcaagggtaggtgaaacggtaaattcctattgaccgagccgcacaataataagcccacgaagggaaagcccattactatttctttcggcccgggaaaaataaaatatatatataattcgaccatccgcaggaggcggaggctgcgaaaacaatatcaaccgaaaagacaacaaattttatttgcaggaataatataggtttcggcaggagcatcggtcgaaagagggcgtcacataccataccacatggtttgcacggtctcggccgaagctcctatctcacccttgcccgtgaggggcttgttggcgatatggcatgaggcccttcgaccaagcctgccgaaactatgcgaccagcgaggattcaagcccaaggcatctagattagtcaaggcgaagccaacatggcgaagactatggaacaacgacggcgagggacagagaatcgcgcggatctcactaagccgaaggcctcttgggcgaatgatgtatggcgaagagtgtacgtcgaagggagacaacttcgccatagcaagttcggcctcacgggggccgatgaggccgaactatcatgccaagcctagtggccgttgggccaacgaccgcctgacggcccattaggagcccataaacttcaattacaatgtatacccatgtaaatgtccctttcataaggacaaccatgtaaaatcccctgtataacctaaaccctagtagtaagaacctgtaatggggctataaatagtcccatagtgtcatgtaatagggggatcagaaaaattctcaatttaatatacttcacttcttttcagccaccattgagtgaccacgtccttcaacgtgtgcggttgtcgtttcgactacaactgtggttcagagtctaacaagggtgggatctgatcacaacccaattctggtggagttggaaaatcaaataaccccttctggtcctaaatctttcaaatttgaaaaagggtggattcagcaagaaggttttaaggcttggataattgacatatggcctgagaggaggaaaaaacatatcctagatcactggaagtgccagagatatatcttgagaaggaaaatgagaggatgggctatgaataagaagaaggagataaacaaggaaaaagaggagctcatcagtcaaatacagaaaatagatgaagaagtggagaagaaagaactgacatgtgaagagtgggggcatagatatgagctggaaggtgctttgaaccagattttcatctctgaagagatttattggcaagggagaagtggggagaaatggatgttagagggagatgccaacgcagccttcttccatggagtagctaatggaaggaaaaggaaaactacaataaggagtttggaaggggaggagggacctattgagaatgctgatgagttgaaagagcacatttatggtttttataagaaactgtttggaatggaattacctcctaaattctgtcttagccataatatgtgggagggaagaggcagactttcttcagaagacaatatagaattaactaaaccattcagtatggaagagattgagggtgctttgagagaaatgaagactaatacggctcctgggccagatgggttctctgttagcttttacaaagaattttggcctcaagtgatgtgaccatggctactatggatacgaccattgctcacatcatgaatcaacaagaagacatcaagatcaagtcctccatgtgctgcaatctgattcggccacgtgctacattgctgacttcaaacggccgccaaatctacatacgtgctccgttttgggcccgtgagtacttaatggaaagctctcgaagtcctccttccaacgaatccagcctcatctcggaattctatcttgtttggccgcaatcacataagcaatgtgctatgtcacctgtattgggccaatgggcttgtaactttgtttgggaccctggcccatgtggggtgcgccccaatctggtggagcacgacccttggaccctcttggtcgtcctcccacctcaataaataggtaggtaccccttcagggtttcttgggttttaattaattgtaagtttagccattgctacttcgcttgcagcgtgcgtgtcggctaaaccgtccgtctgcttgttcggaaccccactttatcgtgtatcaattcatctttgtgcatcttgtctatctagcaattcagttgctttatatcttgttcttgcttgttctcgattgcttgcaggaataaggttgatctgcaccggcaagatcaacaacccacggagaggtgtatcgatcgctaaggcgcaacgcaacgtcttgtacggttgtagtcggatcgtcaacgtttctcccaaatcgtagttatcatcaactcaccgaaagatcgggccaacaacagccttgagtgtctcgagtggagctcagggttcatcaggtggtattagagctttcgttgctcggtgagtttttatctacctattatcagaaaatagccacaaaaaaaaattgcatcctgtacctagccatctttgtgcaattgctttgttctattcagtttttgctttgttgaattttgtgttgcatcgtctcgtcgtgttgctggtcttagcatctagttcgtttagagtttcgagttttggtcacgttttataccacagtcgtcatcgcctccgtgtctctattgtcgtcgggacctacgaaaacggaatcggcttgctgccacggttctatttttgtagttttcagaagtttttatcggtcggttttggtgttgcatcaagggtttgttgtttacccgggcttagtgtttgtggcgtggttctgttttgcccatgaggaagaagaaggggaaaggaatatagaagatctgtttggattcggttgggtggaaggaaaaaaaaggaaagaaaagaataggaaagaaaaagaagattggattaggtggaaatccgtttccttttattttgtgcatcgaatccaaacactagtgctggccgcaatattcagctccacctctccgtgcgaccttcctccctctgagtccgactcctccctctcttctatcggtttaagatccataccgtgtcttcccgcatagcttagtgaaaatttttagagtgtcggattggagatccgtttggaaaaacagaaccagtacaaattcagcattccatttttgtataattctaattttgggtttggacttttgcatttaagtccctgtaattttagtatttacatttgagtccatgtaattttgcattgaagtccttgagtcgtttttgcagaaaaaaataaaaaaaagtgagaaaaggcagaaaggtgcatacaaaagcaaaaaaaaagccgcaccaaaaaaaagaaaaagaaaaagaaaagaaaaaaaagaaagaaacaaagaaagaataaaaaaaaagaaaatcagttgtatttttagaccattttcatgtatcagagttgtgcttgagttgtgctatcttgtcgttcgtttgtgtactaggctcgcgtctctagtacattctagcctaggacaagcacggtacttgactttgaatgatcattcaactttttattctctagattgagcattttctattcctttgctacatatttaagcctacccagagctctacagatttgattacagccgtacagcatgtgtttgccaaggcatcgatacatccaaactccggtggggtgcttggttgagtcggtgtatgtcaccattccacttgctttggtaagaacttgtaagagcttggttaaaagcttgagtgtgtgtgatatttgagctgccactacctagtagttgataagagcgtacatattcttgtgtgtgttcttgtttgctactaaccatggcaggattgtgcaaggggaaacgagatgatcatgctcaacatcgacttcttcaccatcaacgagatatagtgacttcttcacgcatagcatatgaggtacatgataatgatcttgcaaaggtagaatctaatttgccagtttttgatggtaagtatgattccgccgcttatgttaattgggagctagcagtagacaaacaatttgatgagtatgatttctctaatgctcaaatgattaaggctgctagtaataagtgtaccggttctgcatctttttggtggtatactgttggcaataagcttgaaacttgggatgaatgcaaaacaatgatgaggaaaaatattgtgttttcatattataagcgtactctccttgagaaattagaacatataaaacaaggtgataaaaccgtgcgggagtactttcatgactttaaaatttgtatcacttatagtggtttaaaagaaaatgagaacacaatgactagattttttagagggcttaattctgatattcaggctgggcttattaacgtaacatataatcatataagccacttgttcatgcttgcttgcagtgttgagagcaatattttaaagagcccaagggagaaacgagctatgcttgtgcctcctattagtgacattttgcagggagctcagaacattcaccatgaggagaagagcaatatgatcgagatgccatctacatcgctcacgaaggaagaagagaagattgatgcacccacatcattcgaagagagaatcacaagtaatcttaatggtgcagcaataaatcaaggtgggtgtgttgttaatgaattgaatttgtccacttttcatgctatagtagagcaaccattagtggaaccaattgctgagatgcctttgtcacaagttgatttacttgttgttccttgtgataaagaagagttgtgtcataatgtttcacttatatccatgccacaactagtgaatgaacatgttagttctactatttctttgtgtgctgattctaagcatgttgttcacattgctaatgaagtagaggaacgtgaattactatcttctttaaatactttgggctatgttcagtttgatgatttttgtgagctcgataatttgaaggagaaattattagctaaatctgatttgccatgtccaactaatgctatttttcatatctttggcgaatataatgatagaggaatatttttggtgcatagagtttacatttgttcggatttagaacaccttgtagttctggataaaatatgcaagctagagagacatgttaatgctaatcatattatctcgagtttgtcttgttttgattgcaagaaacaggttgttttcagtggaccaagcgaagagcaccatatggaaaaaccgaggacggttttccatgaagaaggggaggatgatgtgaccatggctactatggatacgaccattgctcacatcatgaatcaacaagaagacatcaagatcaagtcctctatgtgctgcaatctgattcggccacgtgctacattgctaacttcaaacggccgccaaatctacatacgtgctccgttttgggcccgtgagtacttgatggaaagctctcgaagtcctccttccaacggatccagcctcatctcggaattctatctcgtttggccgcaatcacagaagcaaggtgctgcgtcacctatattgggccaatgggcttgtaactttgtttgagaccctggcccatgtggggtgcgccccaatctggtggagcacgacccttggaccctcttggtcatcctcccacctctataaatagttaggtaccccttcagggtttcttgggttttgattaattgtaagtttagccattgctacttcgcttgcagcgcgcgtgtcggctagaccgtccgtctgcttgttcggaaccctactttatcgtgtatcaattcatctttgtgcgtcttgtctatctagcaattcagttgctttatatcttgttcttgcttgttctcgattgcttgcaggaataaggttaatctgcaccggcaagatcaacaacccacggagaggtgtatcgatcgctaaggtgcaatgcaacgtcttgtacggttgtagtcggatcatcaacgtttctcccaaatcgtagttatcatcaactcaccgaaagatcgggccaacaacagccttgagtgtctcgagtggagctcagggttcatcatcaagtgagagatcaaattaaagagatgatggatttgttatttgaagggaacttggagttatggaggatcaattacggagtgatcactctgataccaaaggttaaagatgcaaacacaattaaatctttcagaccaatttgtttgttgaatgtttgctttaagttgctgactaaagtgattgctaatagactgtctaaggtggcccaaaagacaattagtgaaagccagacagctttcattcctggaagacaaattttagatggagtggtaattttacatgaggtcctgcacgaggtaaagatcaagaaacagtcgggtatcattgtaaagtttggctttgagaaagcgtacgataaggttcaatggcagttcctatttgatgttctagagagaaagggttttgatgaaaaagtgattgggtggataaaacatgcaacattgaatggtaaagtggcaattaacatcaatggtaatactgaggagtttttcaggacttataaaggggtgagacaaggggaccctctgtcccctctcttgttcaattatgttgctaatgcactatccgaaatgttgaccagagccaaagaggcagatcatattagaggtttagtaccacatttagttgaaggaggattgacatatttgcagtatgcagatgacactactctttttatgtctctgtcagatgaaaatatttgcacggcgaagttcttgctgttttgctttgaagaaatgtcggggttgaagattaattaccaaaagagtgaggtgatcgtactggggggagggcctgaggaaacaaaaaagggtggctgatttgttttactgtaaagtggggtcactcccaatgacatacctaggtattcctattcatgaggggagactgacagtggtggatatggaagtcgtaccaagcaaaattgagaaaaggttgggcacatggaaatgtggacacttatcaaatggacaaaaaaatgttctgatcaactcttgcctcagtagtatccccatgtacatgatgggtttcttcttgctgcctgagtctacacatcataagatgaactctatcagatccaggttcttttgggaaggactggagatgaaaaggaagtaccacatggtcagatgggaggctctctgcagaccaaaggactttgggggcctgggcttctcaaatactagagtgatgaacattgcacttttgagcaaatggattattaagctggagtcgggttgtaatgatgcttgctgcaagttgctaaggaataagtacatgcaggaaggggggttttttcaatcaaatgctaggggagcttcacagttctggaaggggttatacgaaatcaaaaagtggttaagtctaggcagtgcctacgaactgggtaatggtaagtcagtgaggttttgggaagatgtttggttgggagatacacctataaagactcagtaccctaacttatacaacatctgtggagacaaggattggacagtagggcaatgttgttcagatggggagtgggagattcaattaagaagatctttgggccctgatcttttaggggagtggaatgatctccaggacaagtttttgaggagttcatttaacaaacgaaaaggatattatggtctggaatctaacaaaatctaggaagtttacaactaaatctttatacagggaaattttgtttggtggggtaagagatgttttgatgcaagatctctggaaaatccctgcgcctcttaaagtcagaatcttcagttggctagtggttaaaggtagaatccaggtggctgcgcagttgaagaaaatgaattggaaaggggagcatttttgcaaattgtgcgggttgttgaagatgtagatcatttaatgtttacttgtgccccagctaagttcctttggtgttgtgtaagggatgctttactgtggaaggaaattccaacttctagagttgaactattggatattactaagagtgtgagcaacaggagggctatactttgcctctttgcagcttgtttttgggctatttggcttgttcgtaatgattgggttttgaatgataaattgttaaaagacgtgacgcaattacctcataaggtgatgtcgttcttgatgcagtggagaagtttggcgcaacaaaagctgatggggagttggatacggttcaagtattactgcgtgccaacattcactcgttgggggtccaagggatgcggcaagctccaggacaggggtaggcgtggtccaggcttaatctagtttctttttctcttagtgtgatcagatgtaatctctctggcttccctctctcgaactggcttccccagtttattttttttcttttcttgttgtatgaacctcgtatgctttttatgaaaagctgggctgagcgccttcgtctaaaaagaaaaatataagctaggaaatcacataaacagctaagtcacaaactatgggcatgagcagttttcccatcctccttttcatctacatcatatccagggagtttaaaaatatgtccaagcttcaggaagtagagatgtgctaggtgccatggttaaaagcgctatcgatttacaacgttcaagtcaactaagtggtttgttcgtattagctactcccttcgtctcacttactaagacacgattaaacttggaacggtctttaaaactacattttagcttaaaattatatttatatatatatatatataaacgattgtacgatacgccatccacaatgtgatacaaaagtactccataggtattatagggtctgctcactttgatgtcattttcaaccataccattttttttggcaaagttactaaaattttggctatgtttagtttgttgccaaattttagtaagtacatatgaaatcttgccaaaattttgacaatcttactaaaatttggcaatgccaaaacttggtaagattaaaaatggtagcaaagtgaacaagcctataatattctattcagctacctattaccattgtgcaactagtccatatagacaaaataaccaaaagtatccataagcatattgttaatgaccaaatttggtaatatcagcatcggagacgaaggatagatcgaagcggaatcgaagatgaggattatcgcggaagcagagcaagaatcagttggagtccggatcggctacgactaggatcggctaagtttgagtcagactgggttaggtaatacagccgattccgacaatatgactcgtatccaacatcgggtttgagttggtgtgcttcaagatgattgccatatatggatagagtcctgagaaggcaattgtatctattaattaggatattttatgtaaattccttagagataaatatgggcaaaagtccgccgcaaagacttatggtatcttagagtttgttagagataatagtcgtgtccggtatggatatatcttgtaattctcgggtataaatagatctcgaaccctatgtaattattaacacacgttcaatacaatctcggcgcatcgccacccttttactttcattttgtttagacgagctcttgctttcgggttgagctgcatcggtttcgatcttcaacaagaggtaaaacttgttatgacgacttgtgttctcgagattagtgcttccatctttatgatactctaatcttgtttatgtaattcgtcgagttatcatatatttcacataatccttgataatatcatcatctaacctatattcggctagcatctgtcaatagaaggtagccgattaggttaaataacgatgttgacttgaattatgtgatatatctaccactccatgaaacatccaacggcttgattgtctagatattgttcttcttttcatacttaatgctgcatcagttgagtttaacctattaagtcgtgcttagaaccataatatctagcatgccttctggttgccgattagagtagtatcggagtttcagccgatcttacctgatttaactactgtcatcctatgtgcttgatcgatatgttaaatctgccatttatgttaagatattgttgtatttaagtatattaagcttctgtttggtatattctgcttattttaatatcttaatatagagtggtatcggagtactagccgatacatgctagatctatctgatcggctatgctatgaatatatataatctcactattaacatatatttcgatctaagtgatttatactgtctcggcaagatgaccgatctatcccaatcacttgatttaagtatatatcgatataaggattatatatcattaatatctacagctgatcgggtagatttagttttgatttgcttattaacacttgccgatcaatgtacatatgacatcggcctatagataaatgatatgtcatcggcacctagccgatcggctatcatttatggatttaatcacggtttctttgtctttatttcttgttgattgtaggatcaaatcaactgtcacgctcatacatccgaaggcgagttttgaacctgcactggagttaagcagatctcccaagcctcgtgttttctgtcaacacatatgtactacccatatgaaataaataatactatttatcgctatttctctctcatctccaaatgctaccttgtatctatatacattgtggagattgctatagttaaagtctctttatatggattccatttatatagatcactttagctatatacattggtgatgttctaacaaatttttttcttccctggtatggcattgtttcagttgatttgatttcctgtgtcaccggagggtacacgccaaaatatcaaatcgtgtcctatataagagggtagaaatgtcaagccaatcagaatgggtacgtaccctcatcgctcggtctcccatataaccaaatgatgtacaatgcaaccactgcttcgttgaaaacaatcaccaaagttggtataggtgtcacccaactatctagggtacatgtgtgctcgcgtgcagattttccatctcatatatatatatatatatatatatatatatatatatatatatatatacacacacacacactataacgtttgtagcaacataccataatcttatatgaaagtaaaattaaatgataatcaaattacattattatcatcaaataatatttaatttataataatatatttattggtcaaatatttaaacagttaaatcttaaaatgtgtgtgctcgttagtgagtgggacggagagagtattctttagggggttttgtgttatcagctcatgtggtttcttcatatattttactaggacaacctactagttgataacttgatatatagagtaaaacttggttaaaattgatcctacagataaatttttagagagtggcaaattgggcactatgttaagaatattattctcggcttctaggaaatgattcacaatactgaaatagtttggtgctttgagtatttaaatcctttaagtttgtccccgaaatcaccaccgcaaacccagaagaaacaccataggaaatccaaaactgatggcgacaccgagatacgatatttggtaacagagttcaaccgaatcctacatcacctggcactgattatggatgttgttaacgcttttttaggtcaacacaatatcacctaacgatttgcgatgcaatcaatagagtcgccaaaatcgatagatcaaaatcggctagcagagccgatttcaaggttaattcactttcgcggaatcaagcgactaatttacaagcaaattggcaaagaagataaatatcgtacttacatgacgacgaacgactagtttccgagcaaactaacaaaggataacattctcgctttcgtggagaagcacgaccgtttttcagcgtaaaacggtaaagattaaccaaatgacttggccatgaaaacaaaatagaaaagaacagaaagtaaagaataggaaacgttagattgataaatggtagattgaaattgttcgggcctctcgccaacgtcggagctgtaaatttatactggcaccacacccggcaccataggtctcccttcatgttcggtggatccatccttccttcctatccgagtcgataccgtaggcatgtaatcaggctgatgatgatcttctataatgtaacatcctaaaaatccctaataacaaaaatcactaaaatttcaaactttttaaaacttttgcaccatgctggtgttattcgtttctctgttgcaaaacgggttgttttaattgatgaatatggaaagacaaatgataaaaactagaatatgggaaaactaaggttagaatctataatgttgggaataaaagaaatctaggttagttgtgataatattaattcttaatttttgggattcaataaatcatgaaattggaagtgttaaaatatagataaatatctgaaagaaataagaagattaaaccatctaaaaattattcacacaaaaagtctagaaaaagccctaattgtgatttttctcgggtcgctactgttcattgcgcgccagttgttcgatccgcgcctaacccgaccgaacacccgacgcagccctctccaatcactgccatgccgcgcgtgtgccttccgacccgtgcgccgcactagtcatgcccgtgcgccgcaccgcgtcgcgccacgccgcgtgggcccgccgccgaccgagccgccaaaaacccgcgccaaagctgcgctgccacgagtgcccgcgtcatcccgtcccctcgcacatcgccttcgggattgagtgataacggccgccacaacgaccccgcgtcaccctagggcatagccctgcgtcttccctatcgaggccgatatcactgtccgtcgccgtcgctcttgtcgccgtcgcgtcgccatcctgtcgcccacaactgagaccgctggatattagggtgctccttccctagctaatgatccctctcctggaaccctatcatctaggcaatcatgccggcacagtgcattgaactaaacctaggagagatcgaaacgtggctgagtcatcgattgaccttatccagtaggaatcgccctcccctcgcttgtataaactcgtccctagctcgttcttatcctaacccaaccttccattagctctttcccttcctaaaactcttgctcctccgaaaaggagcaaaaccgcgccgcccgccgggtgtcgaacacctggtgagcgggggttgcgccgccgccgcagggcctctcggccgatgtgggtggcggggtgtggagaggaggtgctcgcactgctgttaccgccattggagggagccgggagccgttggacgaagagggccgggcgtcgaacaccttcaagcctcgccgaccgccgtctgcccctatttcggccgcaccgcgccgcacgccgtcgaactccgccgttccaccactccgtggtaagccctcgcgcccgtagtattgcctggacacctagaagctatcggccccctcgatttggggtgtgagccgccgtagccgtgccgcctccgaccgccaccgcgccatggccgagctcaccgtggagggacctcgttccaatgcaacctaggctaggtttttgcttctatatgctccatgtggacccgagatggttaaatcgtcgtcggttgcgctcgtattggtccccattgtgccgccgccgattttgagatctcggcgccgccacacgccgtcgcgtcgcgccgagcattcgccgcgtttcgccgtcgccgccggcgagcattcggtggtgccccgccgctcgccccaccatgcgccgagccgtcccggctcgggccgtcgcaccgccgcgcgccactcctctgtccagccgcgtgcgcgaggaagaagacgacgggagagagaaagaacgagagagggagagattatgacatgtggaccccacttcattagtgcacagtaatccccaaactaatggtattattatgagtctatgacatgtgggcccggatgcttagaaatttaattaaatgaggttttaagtaaatgtatcaatgacatgtgggtcccaccggtgattaaagggctggcttgacctcagtcaacaaagggttcggccccacctgtcagtgacacatcgcatttcctttaggaaaataaaaccgagaaatggaaataggagaacggcccacatgtcagcctctgtggtttatggatttgtgttaggaataaaaataaatgaattaggaacagtaacttttcacaatttctcgaattaattcaaatttgaatctttaaaccctcataactcactcattttaactcggatttgaatgaaacttgaacctaaattcatctaaaatcaagatctatctaatggtaccattttctcaatttaatttgtactgtttgaatttttggtgatttaatttgaattctaattgaattcaaatcaaatccttcgcacgtaaatatagattccgagggagtagctgagttgactgaggagcagggacagcaagactgtgatccaggtaagtcatcactaatctttgagcatgttgaacccattgtgaacttattttggatttaaaataaagttgcatgttatatggatatatgtgaatgccctactttgttatatgccatgcctttgatattgatgatccatgcaatccttgtaatccatgatatcgtatgtctttactcaatatttggtaaatgcttagccatgctactttatgcatattcatatttatcaaaatgctttatgcttgggcaactacctttgggaaggtggttgagatgcggcatgtggagacatgagcgccatattgccatgacatttgtgacaggatttgtgaaaggaaaaataaaactaaacaactgttttcgactggggcggctgggtgacttgggtggagtccgataaaggctagtgccgtccctagtcaattaaggaccgagccatgaagttaagcatgaaacgaccccaatagaaccgtacttctcgtatgggtatagacctagcggagtaaatagccgagcggaggcagtatccctgcatagtggttttcttgatgtgtgtgaggcagggcctacggtggggcagccattggtaggaccgcgagggacgggtgcctacagtggtgtcgccatcggtaggactgccatgtgtaaacctaaacttaactataacttaatgcatgtgtgagtctttccttcccgggagcgccagaactcctctcactgctagaaaccgtgtacgcctagagtgcatgaggactcaagttcatggagcgggtactgccaaagtgaggtggttgaaaggctttgccgtggcaattctcattcgttgggacgtagggtcatgtgttgggcaagtcacggagtacgggtaaagtgtacatccactgcagtgtgagtaaatcaatctattcgaatagccgtgctcgcggttattgagcaccgggacatgtattacacttggctagactcaaatttcctaaatatgaaagggatgggatctgcatgatgattttgagctggtggatcaacttctcgagaggcgagaaggggtaaaccccagaaaacaatgacgaccagtaacgggaagccatctttgggaagacaatggatggtgaacagaaccgttgctgtgtaataaccactggaattaaaacttgactagtttatgctaaatcttaggcttgtgaaaaaaattgtgaaactagctttacgcaaataaaccaaaggccacaccttgaatacctctatcatacgcattgttgttgtggtagcttgctgagtacggttggtactcactcttgctattacaaatttaatcagtggatggcaatgaagtcgaggaggatccctatgcttatcttcaggaggatgcggaggatgacggcgccccgtagatgttagttacggtcgttgcctgtggcaatggcaaggccgctgcttaaattccgctgccttatctatttctgcttttgcatgtattccagaccgttcgggcctatgttctggtctatgcatgcgggcctatgatgtaataattcgcgctagacaatctttgtatgtgcacttgatatttcagcaatgtaatcgtgagtaccagactatttgatccagggaaatggtactattaacacgagtgattcctgttataaaaacgggggtttacatataatcttcaccacgtaccagtccacctgattcaccgttgtggctatccaaaactcctaatcatccggctgcacctgcatgatctgtatacatatatgcatatctccaaaataggtaaaattctacagccacccaacaaactgcacacacatttgaccaactctcaagcaagccattcaatgaatcgtgaagctaaactaaacaatctggcatgcctaaatgaattaactactagccaaattatggcataaacacatgccccctgttttcggtataactaatgcgtataacttttattttaccgaaaacactataaaattaaccaacccaaaccacaattattctctcagaacgatacaccacacacggtatcggttctgagcccatccacatccacagttgtcctctcaaaacgatactcagataagtaatcgttttaagaccacccacagtcgtcctctcaaaacgatactcaaataaataatcgtcctgagataatcaagctccccttcctaacttggcgaccaacaactaaacttgttaccccaagcatcaatggacaaaatcatttgccatactaaattatctatttgaaacgatttttcccttattatcttcatataagcctcaacccaatcatgacctacacactttgaaagcaacacatctatagttcggtgatataactgattatctacacactttaaaatccatcgctgaacttcctatctcaccagtctttcaaataatcaaccaaagaatttttcagatcatttggtataaatttaactggtaattcggttgtccctaatgtccacctaaccgaattagctcatctctgggcagttcttcgacataaaacattttaaaacaaacccatcttaactttgatatattttaaaaacaactcatcctatagctcggcaatataattcatcatccaacaaaatatatctcaaaacctatcgccgaacttttctatatatgatttaacctaggcttttcaaataattaaccaaatattcactccaatcacctagtcactactgattcgtgtaacgacccgcctctcccaggccgggcccgcttacatctggcagctttcataggtcatagagtgccctcacagaccaacacaagtcttttctgcacactttgtcctcactcgtgtgcaccgggaagaattttccggtcggtcacccattccaaattgctccaggccaagcacgcttaaccctggagttctttggagatcggcttccggaaaagaagctacaacttgttaatatgagtattctattaatcctattaagccctaggccgggatgtcacatcctcaccccctcaagagagatcgacgtccccgtcgatcaaccccaggccaggaacgtcccctcttgggcacgtttgtgtgcccagtgccagcacatgtgccatgctgtgtgaccactccggatccacaccagccatgcgcaccatgcttgctcaactgcgacacacgcgcccgtgaaaccgcgagagtcggctctgataccattttgtaacgacccgcctctcccaggccgggcctaattacatctggcagctttcataggtcatagactgccctcacataccaacacaagtcttttct

SEQ ID NO: 6165 - DNA, 16537 bp, Oryza sativa
ccagcatgctcagcattgttgtggtaatgacacgtcgcatgatggggctcgcctgggtggttcccatccaacctaaggcttcttttggttgagttgggaacccatccctccggtacagaaaacgaagcagtccattagcacatgattaattaattatttgctaattttttttaaaaaatggatcaatataatttttttaagcaactttcgtatataaactttttgcaaaaaacacaccatttagcagtttgaaaagcgtgcgcgcaaaaaatgagatgggggagttgggaactccaggaaacgaacagagcctaaatgaagtgcacctagactactgctgctactgttataagactttttagcattatccatatctatttatttatctatctattatatactaaaagtccattaaacttgctataaacgctcctaaaccgccacgtagcaatctaaaatcgctctcaaactatcacatagcattaatatctatctcttgatttttagttaatatggtgggtccaatattctaaaccgttagatttgattgagatgtaaaacatagagcccaaacggccaccacttccagccgcaggcacgcctgcacgtactcctacgggtccggcgccgccttcccagttcaggcttccctattccgatccgtgtttccacggcatcaataatccggttgtagccttttttttttttatcttcttcttctctccattgcgagccagcaaagtgcaagggcatagggcagaatcagagcatagacaatggaggaatggtctccatccaagaccataacaaaacagaaaaagaaaaccggagatttcattctgcattgttctaatctcctaacgatttttgtttgtcgctttatcctgagataattttgtttgccgcttcacatagggacgcgaaccaaagctgctgaaagcaatatgttttaggcctgaaaccaacctacacttggatcaaacaacggtgtttattgagtttaatctattttgatctgattttttttcttcgtttaactttagccccaggagagagacaggtaacgagatattaacatgaatagcgaaaataaaggacacgcaaaactaaaaagggattggtaaaatagtatgattcttaattttctcctaaatcgaaacaaacaccccatgtccataatgtggacatactaattaccttacatctatcctatgccatgctattataagtttcttcatatattattaaatatataagccacgctaaggtaactaaggtaataatacatacttggtttaaaagttatatatatttgttagttaaattcaaatttttagactcatgttaactaggtttttctatgataagaatatattatagaagcgagatatatgatatgtgtatcttctttgtctttatttaggccatgtttagttcctaaaacaaaaaatttcacgttgtcacatcgaattaatgtttggacatatgcatggagtattaaatgttggaaaaaaataaaaccaattacacagattgcgtgtaaatcgtgagacaaatcttttaagcctaattacgttatgatttaacaatgtggtgctacagtaaatattttctaatgacggattaattaggcttaataaattcctctagcagttttctgacggaatctataatttgttttgttattagactacgtttaatacttcaaatgtgtgtccgtatatccgatgtgacaaccaaaaccaaaaattttctccagctaaacaaggccttattcatagtaagtatgaaacaaattgtatcaatctgaaccaattagaaggaagaggctatccccatggtacaaacaaaaatattgtcaggattacggataaggtataccctctacccttggatgtatgctatacggcaatacggtatatcggtgcatatacggacgttctctaaacatgctaaggaaatccatcacgaagtctaccaatggaaaggttccgacccatataggactgggtcgttactatatcgtgtagggtgcgatgtctccgagtcctacttggagaccgcctgacctgcgatataaaagggaccccccaagggacctaaggcatcgaatttcagagcctacacaacgaccacagcctacaaagtcggagactacaggagccaagtcgccgggtgatctagtcgaatcaactcgactacgatctcgtcggtaccgccgagtcctactattccctttgtaatctgtggttctttccatataatcccatatcaactggattagggctattacctgctaaggggcctgaaccagtataatctttgtctcttgtttccttgatgccgtactacgtagatcctcgtaccagcgtaccccaataccctttatatctggtctacgggtacccaccgtcgacagtggcgcgctaggtagggggccttggtgcttaaggttctactactattacatcaagcttcgtcgacaacggcgtcaacaccggccccatcctaggagtccctacttcaacaatgctggtgtggactcaagtcggcgaaatcgtctttccggtttacaccacggtaccaatctcgacagattcatcaatgaccagaaacgagaacgtcgtggctataaacccggacgatcctgtgtcaaaggatcctcccgccgtggcggagaacggaacatcgatgccatatgagcccgagaaggttcctagttcggccaaatcttgtccttccgacaagaactgcgagccgacaaggacatcttccgaagtgacaaagtcctggtgtcctattcacaaatccaggaagcacaacttgcaagcttgctgggtttttctcaatgtacaagctgaaattcctgcttgcaaatagcgtggaatccagcgtacttctccaactcgtgatatctattgtcctattcacaagacgaagaatcacgacttctcaagctgcaaggtctttctccgcaccatgaaaacgacgcttcctaaggtccaacagtcaggaacctccctcaaggacacagacaaggaacaagaagcgacgttgacctcagatcgattcgttggagtaatcgacatcgatccccatgagccatcggtccttcacctactcgaagactatggctcgtcatcttccagtacaccgcgcgacgtgtttgccatcggtgggactaacacatctgcacaggctaacgcagaggcggagaaccagacggtcacgccgacccaacatctcggcaccgtcaacgcaatactgagagaagctccctacgaccccgtgcttaacaatgatctcgcacgttggacagaacgactacgggaatcggtagccaatctcagtaatgcgttcgaggaagctgctaccagagcacaaccagaacgaccaacagctgaaggtgccgacggcgaaccaccgaagcagcggacgtcgccgagatgagctacccctcaacctcgcggcaccggcgatctccatgaccatctgaatggccgccgagaagcaggacgcgccgagacaacgagaatcgttcccgacatcgtgtttcttcatgacgtcacgagaacgaagagcgaggaggccgctcgaacgaggaccaacaccgccatgatcgtcacaactgccgcgaccgcgatgatcagcgaacaccagacgatgctggtcgagggcgtcagcatgacggtgacgataacgggggtcagcgccaggacaacaatggtggacgacaacagaactctcgagaacctgaacgtcgcccgcggaatcgcacaccggagccgagtgaaccatcgtcatcatcgtcatcatcttcatcttcgtcatccgatagacacccacggaggacacacgatcgccgacaacccaccgccctagcgctgggtgtagagctttcaaccgttctctacgtgatgtccgatggcccgagagattccgacccggagcaatagagaagtacgatgggagtattgaccctgaagaatcctccaggtctactccacggtactatacgctgctggggtagacgacaacatgttagcaaactatttgccaacggtgttgaaaggttctgcgcgttcatggctaatgcacctcccaccttactcgatctcttcatgggcagatttgtggcaacaattcgtcgctaacttctagggaacttacaagcgccacgcgatcgaagacgatttacacgcgttaacatagaatccgggtgaatctttgagggactatgttcggcgctttaatgactgcagaaatacgatccccgatatcaccgatgcctctatgatttgcgctttcaaaaccggtgtcagagatcgctatactacccaggagttggcaacaaggcgaatcacaactactcgaaggttgttcaaggttgtcgatcgatgcgcccatgcagacgacgcgctgagacgcaagaacgacaaaccaaaggcgggaggagagaagaagccagccaaggacgcacccgaatcaagaaagaagaaaagcggcaagagtgggaagaggaaagctcaagcagaagtcctcgcatctgaatacaagcgcccgcccaaacacccagacccacaaggtagtgatacgaagagaatatgttgccccatacacaagtcggacagacattctctagaggagtgcctcatcttcaacaagtcgttggaaaagtagctggctttggagaagggcaagcaagtacgtgtagtcgagaaggccactgaggcaaccactcaggattcggacttcacatacccagattccgatcttcatgtctcgcacatcttcagaggctccatagtgtactcttcaaagcgagaatacaaaaaagtggaacgtgaggtttgttcgacatggcagggggctgcacccaagatgaagtggtctgaacagaagatcgagttctcagatgaggaccaccgcaaggctgctattatatcaggacgatatccgatcgtggtcgaacccactattcggaatatcaaggtagcactagtcctcgtcgatggcggcagctccatcaatctcctcttcgccagcaccttggacgcaatgggaattccgcgaagcgagttgacacctaccgatcaacccttccacggaatcactcctcagtcctcgtccaagccattgggcaagatcacgcttcctgtgaccttcggccaagcaagcaacttccgaacaaagcagataacttttcatgttgctgagtttgacacagcatacaacgccatcatcggaagaactgcactcgtgaagttcatggccgcatctcactacgcgtatgaggtactcaagatgcccgggccaaagggaacaatcactattcaagggaacgcaaagctggcggtccaatgcgacaagcagagcctcgacatggtcgagcacatgcccagcccacccgccacaaccgagccacccaagaaagtgatcaaaacgactaagacgccgaaaccagacggcgcaatcaaaatcgttccactctccagtgccaaccccgacaagacagtcaagatcggggcatcactgaacgagaaataggaactcgcgctcatcaccttcctccgcgacaatgcggacgtattcgcttggcagccgtccgacatgccgggggtccccagggaggtgattgagcacaaactcatggtgtgacccgatgccaagccagtaaagcaaaaactgtagagatttgcaccagatcggaaacaggccatacgagaagagctcgataaacttgtcaaagctggtttcatcagagaggtactccatccagagtggctagccaacctagtcatggtgcggaaggccaatgagaagtggaggatgtgtgtcgacttcaccgacctcaacaaggcgtgccccaaggatcacttccctctcccttgaatagaccaactagtggactcaacagctggttgcgagctgttcagcttccttgacgcttactccggctaccaccaaatcagcatggcaaaagaggacgaggagaagacagcattcatcacaccgtttggtgtattctgctatgttaaaatgccgtttggactcataaccgcaggaaatacttttcagcgtacggtccaaggggcacttagcgatcagctgggtaacaatgttgagacctacgtcgatgacatcattgtcaagaccaagacaagtgactcattgattgacgatctatgggaaaccttcgacaacctcagacgatatcgcctcatgctcaaccttgagaagtgcacgttcggggtaccgtcgggcaaactgcttgggttcctcgtctctggcagaggaatagaagcaaatcccgagaagatcaaggcaatcgagaatatgaagtcacccacaagactcaaggaagtacagaggctaaccggatgcatggtggcgctaagtgggttcgtcactaggatgggagaatgaggacagcccttctttgcactgctaaaaaagcaagacaaatttgtatggacacaggaagccgaagaggcgttcatcgcactcaagcgctacttgtcaaatccccctgtacttgttgctccccaacttaatgaagtgttgttcctctatatcgccgccatgccctactctgtgagtactgtcattattttcgaaagagaaaaggtgcagagaccagtctattacgtcagcgaagctctacacgacgcatagacaagataccaacagatccaaaaactgctctacgccgtaatcatgacgtcaagaaagctacgccactacttccaagcccaaagggtcacaattgtctccgccttccctcttggcaaagtcgtgagaaacaaagacgttgtcgaccgcattgcgaaatgggtagtcgagctaagccagtttgacgtccactttgtaccaccaacagccatcaagtcccaagttctcgccgattttgtagccgattggactatgcctgaaaacgggttagacagcaagacagacaacgaaacatggacaatggctttcgatggcgcgctcaacagccaaggagcaggtgcggggttcatcttgacatcaccttcgggagatcagttcaagcatgcaattcaccttaacttcagggcgaccaacaacacagccgagtatgaaggactactcgctgggataagagctgcagctgcacttggagtatgaaggggattctgaactagtcataaaccaggtgcacaaagattacaaatgctctagccctgagttgtcgaagtacctcacagaagtcaggaagctggaaaaagatttgataggatcgaggtccgacacgtatacgtaaggacaacatcgagccggacgatctagcacggcgtgcgtccagacgagagccactcgaacccggcacctttctggacatcctgacaaaaccatcagtgaaagaggcaaatgacgaagatagctcagtcacccccgacatcagctcgggggctacagaggtagagcgcgccgttgccgacatcaagaccacggacgactggcggaccctactcattaaattcataagcagcgacgagttgctcgaggatgacgcagaagccgagaaaataacccgtcaagcaaaaatctaccgtatgatcggcaacgatctatacaagaaagcgccaaacggggtacttctaaaatgcgtctcgtccgacgatggcaaacaccttctccacgacatacacgaagcggtctgcgggtcacatgccgccggtcgtacattggtcggaaaagcctttcgacaaggatttttctggccaaccgccctcaaagacgcttgcgacatggtacaatggtgtgaggcttgtcaatttcatagcaaacatacaaagctactagcgcaagcactacaaaccatccctctcacttggccgttcttgtgctgggggctcgacatactcggtccattcccacgacgacagggcggctacaaattcttgttcgtggtgatcgacaaattcaccaaatggatcgaggcaacacccacgggggaaatcaaggccgataacgccatcaaattcattagggggatattttgccgatatggattgcctcaccgcatcataacggataacggctcccaattcatcagcgctgatttccaagattactgcatcggactgggagtcaagatatgctttgccttggtttctcaccctcagagtaacggacaggtcgagagggcaaacagtatagtactacaagggatcaagacccgtgtctatgacaggctcatgtcacatgacaagaagtgggtcgaggaactcccctcggtacaatgggccgtgcgcactacaccgacaacgtccaacaaggagacacctttcttcctcgtgtacggctcagaggccatgctacctaccgagttacgacatcagagtacacgagtacagaagtactccgacgaggatcaggacgaacagcgaaacgacgacgtgaacctactagaggaacatcgagaacgggttgccgtcagagcagctagctaccaacaggcccttcgccgataccacgagaagcgcatccgagcatgcatactttcgatcggtgactacgtcctctgacgagttcaaagccaagcagggcgaaacaaactctcgcccaaatgggaaggaccatacacgatcacacaggtcttgcggccaggcgcgttcaagattgcagacggtgatggtcgcgagttagcaaattcttggatcattgaccaattgcgtaaattctatgtataagtcaatagtgtccacacttgtaagacatcaaagtgttccttcctgatgatcccttacccagacgacacctagcgttgaaacctatcctcatgtccctttacgccgtcttgacaaggcctccgaggaacctaagggaacttcggctggggacgcccagagctgataaggccttgtcgaatccttcagagacgaaagaccgtgtaagatctggtcatgtaagagttctcgccgtgcgtattaaccaagccgtgtaatcggaaatggatttttccaacttcacggctgggggctagggtcagtgcttattcaactaaggcaagtcgaaggtccaagagctttatcttccgagatgagttctccgatgacaaggctgggggctagggagagtgtataactcaagtgactgatcgaagtcgcgaagtgagaagacactcgtacacaccgcatccagagtaagaaagcttagttacatagatttcctttctacttcacaagtatttcctacagaccgaaaagatatccaaaatacattacatttttcttaagatgtttgtcacagatatacaagcactaccaggaaggccaacgccaatccattgactgaaagattttctccgccaacggagccatcgacttcgccaggttgtctatctccgcgggattcctccgagaacgggaaaacccttcgtggaggaactctaggtgcaactgcggacgatgatctcgtatacatgccaacacgtgccctccagcgtatcggctcaatcgacgacacttctgctttagggcctcatcgatacgcctgccgatgccttcaagctgagcaccagccccgtttagccacgagatgtagccagccgctgactcctcgggatccccacgaggtactcggagctccctgcagacaacggccatggttgtgcaacagctcctgaggtacgagttgaaccatacctcgcgacctcggagcgcctccatggcccggtccttcttcacttccaatatagtcctctcaagttcggcgacctcgaactttgtcctccagtactgaatgcgacggtcgcgatcagcaatcgcattttcgaggtctgctcgacatgcaaacactgaagtcaagctaatcaagacagaagagtcaaaggaaatggaaacgacaagaaccaacctaaaggagtcgtcgccacgtccgtctcctcgggcagatcctggtctacgccgtcctgcggcacatacggctcaagctcaagtgctggaacgactaccggcaattcaggctgcccgcgctgctggatatcctcgacatcgacatctctacaaacaacaaactaattacccggaatcaaaacgccaaagaaaactaaggtgatgattgcacacacaaaggcagtcggaaccaacgaaaagttttaaaaaacgcgattggttaaggggtacagacaagcggtggccctactcttcaaaaagtgggaggacagactcccctagttcgccgacttcttccatcacatctttgcgcgcgtcgctagccgccccctgatccaagatcttctggagattgagttcagggtgtgccaacctcacacacgcaaggacgtggcacgccccggtgtagatcccgttggacgtctcctctctgatcctggccgcgtgcttagaggggatcgcctccatcgccgttgccagttccgtgagcgaagtcgtcagcgagaactcatcgggattctccgggatggtggtcgtgacaccgcactccccggagagctggtgcagactagtgtaggtgacccacagcgagccacggatctccgacaagtcattctcgagctccgacatacggtgctcgagcccctgcagttgtcgctcgttgccggccaccagttctctcatcttctagaggacctcgcgaacctccgccaaatcacgcgtcagccgatcggcacgctcatttgccgacgatgccgccgccgccctcgcctccgcaatctcgtgactaatgccgtgagtgccagcctcgatgatgtgccccatctcgacctggagttcctcccaggtgaggacggcagccggcgggcctcgaccagctgtgggattgctggccgggccgctgggcgtcacctcgcggctccaaggcacgaccacgacctcggacgaggccactgcaggagacgcactggagtttgctgtagacccatcttgcgctgccttcgctcgtgccgccctacgaaagacggccatgtcggtcatcgtaacaagacgacaaaatccaaccaagtcgagaacctcaaatttcgtccacttacttctcgccgagtgtcagtagcctctgccatcgtggaggtgggggagacgcatccgagacctaagtaaaccgagtacgacatgagggcgacattctccaactacgtaaatcaataacctagaaagcttaccgatggagtgggcgtcttccggcggttgccgagcacggaggaaaacttcctccccttcttcggaaccttgctgccgctggtcgtggcagcagcaatgacaatggccgtgtcggacgcctcccgggcaacgccctccttcaacgaggccgccgtctggtggtccacgagcggcccgatggcgtcagtcaggaggagagcctgcacaacatgaagtcatgatgcgatctaagaattgaaaggtaaaggaccatcgactacactcacgttgatcgcggcttcacgctcagccgcctccctctcacaaagaggggtggggacgttgctcgccgtcgtgggactgctaatcatcacctgggcaacacggtgctccacggttgtgctgctcagacctgcagatcgagaaccaagtttcgacaagtcaggaggaatgcgcataaaagcagagaaacccaaaatacaagaaaaataccccgaggagaaacccgggtcgtgtcctccagtccaaagtagtcaaaggctagatgggctcgagccttgagcggctggatccgtctaccaatgaagtcggctgcgacttcataccccgacagccctcgtattcagaggtcatcaatgatatcaatgaaagattggagggatggggtcaaggtgggtttggcggtccaagacggaatcttgtctggttgctcctcaggaacaatgaagactggatcctaatcttctatatgaagatagaaccacctcccccgccatttaatacgagatgaggggcactggagagggatgtatcacgacttcaggccatcccgaagtcggaaaccgacgcacccggatacctttttaggttccatccagcgcaactcgtagtaaaagcggaacaggtcaagaaacggctctaccccaatgtaggcctcacagagatgagaaaaaatgctaaggaaggctatggagttggggttcagatgaagcagagaaagaccgtagaagttcaagacaagaaggaaaaactcggaaggcggaggaagaaaaccacagagaatgtagtcctcaaccgcaaccatgcggcccaggatgggttcaggttcagtacctcccggttccctctccatggtcccgtgaccggggagagcgccctcctcctgcaatttctccaaggacgcattgctggaggtggacttgtcgaggtccattccctgagaagaagctgaggcgggcgaacatagggtttgtgtggaagcggagaaggcgaagagcgtttggaggcaagatagttctcacaacagccggacaccaaattggattcccaaaactcccataaataggcgtactaccgacggtgtgaattccaaggaaaggagagaaatggccgccggaaatttctaggtccgttgcacgacgcggtttcttggacttcaatttaaattcactcataaccgttcgacttcgcatggtgttgtcgatcactctttgtctctacggtcctcacaccgagatcgaccaatcgagaacgacaacaactccgacattagaagtcacgattggttacacgagttcatttaagttgatgtcgggggctcctgtcagggttatggataaggtataccctctacccttggatgtatgctatacggcaatacggtatatcgttgcatatacggacgttctctgaacatgctaaggaaatccatcacgaagtttaccaatggaaaggttcctacccgtatagggctgggtcgttactatatgtgcagggtccgatgtctccgagtcctacttggagaccgcctgacctgcgatataaaaggaaccctctggagggacctaaggcatcgaatctaagagcctacaaaatgaccacagcctacgaagtcggagactatagaagccaagtcgccaggtgatctagtcgaatcaactcgactacgatctcgtcggtaccgccgagtcctactattccctttgtaatctgtggttctttccatataatcccatatcaactggattagggctattacctgctaaggggcctgaaccagtataatctttgtctcttgtttccttcatgccgtactacgtagatcctcgtaccagcgtacccaataccctctatatccggtctacgggtacccaccgtcgacaaatacatttattagcaatcatagttttcataatttattaaaaaatagggactctaaacattcaattaaatctggaaaacaccatatgtttaatttatacttaatttataagacatcttttatacaaactaagtcaaactcctctcaagataatgaaaaaaaatataaatcttatagtaataaattaaatatatatagtttaaagctaataaatagtttggaaaatttcaaataatgccgatgatgaaaatttgaagagaaataatacatttgaagcgtagaggccagatcattcggttgatatttcatcttataaatttctcaaacacatcctacaatatatacatgcccgcgcgaatgcgcgtgctactttcctagtccatatagatgtcaatgaatctaggcacatatatatatgtctagattcattaacatatatatgaatatgggtaatgctagaaagtcttataatatgaaatggaggaagtacttctggatgatggctgctcttagttccctaaattttctgctattattgcacagctccatgaggtaagaggcagctcatcaacatcttgacacttttttctagtataaatactcaaatgtgaagtttggtggggacaggctagtgagccttttgaccaacctgccaaagcataaaaaactggcgaagcaacatgaagcgaagcaaaccgtggcgaagttcagcaaagcagagtggcattaagcaagccgacaacgaggtagctattgcctaaagccaaagcactctaggtggccaaggggaacgactctagtgtgcctgattggaacaaggctaccgttggtatttcttaacgacattactagaaatttaattcccagcaatggcgctgaaatactcttagtatattgtggttacagagttcatccgcaagcgcacagatatacaattgtagcatttcacccgagagtattccaagggaatcgtatttatttaatcccgtggaaagattatagtagagagaaccgtactaatagtttatatgttacttgtaataatcatagtctaagcaggggttagtataatccaaagggtaggatgacacacaagcataatccaaagggtaggatgacacacaagctaaatggaaagaaaatagaaaagaatctattcctatacttctagtatacatattatacatacattctagttatatgattaactagctaataccctctatctgatgccctcctggtacttcgagaagccacccctgactaccgagttccttatgatagcccgtcatgaccatacaaccggggcaaaatacggaggagtaccctccccatgaaattaacccgtactgaactgtcaccatcagtggcccacctctcatctgcagcatataaccccaaataatgatatctcgaaatctagacaccacgcctaaactaccagatactactctaatatcatcatcatgacatggagtaattgcataaacaaactttatacccgtaactatgcatctcccagataagctagcagtataatcagtataacatgaacataaagtaagttggcattccctctgagactgcgccaacgactgcaacacctgtaagctttctttatcttctttaagcaaattagttaatatcattattaattagcagttagcccatacatatcagattaattatcatgctccaagtctgtatacaacgattaattatatatcatctttatgaaatgaattaattcacggatgcatatatatgctgcaggttgtatggcgtgatggtggccgtgcatccctgtcggccagatcgcagaaatcgtcgacagaggctcatcatgtaatttattaacctcatcgactcaaattctcttatcattaatatgattttactgtgcagatcgatgctgtttgaaattcccccaattttcataatttctcaaatagatcctgtacgttttgcacagcgtgcgcgttgaacgcggtgctgtactgcctggtgttccacgtgtcggcggggatgtgccagtgggtgtactcgtgcgcctaccgcgctcgcctccgggcggcgtacgacctgccggagacgccctgctccgactgcctcgtcaccttctgctgccagacttgctccatcgcacagatgcaccgtgagctcaagaaccgcggccacgaccctaaccttggtacgagtatattatattctctctctatcacctctcaaactcaactttacattgtatttcctacttccagtagctcaatcgtacatccatcttattacataagtttaatgatataatcatacatccatttcatataagtcaaaaaaaagtttcttcaacatatagtttttagcttaaaagtgtaagggtgacttatgactttaaaaaaatcaaacagaaaaaaatatctggtttaggtttagatttttgtgatcacagactgatttataagtctaaacaagagggtctaataagatatatattccgatcttccaatcttaaaaaaattagtaacttgtaactcattaattcactcaatgtgtttaattaatttgtactaattaatgtggggtgatgaaggatgggaggtgaactcgcggaggacgatgatgactcctccccaacaccaagcgatggaaggaatgacaactccctcataacaactactcatcatcacctctcgatcgaccaaacaatacatacacacgatatatagctattacaagcatgtacaccctttgatttataaagtggcaatacatatatagatgtgtgacgcttattttattttataaacatatttttttttctgttttccaggttaagttgtctctgctattttaaagacacagccgccctcctccctccttaccgcgcgcaccccgtattactctagagtctagatcctatcctgctgctacaattaatgcttgtacataatactagaaattcaaaaaactatgtattaatggcttgttggaaaacgtaaataaaaacataaggagttccacatcccacaagcattgggctgcactatacctggccaactgggccgtgccaagccgggccggcccgagcacagcagtactgtagccggcccaggcccggcacggcacgccagcctgtgggccgtgccggcacggcccattatcccgtgccgtgtttgggccaatgcctcagcccgtgggctggcacggcacggcacgtttactgtagcgtgccggcacggcacggcccaggcat

SEQ ID NO: 6166 - DNA, 12510 bp, Oryza sativa
cataaatttaatcgaagttgactggcaggctaaaggcccagcaatgtctccaatattcttctctcgaggcgtcagatatttcattatgtttgtttgatgacttgaattattcacttcatctctcaaatataatggaaggtccggagaggctacggcatttaattgtaagaaatataacggtgtgagcgaataataattgtttgggtacctaaaagttgcttttttgagatttattatgataaattaaaaatattatctcaactacttaaaaataaggagtaaaggggagataagacgaggtgaggagaggggtggtgggacagttggcagaaaggcattgtgtatatttctaatgatagaaaggcattgcatatatttctaacggcatatcattgtcatttagatttagaaatagagactgcctatctaacatttgatagaaaatcagcctaaaattctggcaaatgtaattatcgtataatagcagtgtaattacattcgtaattcgtatgtaactccagtacaagaaagatgtaattattattgtaaaatagaaaaatttacaaagcttggtagtgaacacatgctctagcgttttgcacgtcgatcgccggttcgatccttggtatccatgcgccatttgattttttctctcttccacgcatgcatcttaaagcatatctaatggtggaaaatttgcatgtttttccccatgattttctttcaaaagataaatatcagttccataaaagtttgagaatttttaatgatcgtctttaatttagtggtcttggggccaacgtgtaatatttgtcttttactctgaaatatagttcaatgcgcctgaaatcgtttgagtaaagaaatacattagaatggttcaaatcgatcacaaattggttatatacaatttaaaagccataatcacttaaaatactgtttatttatttttaaaaggtccaactcgaaagtataaaccacaaatgcatgcgaagtgcatgggtgcaaccggtgtatagtccgctctcagccttcacgttagaaaaagagaagtgagaatttaattaagtttctatataaaataggccattaaatatcttaaccaccaataaaaaggaaaaaaaagaaataggggcctacaggaggtggcaggtacgtgtgcgtggagagagctttgggcctttggcaggagagggacctgtaaattaatctaatttaacggtgtaaaattatgggtccaccagtttaaatgaaaattaatggctagatcttttgcttttttctcggaatttctaggactttctctaatttattagaacgccaagtggcgacgtgagagcgttttgaggaagtttaatgggcttttaagtatgtaatagatcgttgaccaataccaaagcaaacaaccaatgttagacgtgtagtagctgtatccatagtctaccacaattttaagatcaaagccgtgcctcctagtataacctggatttatattattgaaaggcaagattaagattattgtttgtttaaaaatgttgtcaaatagattaagggcaaactaaagttgtgataatggtattttataataatttagggttctatttttcttaaggtatctcaaaaaaccattcataaacttttgattaggagatggattaagtactttaccacttttgaatcatgtttttttctcgagtaaataagaaactattgctagttaattatcatgcaatccatccatatatatgtccacaaatgaaaaatgcgagagcaagatatttagaattcttgtgaattaaatcgtcttataaaggcgcatgatatagtaagaaagggagggaagtgtatgcttggaaaaaaaagaagaagggggaaaatcaaaaaggaaggggaagtgtatgtacccacgtacgtaggtgcgcacatatgccgtgggaggagaggtgggatctcatagtatttagtttgttctaagatcaaattaatctaacggtttataatattggacgtaccgatttaagtgaaaatcaagcaatatatactttgctttgtttttcatagaatttctaatatttgctctaatttattagagtaccacgtgacagctcgagagcattttaagaaattttaaaggtagaatattaaccgcgtaatatatatttatggggcatatggtaatatttgttccagcttcatcgatgtttatatacatatagagagaaattaattatatggctagcaagctattagatgtctaattagtagcaattaattttgacatctatttacagttgttcgtagtagctcttacatattcatcttatgactttgagtatccgttgatccccaatttactgttcaccatgactcgtatgaaaaaaaatatgtactacttagggtttaggacaactgaaaatgatgaattatctaatttatgtgatagctatttgagggtataaatgaatgaattgacttctaaaagttaaaatgttgttggtaaaaaacaccatttagaaacttggaacgcgtgcaaacgaaaatccaaactatggaatcaggaaataaagagggtcttaaactcccttgtcttagaagagttctattgctattcgttaatattgtgctcacatttataacataataatttctttcacctgtacgaacaaatagtacaaaatccaaatacgacataacacaatacactataattattttgtaatcaactcttggttcagcttaaacggagctaagtgttccaaaaacataacccacgatgcttaattcttctctcgctgcatcacacctttaaatttcttttcatgctattaacaaaatttattatctccatatatgatttggcatgtagcaaagtggtagcgctgcggcggtcgtgatcaccttatgcctcatacacgatgctttgtcacacgtgcaaaaggaaaatgtgctgacgtgcattgtgcagcgggccaaagagggaactttggacgctttatttattatcaaataatagattcgatgatttaaataatgggtccaccggttttagtttaagtgtaaattagttgatatatattttaaattgttaatttaatgggtacacaatataatgttgtagacttttttttgaaacagtgcattatttgagaatgatagtccactgtaataaaaaatagatccgatgatttaaataatgggttcatcggtttaagtgcatgtataaattagttaatatagattttaaattgtttatttgataggtacacaatataattgtgtatactttattttaaaatagtgaattatttgaaaataatagtatgagtacgacggtttattctaattgaagttatcttactccctccggtttcattctaattgaagttttgaacaataatacggtctacaaaatatatctttgatcttatttttctattataatatatacgataaataaatatatgtttacttttatcatagttttaagacaaatctatatatgttgttctagttcctttaaactaaatatttttaaagtcattgatagtcaaagttataaaagtttgacctcgaccttgttcaaaaggtcaattattatagaaccgaatggagtatattattaatttaatgggtaccatataatggtgtcaattttattttcaataactgtagagctaatttagttacatgtgagttgtatgatggtagattctttgttagtaaaattatgattacataaaaaatatatatccattatataaatggaaaaagaagaaaaaaagaaaaataagaagggaaggaatgtacgtacgtatacctatacatgcgtgggagaagaggagaggtgggatcccatagtatttggtttgtttattcttggaatttttatgattttttctaatttattaaagcgtcgcgtagcggcttaagagcgtttgtaggaaatttaatggacttttagtatagctacacatgcccaggagaagaggagaggtgggacccttagtatttagtttgttttttcttagaatttgcaggattttctctaatttattagagtgtcacgttgcagcttgagagcgtttgtagaaagtttaatatgaacatttagtattaataataatagatagatagatagatagatatattttattttttttaaattgtagtaaatcccgtcgattttctttccaacgatggtagtacgtacatatgtttctttggctttattttcttttatacgaatatggtcttttttttttcttgcggcacagtaggtaagctttattttttttcctttgaatcgtacctagtacagacagttatatatttgttgtgtgggaggaaggtattattttttttaataacagatctaatctaatggtcaaaaatatactgcaccaatttaaataaaaatcaatggtgggattagatagtgccatgtgtcaatctaggagcgtttataggaatcccacatggtctttttttttcttgcggcacagtaggtaagctttatttttttcctttgaatcgtacgtagtacagacagttatatatttgctgcgtgggaggaaggtattatttttttaataacagatctaatctaatggtaaaaaatatagggcaccaatttaaatgaaaatcaatggtgagattagatagtgccatgtggcaatctaggagcgtttgtaggaattccacatggcgacttaagagcgtttgtaggaagtttaatggacttttagtatataatagatagattaccaaagcataaaagattctcagccactcgttgaatgaccaattatgaattaccaaaatcatatgttctacacatatggattctatttaatactagcctgggtactttggctcaagcataaatgcaaaatattctaatagggccaatattgcaaaaacaacatctcttgataataataacgcaaagctagcccattggccattcacaaaagccggattactaagaagcacaactttcatggtgcaaggattataaaatcgatatcttaatggtgatacataaaaacatacatgttttggcttttaataaatatcaaacactcatgagccaaatcatacttcaaatgaatcgcttctttcatccggaatgtaggtatcatcatacctatgccagcactcggctgtcacgtgaccccatttcaagcaaacctaagagatggggcgatcattgccaccctgggttgatttccgctgttgccgcgtccacgcccagcggtggcaggagcgccattaccgcgcggagtacttccgccacgacaaccgctacatttgccgatgccacatgcacttgccgaataggtcacctggtctcaaaattaagaagttgagaacaaacttctgacattgtgaccgtctcattgcgtgccacaatagcagatacaacaggttcaaaatcctcatttagcccatccagaatgtaagcaagtaggtcttcttcatctaagggtttcctggaggtagcaatttcatccctgagagctttcatcttgccatagtattgagaaacactcatgttacctttttgtgcattgatgagtataagccggatgttgagcgactgtgcttcggtttgggtagtgaacatggcgcaaatttgctgccatgcttgcgccgccgttgatgcaatagccacctgggtgagtacataccttgatagggtggagagcaggaaccctaatacctgttggtcggaggcgaaccactcttgaaaggcgggttgacgatcttctctgtcctgccgtcggtggtgcgctcgatctccatggatgggacagtgatggtgccggagatgtgcccatccaagcacgacccgcgtatggctgccaaaacttgctctgaccacaactcatagtttcctttgtccagtttctcttaaacttgaacgctgaagagaggattggtgagggtagcactcaacgaggaacttgccatcaccaggcttgttgattttgccggactttacagctctgatactgttgacgaaaaaaatcgaacacaccggcctgagagatctgcttagctcctgtgcaggtccaaagattggtgagatgcgggcatgtcagtcagtttaatcctataactgacaagatatgcaaataatagacaaaacagccaatcggctgacaagccgatggagcagttccagccgatagccgataatagctaaatgcgataccagccgacagcgatagggttttgagcaatcggctatacgtccaatgtagattctaacattttagtaaataatgatatatagtcaatcggctactgataatgaaatataacagtaatatagtccagtataaaccaatcggctagcattgatatgatagaataagcactgatttaaaggttaaagcatacatcggctggaagtccgatgtcatgaaatccacaagattagattaaacagtgaaacctttgttatcatcggcaaaatccaacttatatgtatatgcaatccttatgagctgatgcaacgtccagataactcaccggctaaaaccccgatgaaaccctcattagcaatcaagaagcaggctagagattatggttcgaagcacgacttagtagatcaagcttaactgttgcagcactaagtatgaaaagaaacataatatctagaaaatcaagccgttgattgagtttttggggtggtagatgtctaagctaatctaatctagcaacgcgatttagccgataccaacagaaaccctaaaacgagaagcagccgatagagctaaattgatatgctaagactagattaacagagacatatgataaatagttaggcaaatatatcatccaaaccagagcaatccaagaggtcgaatgtactgatgcagccttaccccctagccggagatcgaacaccgatgcagccccacgtcaggtgccaagtcccgtcggacgataaaataaagtagaaaaggtaaaaggtggcgatgcgccgaattgtattgatcgtgaagatagtttacaatgaccccgggtgtacatatttatacccatgggtagatactagtccttgtaggacaagaaagaaacttttctaaagataaaaggaaaacataaagtccttacaggacactaaacacactttcctaaagataaaaaggaaactaacaaactatttctaattaatagataacttgccatgccgcactctctttgaactcggtctcttctggataagcttcctttagtagatcaatttccttaaccgaatatagcaagaatccgacaactgacaacttgataaatctcatcggctaatctcaggacttcgaagcctatgctgactctaagctgatgattacttcgggcttaccaaatttcactgttaacagatgccatataagaactcagatgcgagtggaggaagcgtcaaggtggacacgttacgtgttaatcagcttgtgccgaatcgtgctattgttacatatgtatatgcatctggatagagttggtttggaggtcgagtcggccagtcagaccgcaggctggccggtctgattgacagcacctgcccagtctgaccggttctcacctgtcagcagcacctgttcatcacatgcaaatccaatcatctccaaaaccacttcgccaataatctccaaatattaaaaccaataattttagatgccaattgtttatcacaaaataagaatcaaacacactttgattttacattgattacatgtgataagagtcctacctttctatctatccaaaccaactaaaatccatgcatatctgttacatatgataatatctaacagcaacttcgtcaatctcaattatgatatgtcgaccaaatattcgaagatgcttatagaggtagagtatgcgtgtgcgtatttataggagtgaatatgggtgcgtttgtaagaacgcctacatttgtactgagtttcagaaaaaaaaatagcacagtttttttatggtgctactttgaaaataattggtccaaagttccaaacctaaaatcatgaaaagcaagaaaaagaagacatgcgtgtagatggagaaaatatcgtgcaaaatcatatttatttctcagaaaccggttaattaaaccgttatggagggggcacatggaaaacagatcgaggtgattttaagaattattatataagaatgtgcaaggcatactggtaagcaaatatacgtcgctattgtctattggacacgttgaactcacgatgaaatgtcatgtaggtttcatagagatctcacatttgcattaactgtgagaagcctcggtcatagccggtgatgtctcgtgcaagtgacaccaaaatggtgtgatagatagggatcaaaatggtgtgacagcaaaatggccgcatcaaagctgaagagaggcatgtggcacagtgaacagaccgatgtgattattgtaaatcaccatctccttctggatgaatgtcaatgccatctgtacattgaccatgaaaaagagcacctgtgatgcacagacagggcataagacgctgtttagatgggactttaaagtcgctatcatatcggatgtttggacactaattataaatattaaacgtagattattattaaaacccatccataatctggactaattcgcgagacgaatctattgagcctaattaatccatgattagcctatgtgatgctacagtaaacattctctaattatggattaattaggcttaaaaaatttatctcgcgaattagctttcatttatgtaattagttttataagtagtctatatttaatactctaaattagtgtctaaatacagagactaaagttaagtccctagatccaaacaccaagagcagcagcagcatcttgtgttcctccatctggtacacaatgcacagcctccatgggcccactactacataaatcgttttcccaaacggccaaaagtgattttgcatctggacgggtggtctgcctacatgcaaaggcctagaaaaagaatataattttgcatgtgaaaatccgattttcgtaggcggacgccgcatgcaaaaataatttggagaaaaaaattccaaaactaaaaaccctagatccacgatacagaaaccctaatacgttgctgccgtcacaccggatccactgccatcgtcatgttgggatccgccgtcgtggtcgtcgatcgaggccaccactgatgtggtcgaagtcacctgggcccagtggtccaacaacggtggatctgcaccgtgctcgaagtcgcccgaggcccggcggcgcacagatcctgtgtgcccgaggccttgcggtggtggatttgcacacccgaggcacgtcaactgtggatcctgccctccgctgccacccggcgtcatcgtcggtcgtcgcagtatatgacatctgctcgctcctgccgcctccgccttagccgttggagtgggagggggagaggaaaggagaagagggagtatgaaaggaagagatgagaaggagaggagtaggagtggataagaagagtgtgagaggaaaggacaaaatgatgcaggaattgttgcgtggggcccacttgctctcccctttgttcggatgcaaaaatcatgtggtttcttaagaaagcccagctgaaaaaataagtatatttctgtacgcggacctctcagggggctacattttcacatgggaagtggcccgtgaaccttccctcggaaaacgatttttgcagacgcgaccaattacagtccacctgcaacctttatgggtcctcgtatataaaaaatgtttctgtagtagtggcctgtatgtgttgctactaattcctttgttgtccgagggtgtcgcggtagaaaggcagccttatcatagaacctggaaaattaatatataaatcatgcaaatgtagaaatacaagtgaactattaaatattttcaggttgctaatgttcaaacaaagtatttcctaggtacaatcaacttacgtggatggtgattacttacccctttacttgttgagtacatttagattgatctataatggtagtattttaccactattatcactcataaaagtggtcttggctgttgttttatatattgtagtactagtaggaaaaaaatattttagagtaaagtgcatggctggtccataaacttgcacgactatatcatctaggttcccaaactcttaaaatatatatttagatcccaaaacttgtaaggtgtgtcattccggtccaaaatggcacaaccccttcaagatcctacgtggcgctaatgtggcatgccacttaagcgccaccaacacagtatcatcactaactctacactgacaaatagagccttggcgtccaaatgaagaagaagaagaagagaaggaaatgaaaatgaaaaaaatggagaaaaaagaaaatttctgaacgggccctacttgtcagtcggtgtaggattggtgaatatgccacgtcaacgttcatgtggtatgtcatattggcatcatgtagcatctcggatgggctgttgtactttgggactgaaatgatacattttgataaattttaggacctaaatatgcatttgacagtttaacgacccatataatacggtcgtacaagtttagagaccatccgtgcatttttactcaatattttactaccaatagttggtgtggtagtataaatagatatcatccattggattagaaaaaaaaaactatgtagctagattggatcttctaccagtagagagttttaattgaagaacacctcttgtttttggactattgcatctcatgttggagtaaaagtactctattttaagtaatcacataacttatacttgcagaaggcccttgcaaaacaaacatctcacaactaagaaaacattttaaaaaaaattgtatgcagtaactgaattatttcatcataactcaagtacctgaatttattggtatgatggatcttataacttgcttctgatagtaatgatagctcatggagggttgagctataatcaagtaactttggatggcgatttcttactaacggaataattacttgagaaacactttttataggactttcttcatgtttcttgaaccagtacaccattctaccacccacgaacacagtgaaaccaacagtcataacaattatcgggattgtgaatctgacaccctaaccaatattgtcctacacccaaacaagaacagttgctgacggcaattatccagtagtagtaccagttgaagaattaatgagcactccttatcccactttagtggtcagcaacatcaaactgattggcccctagggctgaagagcagagcttgatcgatgcctctagttccatctgagacaagatagtgcccaaggtagacggtaacatgatgaacactgctatggtaggacaaatgcaaatgcaatgaaagtagagaactattagaatgagcatcaccaatataactaacagatatattagaagtcacatgcgagacatgaccaggattagaggattatattaaccggttgatatttttcttgttacacttacaataataaaaattaagagaaaaactattattatctgctatcttccccaagatctgatagcaaataattctccaataaacaacgtgaaataacaacggctcatccaattaaacacaattcttgccatgtcaagatatgtaaatgaaccgtctataaaatttttcacaccttgataactgattgcatatttagctttacaatccttattacatatccagctttacaatcctttggaagtccatgataaaccccaatataacatgctgccacatttaccatagcatctcccgatgttccagccgtaaattgatactcaaccattttaattaaactcatctgatatcctttcttaatcaacctaatgattgtgtcatatctcctactagtataactaatgtgcccacaaactagagtgcatcttatcacaatcgagaccaccgtttgtgaaaataaatattcagactgaattagtggtaatttcactatgttgatacatgtatgatcttcagaccaaccggtgaaattatcggtgtcttaataggagaagggaatatcctcaaccttaaaaaggattagatctatttcgatgttaactacatctagtttttcatcttagaaacttctgtgtagttcaacaatatcattggttacacattgggataaagaagatatctatcttcatggatgcatatgattttacaaataaattatctaataagatctctatctgtaaggacatgttttcactcattacagtaattgtctaaaacatgtgttacggtcaacaaatagagactattttcacgccgctcaacaaaaaagctggtaacattagttgtctttatttttaccttatccgcccgcttaacattgagcctagatatgattttataatgatagaaagcaagactcgttattttttttcttaatgctttatggttaatttgatgtggaaaa

SEQ ID NO: 6167 - DNA, 10839 bp, Oryza sativa
cgacctcgtcgtcgtcgttgtcgtcgctctcgtcttcaaaaatacgactatcctccccctgaacctgtgacagtgtacctgtaatattggctctagtacctgggctagcctcatcaaaagaaacttcgcaagtctcaacaattttgttagtctccaaaataagtacacgatagccacgagtatgtgcggggtaaccaagaaacaatccatcggtagaacgtgcctcaaacttatccaaatttccagatttcaagacaaagcacttgcaaccaaaaacacgcaaatgtgaaactttgggttgatgtccaaatcgaagttcataagaaatttttccaagttttgatatcaagaaaacccgatttgaaatataacaagcaatgttaatcgcctcagctcaaaattttctaggagttttatattcatccaacatcgttctagccatctcaaccaaaacacagtttttcctttcaacaacaccgttttgttgaggaacacgaggagaagaaaattcatgttcaagacctctttcattgcaaaattgttcaaaagaagcatttttaaactcacgaccattatcacttcgaattattttcaaagaaccaggaaattcaagctccaatcgaagaaacaaaccacgaaagtgttgaaaagcttcgtctttagtttccataatgaaaacccaagaatatcgagaaaaatcgtcaacaataaccaacacataccacttttctccaacagattgcactctagctggaccaacagtgtccatatgtaatagctgtcccggtgcatccgttatcacagaaacaataggagcatgtgaagtagaaaccatcttagcatgacgacacggtgtacaaaccaaatcaagatctttcttacgtttaggcaaaccatgaacaagatccaaaccacttaacctagtgagatgatgaaaaccaacatgtccaagtctacgatgccaaaacatcacatctttatcaaacttagcaaccaaacatgttttcacaggtgaaacaggattttcaaaatcagctttaaacactcttccatagcgagaaatattcaacacagaatcaccacaagaatcaaaaactttacttccagttttctcaaagtgaaccacaaaattttcatcgacaatttgtgaaactgaaagcaaattgtactttaagtcctcaaccaaagctatattcttcaattcaaatttttcatttaccttaaccaaacctatagcgagaacggcacttgtagcagcatcaccaaagataatcgattcagtcttagatgccttctttagggaggagaaccaatttttatcactggtcatgtgtcgcgaacaaccggaatccacgatccacacgttctccttccttgccaccaaagcctacacacaagcagaagtcgaagcctcagtactggggttagatgataataaaaatttaggaatccagtactgagacacacgaccagaagatccaataggcatatatacacgtgcaaaatcaattttagaatttacaaaaaaattcctccgaggccggtctgaccgagggtgtgcagccggtctgaccgggggccggtttgaccgaggcatcaccgccggtctgaccggtggtcggtctgaccgaggctgttcagccggtcagaccggtcgctggtccgaccgcgggacccactgcggtctgaccagtttcctcgaggaaaaaccagatttttgccactttgattttgcaaaagcaatctctctctccattttctgtttatgagctaatctgaaacaaaaaccaacaatatgtccatctttgccacaaaaagaacaagtatatttttcacgatgattagacacattggtagcactagtagatttagcaacatgagcaacaataggagattttgcatgcacaacattggattttgaagaagatgcattcatagtagacatgataccagcagatttaaacacagttttgttagtataaggtttaaccaaaatctcaccacttctagcaccaacacctaacacaacaggaggatgtctagaattatgaacataaggattaaaacctaaacctcggttatgtgtgctaacctttgattgatccaaaatcatgttgagattctttttaccatcagaaaatcctagcaaagaatttttcaaataagaaacctccttttccaaattagcacaattttcacaatctatcataacacttttgcttttacgacatttagggcaagaaagcacttcattgtttttcacgacgtcttccataaactcaacacgacctaaagcatcttttagtttcatcttgttcaaattacatgttgagcaatccaaaacatcatgaggttgttttaactttttagcagaaatcatgttaaacatcaaactagcatgaaaagcaatttgatatttttgcaacaactttttagttaaaaacaactcatccaaagtgcgtgtgtgcaaagcaaaactaaaagcaagagaagatctatttttcaaatcatgtgcagcattaacatctctaatttttgaaatatcattcattaaaacctcgcaatttgaacaatgatcatcattaggaataagagattttaatctatcaatttcagatttaagagattcaatgataaattcctgttttctatacatcttctcacacttcttattttttgcactcaaaatattaatagcttcctcaaaagcactcacctcactatcttcatactctgtgtcagattcaccacgcgccatgaagcaaacataggagatgttctttcccttgtcatcatctccactttcaccatctacatcacttagtggctcgaaggcggcgcaaacttgttgaaaagccttcctgagattgtccagcttcctcccttgggatgaacacttcgacttgttgttgggcttgtagttgttggtcttctcaccatctttgtcttctcttttgcctctcccaagcttaggacaatgcgaacgaagatgatcaattgaaccacattcaaagcaacgatttggaccacctcttttcctgttcctggcattattcatagctcgagcaattctgttagcaactaatgccaaatcctcctcctcgatttgttcgagttgatcatcggatgtggcattaaaaacagcaagaaaagaagacttagatgaagaagcatcaacatccaaagaggaaaccaaagcactcgacttagaatcaacttttcgagaaagaacattcatctcatgtgttttcaattttgtataaagtgaatccaaagtcaaagtagacatgttaatagattcctgaatagatgtaactttcatctcccaaatagacatgccaacaccattgaaaaagtggcgagaaatctcagattgtagataattagcatcataagaagaatcaacagatctaagatcactcaaaattttattaaaccgagaaagatagtcatccaaagcttctccaggtttcatctcaaatttaatatactcctttttgaaaagatcacgacgaagttctttaatattatttgttccttgaagaaaattactcaaagcagtccaaatctcatgagcagtttgaagatgagcaacacgatcataatccgaacgagaaataccactcaaaagaatattgcgagctttgcagttttgttcaaaaccgttttttttagcagcagtattaatagcttaaggaatcacataaggatgagaatcttttctccaaatatcataatcttcagccataatataagattgcatcctactacaccaatgagaaaaatccgttccatcgaaaacatgaggcttagttgaaaacctagcgggagtagccatggcaaaaactctagatcgataaaaatccaaagaataaaacaagactctgataccacttgtaggatcgaatcacaagaactaagccaaccagaggggggtgaatggttggtatacccaaaaaccgaaaacttttagcggaaataaatgttaccctcgaattctacggagatcggtctgaccgaagttgtcatgccggtctgaccggtatagatcaatcggtctgaccgccgaagctacttgtcgcgcctgtcgccgccgccagtctgaccgccgtgcttccgtcggtctgatcgccgcttgccgccggtctgaccgccagtagatcgccggttagaccgccaaaaccgggtaaacacaaattgaataactcttaaagtagatgacgactttattgattttctttgtgtttacaaagtgcaccaacagcactccttacaaaaattttgactaaactcgaaaccctaactcaaaactcaactcaattgctctctaaagcgataccgggaagcctcacgctccccctctatttatacccgaggtaggcagcctaaagccacaaaccaaactcatactaggagttctaaacaccttaggaaaccctctagtacaagaaagaaactttacataaccaatcgtaccaaatttggactccttccaaattcgactctgcatcccacacgcacacaataactccatcgtatgccatatggaatctccatcaaccacgtgcatcaactctagcctaagtatcccgcatgatctccgaccaccacggacgtcgccttatccccaagccgactcccggtccatctccgcaaatactctcccgagacatcgagtcacctacacatggaacaaacaaagaaaccatattccgagactaagctatctccaacttgactcattagtagcaaacaacaatattacatacgtatagtatccatctagaagtcataatcatgaaataatcacggatatgcaaacaaacaacccgaaaccgaaaccaacacagtatcggacggtcagaccgtgggctagccggtctgaccgcgcgcattccgctggtccgaccggctaccagatctcggtctgaccggtcacatgaaataacaaatcctgcgatcacctgtgaaatccaatcatctccaaaaccacttcgtgaataaattccaaataacaaaaccaataatctccgatgcccaattgttcatcacagaataatcatcaaaaacacatttgattttacaattaaggctagaaatctatctatctattactccctcaatctacatatagtttttttagattattcctaaatgatctacatatttgtgtttattcattaagtctattcgttatttgtgcattggagtaaatggacattaatgtatgcatccatgcacacaaatatttataacccacatgcgatatcttgatttgctattggctaggaaatagtgggtatggtgcatgcatcgactttgttgctagagtaaatatagtatgagagttattagtttttcttagtcttggtgtacctatgaaatatgtatatcaatttggaatggagggagtatatactaaaagtccattaaacttcctacaaacgctctcaagcctggcacttctacaaatgctcctagaccgccacataccaatgtctaatctcaccgtcgattttcacttaaatcggtggatccaaataatttagactattagattagattagatgtattttatttaaaggaaacgaataccatactgttgggcggaaaaagaacggaaaacataagtactccgtaaataagtacgtacgactaaaaaacaatcaagcttacataatgttgatagaagaaaaaagacctacgcacagacttgcttaaaaaaaatagagccaaaaacaacgcaagtacttagtaccattgaagaaatataaaaaacaacaaagccaaaaaaaaatatacatacgtaataccattaaaaaaacgatgatctttagatataattttctattatttaaatataaaatataacactatataaatttaagcaaatattaccgttggtttttcacttttccaattttagcatgaactaaacacacccgaaaaagacataccagaatcttagcaagttgattgaaaggcacggcaagtgggactgcctagacatccgtttacttctgcagtaacatgcagttttacgggcaccaacacatacataatttgttcaagaaaaaagcatacataatcatacgcactgcagtaacatgtagtacattttcttattgcaataccacactattaacacataggatgaggcacactatgacagcaacacactatatatactgtacatgcagtaacatgtagtacttctttaggcagtcggcacgacggcggcagcggcggtggcgacgtcgacggggtgtaccgtgcgagccctcttccctgcctcccaccactgggcggcggccttccagccagcgcagcaaacaagagtaactgcagcgagaagtacgacgatgaccacaatgaaacctgaaaaattcattatttagtaattccaaaagaaaaaaaatatatgaagaactaggacttgaacctatgacctcctagctgaggaaaacaaattttctcgtggctaatgatttagtacagatgatcttcttggaactttgatcgtttaagactcatcgccattattacgggtttttattctaaatactaaggataaatataaagaagagataaaatccaaccaatctaaaaaaatagatactccatccgtttcatattacaagtactagtaaattttttttaagttcgactaaatttgtagaaaaacataggccttgtttagttggggaaatttttaggtttggttatcacattggatatacggacacccatttgaagtattaaacgtagtctaataataaaacaaattacagattctactaggaaactgcgagacgatttattaatcctaattaatccatcattagcaaatgtttactatagcaccacattgtcaaatcatgaagcaatttggcttaaaagattcgtctcacaatttacacgtaatatgtgtaattggatttttttttcctacatttaatactctatgcatgtgtccaaacgttcagtgtgaccacgtgaaaatttttgttctgggaactaaacagggccatactagtattttcaacacaaactaacatgaaaatatattcaatgttagatttaatgatataatttcatattttagatgttgttaaaatttttataattttgatcaaacttaacgattcaaacgtcttatgatataaaacggagggagtactaacattacaaacatgctccagctcaccaccgataatcgtcatcagtagtaagtactaacaaacattcaaaagaatcaggggcggatctagagtgtaacaagcggggcccttggcccccactcaattttgcagcgagcgggggcaaatgcccccttgacactttttacttcctgttaacggccaaatctggtaaggtgtgaactaggttcaatactaggatcgaggcggattcgatgaagagatcgattcgaagaacagagtatacatcggctgcgaaggtatcggctggagtgtacatcggctgggacggatcagacagagggtagccgatacagccgatagaggtaatgcagccgatgatgatgaagacggtttcaaggctgtttctagaatcgatcaaagtacttcacagggattgccatggtggagataaagctctcttatgtaatttccttagagatatgtttgggcaaaagtctgccgcaaagacttatggtatcttagagtttgttagagataagtatcgtgtccggcaaggacatatcttgtatctcgggtataaatatgacccgaagccatgtaatcaaataacacacgttcaatacaatctcggcgcgtcgccacccttttactttcgttttgtttcgacgagttcttactttcggattgagctgcatcggttttgatcttcaactagagataaaacttgttatggcggcttgcgttctcgggattagtgcttccatctttatgatactctaatattgtttatgtaattcgtcaagttatcatatattatatataatctttgacaatatcgttgtctaaccttaaatcgactaacatctattgttagaaggtagccgattaggttaaatatcgatgttgacttagattatatagggtatctaccatcctatgaaacaaccaacggcttgattgtctagatattgttatcctcttcacacttatagctgcatcagttgagtttgaccttataagtcgtgattagaatcttaatctctagtctgcttttgattgctgattagggcagtatcggggttttagccgatcttatctgatttaactaatttatatcttatatgcttgattggcatgttaaatccgccctttatgttaagatcttgttgtgtttaggtatattaacctttttgtttgatatatcctacttgctttaatatcttaatatagagtggtattggagtaattagccgatacatgctagatctatctgatcggctatgctataaatgtctataatctcattgttaatatatatttcgatctaagtgatttatactatctcggcatggcgaccgatctatcccaatcacttgatttaagtatatatcgatgtaaggattatatattgttaatatctacaaccgatcgaatagatttagttctttcttgattattcatgactgtcgatcgattgaaatatgacatcggctcaaagataaatgatacgtcatcggcgacctaccgatcggctatcgtttatggatttaactgctatcttcttgtctttatttcttgttgatagcaggatcaaatcaactggcatgctcacgaacctaaaagtaagatttttggacctgcactgaagctaagcagatcttccagggctcgtgtttttcgcatcaacacttccttagtctacctaagcggtagatccttatcccccacttatgctattttctgcatccgccattgaaaagaatcagtcgacgggtagacacggcacattattttacaccattagattagatatattttattttaaaaaaactaataccttattaatctatgtacgtatacaggtgattaaataactgttggctaaaaaatacaaaaaagatacataattagtccataagaaggtacgaccaatagaaagaaatgaagcttatctactgtccagcggaagaaaaaaaatatgagcacggacttactataaaaacaatacaaccaaaaaagtacatatcattagaaaatgatcgacggtattttgaaatagtattttatactatttaaagataaacatattactctacaactttacgtaaatatactttgttaaactagatttatattataaatacgagatatccaatcaattatctttaaatgttctattttaacttacgaggctaatatatataataactaatgctatgattattttttatttcgcatcatattttagggtgtcaaatatcacttacgaatatacaacactaatttaaatctaaatatgtaaaaatggaaacaaagcaatttagttgttttattttacaccattatattagatttattatttaaaaataaaacatttctcctatatacggacacatgagaaatatataattgtcaaccagaaaagtactccataggtacatatgattgaaaaaaataataatgcttacgtatcgtttgccggaagaatagaaaacgtacttatgataaagccaacaaaatcgatagtccttaaaatagaactttctaataaaatataataatattcaaatttacgcaaatataaatataaaatatcctttgaatgctttttaagcattctatctaattattttaaaactatatatatccattttttttatcccattgtattcctttaaataaataaactattaatgtctataaccctaaatacaacacaatatatggagctgatatgtaataattaatgttatgataataatttcgcatcatattttaattaaaaaaacacttgacgaatatacaacactaatttaaatgtacatatatattctccaaattactaaaggtgaatgtgattagataggtgttgaaagcaaaccaaacattgaactaacatacactttgtctcggttacatataaatgtttctattattttgggataaaatttaactccttagatttatgtgacggagggagtataagtaatataagtctatctttattagatgaagtagtatcattagctatatttttaatagaaaatatctttcattaatatataataaaattaaaatgttacttaaagtcatctatagcatacaaaataaaaaatgttatataaagtttggaaactccacaaatttttttaaaaataatcgctcatatatcgtacagatagatatgaaccacctccatcatttgtgacatattttttttttctaataaatttgaggatatacggtttcaactaatatgcccaatccagttattaatggacccatgtttaaaatagagtcaaaaataaacattcgtaataaaaattcaaacaacattaaacaaacatgcacgcgcgtatgcgcgggctagcttcctagttaactataatgagacaaacccataaatcaattcaaattgtaaaaactttatttagaggaacctgctagcactttattcaactaactgggaccttaaacactctgacgaaacagagaaccaggtcgaagtaacttcgttagcacaacattccttcgctaaaaaatgagctgccaaattggctgaccgatggatccaaatgaccctaaaatcatgaaacaaacctagtcgatgcttcaactcttggattattaccccatacatcgatctattggcgttctcaccagtcaccattttctg

SEQ ID NO: 6168 - DNA, 51143 bp, Oryza sativa
ccgggactaaagttacaccaacctggactaaagatcccgggggggcctgacaagccctgacagcatttgaaccgggactaaagatcaaatatgcccgttaccctttttaacctttagtcccggtttttgttgcaaccgggactattgtggaaatagcccgaccgacgaaagatggtttctccaccagtgtcaagtcgtatcctgattctatggatcaagcaaattgcaacataataaactggaaggtgagaggtttaaatgctgcagctagaagggattgtgttagagaaatgatgttcaagttgtatcctgattctatggatcaagcaatttgcaacatatttaactggaaagagaggattaaatggtgcagctagaagggattgtgttagagaatttgttgagcaactaaaggcaactataagatcccaagtgctctttatttttttctatatggtaagcgccacgtaaataccatgtaaaataaaaactaagtcaacttatcatgtgtgtgtcacgtaggactaaatcatcattcagaccgcccaagaactctatttagacaaatttttatatttaagagatcctatgtaacctgtagagtggatttttttttccttgcagtcatgtgctattttctttctactccttttctttgctgatatagtggttacacatttgacttataaagataattacataaagtctttgcacatggtagttctttaccatatgccttgttttcaacccaactttatcattcgccttccttgactagaccaagcctcctcagtgaacacaatcccgattcttgttgttgatcagaattgaacttcaatgttaatggataaaacatctgtatcgataatattttttttaaacaaatcaaattttcattgacccggctttaatagaaagcccaaaagacagacagagtcttatacaaacaaagaaacaacaaagaaaacagaaacataacggtagccaacagcgctggaactcatcaaaagcaccatccatcctagcgaagatatcacaccctagagatagatctcaaaacgcgtaacaaagaagccaagagcaaattttcacagctaaactactgcagggaggcaacacgacttcaattggttcagtttgcccatcaacagctcacactaccctttcatgattgcttgatcttcttcccttagcagaatacaccaccgctgaataaaagacagacttataagtgaccttcaaaggggacttgaccaaaatatctgaaaaaacccagtcagtcctatttaaccagagcacccaacacactagcaaaaagcatcacccaaacccaagataatactccctccgtattttaatgtacgacgccgttaacttttcgaacaatgtttgaccattcgttttattaaaaaattttatgtaaatataaaaatatttatgtcatgcttaaaaaacatttgatgatgaatcaagtcacattaaaataaataataatcacataaattttttgaataagacgaatggtcaaacgttggacaaaaagtcaatggcgtcatacattaaaatatggaggtagtagtttttttttcacaaactgatcagctatatataaaacaacactcgcacaaatgaggcgtcataaatactgtcaatttttcattgtgtaatttactgaccatgtatgcatggcctcacataacaaactagctgggtggcccgcgcaattctgcggctagtacctaaacaaaatcatatatttttttactatgatttttcttaaaatttattaaatagctatctcattgtcttagactttgaaagaccaaattttatcatcctcgtgtttctaattatatagtttttaaaagtcacaccagttgctaccccttatgccatcttcttctttatttgcttgctcgatctactactattttctatccattcttcttgtaacctttatagtttttagagtttattgtcacgttgggtttcgtttttataatttctagatgtcccgtcaaacgttaccattatattcctttacggcccatccactgtctcttttctttattgtcattgagattttaaaaatcgaacataattatcgtttgggttcattttttattttctagaagccccgccaaaccgtcaacggttttgccattatactcctctacggctcgcccgctgcctcccttctttattgtcattgagattttaaaatcgaacatgattatcattggttttttttttactttttagaagttccgaaccattaaaaattggactagtagtttcattttttataatttttagaagtcccatcaaatgatgccactatgcccctctatagcccgttcgctgcctactctttattgtcattatgattttaaaaatcgaacataaccatcgttggaatttattttttattttctagaagtccagttaaccgtcggcggctctgtaactatactcttatacaccccgcccgctgcttctcctttttattgtcattgagattttaaaaatcgaatatgattatcaatgggttttttttttttactttctagaagtcctggcaaccgccttactcgtttgcttcacggcctgcctgacgtccctccttttaatcatcattaggattcgatttggtgttttattaacagtttttatatgtcgtatcaaccgctaccactctactcctttatagtcctgttacttaatttatctcgtcatgtgttttaaatggtcttttctttcaatagtctttatttttatcataaattttagttatttataaattgtattccgaattgaaatcttatttttatttttctaatttcagaattgtttttgaaaaaaattagttaatatcgtattgtgttcttattgtttttattttttattttcaattttagttatttcaaaattgtattcctacttgaactcttttttatttttttctaattttggatattattttattttttattctaaattttaattaaactcgtattgggttttcatatggattattctttcaatattgcttatttttaattccgaatttcagctaattttaaattgtattcctacttaaactcttcttttatttttcttttgctaatttcggatttatttttatttttattctgaattttaattaatctcgtattggtttcttacatggactcttcttttaatatttcttatttttagtttcgaatttaagctaattttaaattgtatttctacttgaactattcttttattttcttttgttaatttcggatttatttttattcttattccaaattttaattaatttcgtattgggttcttttaatattccttatttttaattccgaatttcagctaattttaaattgtacctctaattggactctcctttcctttttaattttggattttattttatttttatttcgaattttgattaatcttgtattggattcttatatggaaacttctttcaatattgcttattcttaattccgaatttcagctatttttaaattgtacttctatttggtctctcctttttctttttctttctttcttttcctccgattaatgtgggaatttctagcccccacagtgaatgtggtgcctcctttcaaggctgttttaataatataatagatacatagatagatggatagatagatactccctccatactcataaataaagttgtttaggacatcgatacggtctccaaaacacaacttgacttcgtatttctataaaagtattcattgaaaagtgatatatgtatacttttatgaaaatatttttcaagacaaatctattcatataacttttacattttcaaactcaacaactcgagagttattcatgatttatatttccaaggtttaacttaaacattgtcctaaacaactttctttacgagtataacatgccgtcttccatgtactattaattaatgccaaaaccttaggcaggctgctagacaacgtctacggataagagatctatattattctcaccatgcaaattcacaatgtgcgtataataaaccaattaggaaaagcaatgaagcacgtacggagactatagaaaccaattaggaaaaggaaggaagcattgtgtaaccgtcgaatcagcttactagttgtcacacatgcatgaaggacaggaagagttgtgtgcactcataagcattagtacaccgaacaagtcatcagcaaataatatcgaatataataatatatggcagcgcatccaaataatcttatcaagtattactccaattaaagatggcagttaatatatatggaatttttttagattggaccatagcaatcttttctgaacagagataattaaatcttgcaaggacacaaccgacacctccccagctgatttccaagatctaaactgttacgccaaccggtcgatgtgatgtgacaattgatcaatggactacgtgtagcgttcgattgaaaaagtggtcgcggagcccctcctgcgtgttagatttcacgttgtcaacaaacgaacataaacacgcacgaacacattacacaagggaacgtgaaagtggaggggctataaaccgtacactgctgccttctctctcttaaaagtctttctttttctctcaacccctctactgtgtttatatccataataagatagtcatataaggatacatacatgcatatttggtataaggttacttcatccttaaaaaaactgaagaatagaaggaggaggcggtaccgtgatcctcacgatcacggcgactacctcatggtcgctacaaatccgactccttcgggagatcggtttcataataaaaaccctttttacttccagttgggaaccccctttagtcccgggtttctaaccgggagtagcaatccgggactaaagatgtgcatctttagtcccggttgaaataacggggactaaagatgaatctttagtcccggttggtaataccaaccgcgactaaagatagagtatctttagtcccggttgttaccaaccggaactaaagaggatagccaggttttttttccttttttattttctcccaaatctaggtggtatgtatatccttttttattttctcccgaatatgcgtggtatgcatatcccaaatcgaagtaagatcccaagtccacatcacaaattttaaagttctaaaaaattatatcagaaatcctaaaaataattacacacaaatcaaattacatcacaagtttctacaaaattcatcacaaatacatcacaagttcacatcacacacaaatcaaattcatcacatgatcctgcaataaatcataaattcttaaaaaaaaggagccagccggccgctgccgcctagcctccacgccggccggccggccaccaccgcgccacccgcccgctgccgcgccgccgcgccgcctcccctccacgccggccggcccccgacgccgcgccgcctcccctcagcaccggccggtccccgcgccgccacggcggccctccgcgttgctgcccaccatcgcgccggcttcccctccgcgccggccgctggccgccgcaccgccacgctggctgccacccggccttctctcgctccgatccaagcggctggcctctctcgctccgatccaagcgagctaaggaagaagaactaaggaagaaggaagaagaaaggataaagatatggagttagagaggaaaaaagagatagagaaagagttcgttgtgtggatgggaaaagaggataagtaatagggattatatagtacgtgttgatttttattcccggttagtaacaccaaccgggaataaagtaagataccaaccgggactaaagatcctagccgcctgacacggtctgacatatagacaaccccaaccgggaataaatatcatctagtcctgttatgcttataaaccgggactattgtggatttgagtcgaccgactaaagatggtttctccatcagtgatactgggatcccgatcgacggtgtttgccccgaagcttcgcattgatgtttagcgagaaatcgcgttctggatgccgatggatcggttcgcatggataacaggaggtctcgcatacacctgatttcgtgtccggcgtcgggcaagccattaagaccagttccagtgtctggcgacgggctcgtgttggagttgccccaaccatatgaatgaggcatccacctgtgagcagcttgacagtgtgcattatccttagttggtaggaaaaccggaagtaatactgcatttgttatctcttaccctatctgtctcaaagaaagaccattcctagcaatgaatctgacacactaggattgtgttttctttgggatggagtagtatgcttttaagtaaagctgggcgtgatgcgttttctctaaaagaaaaatactgcacttgttattaaaaagagaatgttaaaacacaagtaagggtgcaagcctcctccatgcgtatctcttaacgaatgcttttaatttttaaacataaatacacatcgtaattttgcaaccttggttttgttttatttttcagaaaataataagcttaatattggttttgactgacaatataaagttattgatgatatagtggaacaataaataaaacgtgaagtgggacatggaatcaaacatgtaaaccgtttattgcacctttaatttggaacaaacacaatcatggtacgtacaattacattggtcaaccaattggccaattattaagctggatgcgcgtgatcataatagatccttgatcacacatccaaattgaacacatgtacattcttttttccatcctcttctccttgattaattaagctggactactaatatttctcacaaatgcaagcgcgcttaattaactatgcacaaataaatctctctcattttgctaataataacaacaataataatcgacacatacgtaattaattatgtttgacatgatgacgttggttacttcaattttaaactaaccaacgtcatacatgaagtgataattaattgacccttctgcagttggtccggacctcacccagggaagggtcagtgacaggggagaggttgcccatgttgatcatggactgcgcgaagctgcggaagaaggcggcctggctggtggcgaagcggtcgacgatgggcgccgtcgtcccggtcgcctccggcgccgacttgagctcctggtccgactggaggaagccgcggttgacctcgatgttggtgtagtagtggttgtcgaaggtgtccggcgtcgtcgggtccaggtcgttgagcgccgccggcggcccgttgggcgggcaccgctgcgacaggaagctccggtaggcggcgtccatggtggggtccggcctccccgtgttgctgaagttgtacagcctgtccgtcacgaactggcactgcaccctcccgaacgtgtgcccacctgcatttcgcattattgtcgtcgtcgtcagctccggcgggcatgacggcagaactgaaattgagttcgccggagaagtgatacgagtacctgagagggcgacgaggtcgacgtcgttgaggttgagggcggcgaacttttggcggaggacggtgaggttgtcggtgggggccggcaggttgagggagccattgaagtcggaggtcttgccgtcgagccgccccagcagcactccccacccgggcccacctgactgtgaccgacaaagagagatcgatccatgtcgtccaaaaattattacttgtacgctcaattcaattattcatcgatgagttgcacttgtgaaccctatatgctatatatcttagatatgatgttttgtagtgcatgcagcatgcatggtgcacacgacaagattggtttcagtacaacagtgtcgatcgatcgtcgtcttgtgtgtgtgacacacacacacatatatatatatatatatatgtatatatgtatatatgtatatatatatatatatatatgtatatatgtatatatatttatatatatatatatactagaaaaaatacccgtgcgttgcaacgggtgaaggttattttaaatttattatttttatatggtttagttaagatgaaatttaccgtggaaattcgcttggatatatatatatttagaaaatcatgagctgtagttaagagtccgttcgtcttaagttagtatacgagttttttttaagagatttcttatacagctcattatgtatcgccaaaagtgaacgaacttaaaaccaactcaactacaaatatgtatttccacaagcgatccttctgtatttctaatagcaaatggacttaaaaaccgactcaaatatgggtatatatttccacaagcgaacgaacttaaaaccgactcatacacagatgacgtatcaaagtagcggcaaaaacatcttcaatttttataatagtagatagatatatatatatatatatatatatttatatatatatatatatgtatgtatatgttgatgctgatactttgtcctgtcgtaatgttgtccatatatattatacacaaactgtacatgtatatatagtagctagctctacatgtcttcctttccttggataattaagtgtggctttgttgttagcatgtgtaatagtttacagataaggttggcgtgagccgtaaaatgtaattaagattatccaatgatatgatgaaatatatatacggcggcatacatatgcatgcatgcaagcaccgacgacgggcctgtcaaatcactgttgaatgaaaaggtggtacgactgctagacagcactccaatttgtttcttcattatggttactagacctgtctatagagttacttcctccgtctcaaaatataagggattttgtgtaaatataacacatcctagtttagtactataaatctggatagagaatgtctagattcttagtattaggatatatcatattcatccaaaatcctttatattttgagttggaggaaggatagatgcatcttgcaagcacttaattaattcgagagacacgtacaaactaccaataatcatcgatcggcccaaccatatcacacactgtattgtgcaaccatgccgcatattatgatgatattcccacgtagctaatatgattggataccatcgaatccatacaattaagcatgcatgttaatcacgtacttctgtctgtaacgagctactattacgtcctgtgctgtagttagtagtttttattgggctcaagaaatatgtgaagatatctaaattttacgttaaaacttctactacctcaagatgttatctacccgagatactaagtttcatactagaaaattataaggtaactctcaatacttttataatgatgataaaattaccatggtaataataaatgaagttaatgaaaattaccagctcgacggagatctcggcggcgagggcgaggatgtcggcgcaggagacaacgccggggcaggcgtcctcgagcgcggccttgacgtcgtctacgacggggaatcccctcgcggagttgttgttgggcggcgacgtcttctccgacggcatcccggggacgctgtccagcagcagcgacgcgtcgcacccctgcacgaagcagtcgtggaaatggagccggatcaggctcgcgaagatccgggcgtcgctccggtgcgcatcgatcagcacccgccgcacgatgtcgtacgcgtcggggcacgtgcagtcgtagtactcctcgcacagctgcgccaccgccgcgccgccgccggcgaccagcgccaccgccgccgccaccaccaccaccgccagagaggaagaagaagaagaagaagccgccattgctagctagctagctgctacacgactactcctatacggtcgtgtcgtgtgtgttccacgagctaacacacagcgcctctcctgatttatagctgcccaagtgtactgtgtgttgccgatccattatttgatcatttagctaggcagctggggcagctagctagccaaactaattactccctcctattcgaaatgtttgacaccgttaactttttagcatatgtttgaccattcgtcttattcaaaaacttttgtgaaatatgtaaaattatatgcctacataaaaatatatttaacaatgaatcaaatgatagaaaaagaattaataattacttaaattttttgaataagacgaacggtcaaacatgtactaaaaagttaatggcgtcaaacatttcgaaacggagggagtattacatttactctcatcgtttttacttatttattgttacgcatcaagttgctgttcgtatttttgtgcatcgttatcggttgacatggtagaatatgtgaaggataagtatatgtaatccaaatggcttggcaataatgctagtctacagagttgtcaaacttggtctcctctagactgagacctgactatgaccagatgactacttgtgcagatacttgcaaataatacgacatgtattattcgtgtgttgggtagtgtacctactggttttttccttaatttgcttttctttaattttaagaaactaataatatatggatatatgttaatctatagctagtggtacgtgttgtttatcttatctcctctagacaaggagcagtccaattctttgcaacgaacatatcacaaccacatgcatttactaatatgtttttgggagtgaacatgataatatatatgtttaagataaaacttattacatcatgcatagtatttatggataataccttttggcccaatctcacagctataggtttagctttgcttggacaggacaatatgcaagaggcagaaaacgtcactgtcatgtcttgcaaaggccaagtaaagcttcgtttcttttctaatcattccacggcggctatacattaatttatagctttgcatgcatgcgtacatgttagctagctatgatcgatcacacgtgaaataatggagttaattaatcaaagggccatcgtttgttcatattataggtacgtaccgttgtgttttaatttgtacatatatttctcgtaccgtatgatactagtacaaataaatgtctgctaaaaatctctatattttttcccctggtccgggaaagttatcaagaaatgctactagtaaatcattacaatcacgtacaaaacaagtttctatctgaatcagtagaattgatcatatcactactacgaaacacgttttttcctaacggccaaaatacttcttttgcaggtcagcgcgcaccccgccccgcctgctaccaaagccatgtaaaaaattaatccacgatcttcatagacatgccattatcgctcgttaaaatcgattttcatagacggccaggttaagtcaaccgactgggaaaatgattttcaatgaaaaaaaaaggggaaaagattatcccccacatcccattgctctccgcatgccgcaccaattttcatagatcaaacaacaaataaagcaaaacaggaagaccaattcatcataattgaaaatcaagttgctccataaaattttgtattcacaaatccaacctaaattcacaagcaaaaaagggaagcagcctatgtggagctgatgtaacagatgcaggaatctcatggtcacaagccatgcatcacccccatcggatccacttccttcaccactgctggtggatcataagctcccaatcactaccggcaccatatccatctcctccaccaccatccacatctcccctttgctgccgctgccatgtggaaccccgtttttataacaggaatcaatcgtgtaaacagtaccatttccctggatcaagtagtctggtacacacgaactcatagctgaaatatcaagtgcacatacacgagagtctagtacgaattattacatcataagcccgcaggcacagtcttaaatcatcggaccgagcggtccggaatacatttcaaaaacagaagtaggtaaggcagcggagttaaggcagcggcacgccattgccacaggcaacgaccgtaactaagacctactgagcgccatcgtcttcatctccctcctggtagtaggcatagggatcctccgaagcttcatctcccacttctgattaattttatatttgcaagggtgagtaccaaccgtactcagcaagccaccacagcaatgatgcacacgacagaggaattcaaaggatggctatggttcttttgcgcaaagcaagttttgtaattcttttcacaagcctaagacctagcatagactgatcaagttttaataccagtgttcatattaaacaatgacggttctgtccaccatccattgtgatcccaaggatagcttcccgccattgggtcgttatggttttctgaggacgtccatattcccgcctctcaagaagtggctccatcagcataaaaatcatcatgcaatatcccatcccacacaagttaaagaatttagagtctagccaagtgtaatacatgtcccggtgctcaataaccgcgagcacggctattcgaatagatttggtttactcacactgcagtggatgtacactttacccgcactccgcgactgcccaacacatgagcctcgtcccaacacatgagacgcgtcacggcaaagcttttcgataacctcgcattggcagtacccgctccatgaacttaaatcctcatgcactctaggcgtccatgtttctagcagtgtgaggagttctggcgctcccaggaaagagaagtctcacacatattaaattatggtttaagttaagttctctctcatacactcatggcagtcctaccaatggcgacaccgatgtagggcacgcctctcggccctacctcaacggctgtcccatcgtagcgcacctgcctcactcaggggtgaaccatctatgcagggatactgcctccgctcgactatctaatccgctaggtctatacccattcgagaagtacggttgtacgggggtcgtttcatgcttaacttcatggctcggtccttaattgaccagggacggtactagcctttcccagataccacccaaatcctccgtccgccccagtcgaaaacaattgtttaattttatttctcctttcacaaatcatgtcatcaacatcatggcaatgtggcgctcatgtctccacatgccgcatctcaattaccttcccaaaggtaattgcccaatcatatagcatttgataaatatgagtatgcatgattctagaatggcatttctaagcaattgtcataattgactagggactcatacgtaatcatggttacaaggattttaagggtaaacaataatcgaggcatggcataatcacaagtatgatgttcatcattgcatgcaattttatttgtaaacaaaacaatttcgcaattgggatcaacatgttcaaggaatggtgatgacttgccttgctaaaggtcttgcgggtcttggccttcacccggatccgcggctccctcggtttctataattatgtgcgaaagaacaatttgaattcgattagaattcaaacaaaatccaaataaatccaaatgaaagtcgaatgcgaaagtcgattcctttattttaactttattattcgcgaactaaggcaaacccaatttcgattcaaactattttgcgggtataaatgttttgttgtcataagtttttaatttaatctacccgagcattatatccatataataggttagagatttctatcgcgagctaaatatcggacgaaatcctagaaatattatatgatttaatttagtctatgactaaatgattaaatataatacacggctaaaatccctagtaattaaatccgaatttctaccgtgaatcgattacttatagggattacccaaaaataatctataataatctataagaattcatctatttgtttagttattaattacatctaaattactaccgcgaattgatttcttattgaaattaccaagaataatccataatttatattaaattttgcaattctacgactataattaatctataattaaattctaattattttaaattttctaaacttccctaatctccctctaatctcctatttatttccttttcctttttctccctttcctttttttttctttcctttctttttcttttctttttctctttttctctcttttccttttcttttctttctctcctccctcccggcttctttctctcttcctcggcttctccctttctctctctctctcggctccctgctacctggggcggcgacggcgaccgagcaaggggaggaggcggcggcttaccaacggcggtggcggcgacggcggcgcgacgacgtcgcacggcgcacggtgcggcggcacgaaggcggcggtgcggcggcgcgagggcggcgcgacggcgacggcggcgcaagacggcgacgcacggcgcggcggctccggggcgacggcgcggcggcttcgaaggtggcggcgcggcggcacgacaacggcggcgcggggcacgaggcggcgacgggacgcgcggcgaccggacgttgacggcggcggcgacagcggcggcgcgcggctcggggcgggacgcgacgggcggcgacgcgacggtagcgcggcgcgacggcgacggggcgagatgactggcgagcggcgatgggacgggcggacggctcggggcgcgaggcagcgcggtacggggcgcgtcgcggggcgacggggcggcgcgcggcgcagggcgcaaggccggctagggcggcgcagcagcgatggcgacggcgacaggcggcgatggcgacgtcggcgcggcggcaggcgacggcgcgacgggacggtgacggcgacggcgcggtagcggcggtgcggggctcagggaatggccgggcgcgtggcagagaagggtctagggctagggaccaaaatcgaacacctatgaggcaatgaacagtgacttttcctatttatcccgattttagtgtattttccatataaatttgattccacaattcctaattttacatatatgcattttactcaatatttgtgttatcttaactaatgaattcaccctagattaatattactcatattttatttttatataatttatttgagttttaattagggttaattcttattccatcgtatttaaatttaattgatccaaatatggtcgcgataatattttatttattactatccacacctaatctttatttttaatttatatttattttaccaatttgtttttttaaggtttattcctgattaactattctttactcacgattaataatcttcaaaaaaaaatccagataaaataggcgaataagatcagcatgatgcaattaatttaaaaaagtttttgaaaatccgtatttttagagttttgattttgtcggtccaattttcagggtgttacatgccacctccccatcttcgctttgcagccgatgccgtcactagtatcctggagcgctatcgccaccacccttctctggatctctttgacggagagaagtagagaggataactctaagggagaaggagaaagagggaaagtctaatattctaggagcccgcatataaaattatttttataagcaatatttttagagggccgtatgtataaatagagttgtttttatacatggttatgctaatacgactgtctatttctacaaagtggggttttttcttagtctgcctttgaaaataaatttgaggtgctaccaaaatacttttcttatagcgtatcacattctaagacaagtttcacttactttggttaaatatataggagtatactatatatacatgaaaaactaggcacgcttgcccaatggatgcaaatacatacattttgaacgttcaacgacatgggaccagtgctttaactagatagtgctataattaataaaaccgggcaaccggccacaagctggtgaggaagaataaacgatctggatagcttaatttaattttaaatcataattcttttttatcaaattgttattcttcatccatcctagcttcatgcagtgtaacgaatatatgatccttgtcttcacgtacctcttaattaaagctaagttgtgagctgttatgttacctctctagtcaatattgttatgttacctctctggtcaatatattactccattcgttttaggttataagatgttttgactttggtcattaagtttgactaagtttatagacacatataataatatttatgttaccaaattagttttactaaattaataattaaatatatttttataataaatttatctttggtcgaaaatattattatttttttctataaacctagttaaacgtaaagctgtttaacttaaacctgaaacggaggtggtatataggagtatgtgtgtacgtactgtacgcgtgcaatgtatttttgctatgaacgtagtacaatataggagtatattatgtggctgctatatatacacattgcagtgagcatactctggccacatcatcagccaattaattgttcatcacaaattaagtgatcatggatgcacattagcccacaaattaagacaaagatcgctactgttgtcttgaaagtggcttctacgtaccaagcttggatttgtacatataatgcaggcagacatagctaacaaggccaactggcatatagatggttggcagatagctctttcccgttcatgatatatatcgaccgttttcgttaaacaactaattggctgcattattcgaggtttctatatattatgctagatatatatgtgcacaaatgtacgtgtgtatatatatgttcacacatgtcaataaagcagaaaaataagaatatactccctctattttcatgttataaaacgttttgattttggttaaagttaaattactcaaaggctgtgttcgttttagcctcttcttaacccatctccatcattttccacgcgcacgctttttaaactgctgcatagtgcgttttttgcaaaaagtttctatacaaagttgcttaaaaaaattaaattaatccattttcgaaaaaaaagcaaatacttaattgatcacgtgttaatggactgctctgttttccgtgcggaggaaataagttcccaaccgcctgaaacgaacacaacataagtttaactaactctatagaaaaaagtagtaatatttataacaccagcatagtttcattaaatctataattgaataattttttataatatattagtcttgggttaaaaatattactacttttttctacaaaattagtcaaacttagagtagtttaactttgactaaagtcaaaacgtcttataacctgaaacggagtgagtactatacttttcgtatatagtcacagatttttttatatggtttatttatcaagtgtatatatatgatacttgttttctatttttcatgtgactgtttttattcttatcaatcactttttttcaacaattaatagaatattaggattcgacaacttgcatatctattaagtttcaacaaccagaaaaataaaaaaaagtgaatataattttgagtttgtactgaaaacttgcatcgtttttatataaagcaattttaagctagatttacattttgcaggtttagttgagtgataaacgagaaaaaaaaacatcgtgttgtgcaaatttagatgactgaaaaaaaagaaataaaatagataactgataaataactaatatggaaatttttattttttaaaagtatatatgtttgtatggtagctagccagcatatgcatacgtatacacacacgtgtgtgtacgcgatacacaaggtgcttcgcaaaggtgtttagagggcttttagctgcttcatttttttccagaatcaaaagttttctccaaacaatcttgcttcaggtccagattctagaaaattgtagaatgaaaaaaataaactaaaagcaagaagctgaaaaatctagctttttccgattctcataagccggttaccaaccagctaattctgagaattttaaactcctcaaacagctcctcaaactggctgattcttagaattctcagaattaattcgatgattgtaggttgttggtcagcagcgtcagattttaatcggttgttcgtatgacacattcgatcgcttgtcacatttctagacggtacgcgttgagcactggtagcctggtacagcgctagtatacataaatgtgcctcgatttcgctatctatcgagaaataattaattacacccccgatcaatatgcctgcctccactagttcttaatacatacccatatcatctttacggaaaatcgaactataactaattatgatttttttggataatatataactataagtaatgatagtgaaattgataccctaaaggaacttaattaatttgttgccctatcgatcggtacagaaaaaaaatcctaataatggtgaaatgggtaccaaaaggtactttgttgtccctgtcggtaaaccatacttaagtaacattacctctacgattccttgaaattttcgttatcgactaccaccgaaaagaataattagctgtaaatatatatgagcactcatgttagttaaatctaggatttattaatttgaacctaggtggagtggtttccttaaaaaaaaatctaattagctgagttacattcacttcgcagcaatataatggtcgattggtcgtacggtcgtgtgcttccatttgatttatgattgattaacgtacgtacccttcaaagtgagtggtccagtatgtgttgatctagccttattattggactcattatttttcctagatgccattgtataccttgaggttcatggacggtccttaaacactagcacgtgttatcttgttcttaaactttcaaatacaaattcagatctttaattaatccatcacaagtccaaaagtgtcatgttttctactccttccgtccctaaatataaggaattttagttggatgtgacaaatcatagtacaacgaaactaggatagcttgtctagattcgttgaaatatgatgtgtcacacctaaccaaaatcccttatatttagggacggatggattatcttttatgctactgccttttgtgacttagctacattaattttagttacttccttcatttcatattacaagaatttttagcattgcccatatttatatagatgttaatgaatctatatagcaaggctataaagtcttgcaatatgaaatagagggagtactacgtacgcaccatatgtttggagcactggccggcgggatctagttctcgacaaattcctaaggaaagaaaaaaatcagcattaatttttattaatgttttagatcacatatgttttaattatatttctccaaatttgccccatttattcactcggccagacataaattggtacacatgtgtgtaatagttgagtctaaagcattaccaacagatcgaatatataatccgctctcaaaaatttgttattgggtttttaaattgaaaattggaagtgaaaaaactcatctgagaaaacctaaatttaataaaaactaaaagtgagcccttgttattttttgcggtttttgcaggaaaaaagtgagcccttctattaaattaccaactaaaatctttgtttttccaccgtccccgcgcggaaaaagatcactcctccagccagcccacacgtgggaaagaaaaaaaagcttgcaggaaaaagaaattgggaacaggagtggtgtcgatccacctcaaatgaagagagcgatgaatgcggtgatagggttgccaaaacattactccctccatctcagaatataaagagttttagagttgacactgttattaagaaagtaggtcgaagtgaatggtggaggattgtgattggataagtaatggaggtaggtggaaaaagtaaatggtggagggttgtgattggttggaaagataatgttgggacaaatcttaagagttaaaagttgtaatatttttgaacggaaggaaggagtagtatcagcataggacatctgttagaggttttcttttaccaaaatccaaaaaagtcaagatcggggatgaaataagggtattgatgatgctataagctagcagtgttaattacttttttttaccaaataatgatgaactccaacccagctttcataaacgtttcaggcccttctaaggtctagctaggtacccaccgtgccatatcatgtcaccattcaagaagtcaagtgcatattttatttagcaattttactgtacttcaggaggtaccacgaggaaccattttttctatggacgtaactacatagctagtggtagctggtttgtctaccactctatctataagagacaccattcacctatacttcaaatacaattttctcttaaactactcatccgatctacgatccgattacaccgttgtgtttgtaacaattaaatcttacaacaagatctcacatcattatattttgaaaaaaatcacaaattacttttatgatatgtctaaattacttttagatttcactaagttacttcttagatatataaaagtaaattcagtaaagcctaaaaataatttacatatattatagaagtaacttagaacaaaacgaatgtaactttggcatgtcatttgaagtaaatccggtatagagataaaaacattactctatctagaaattaaattaatcagcacaaattatggaattaactaaaaacaataataaaagcaatcacctcagagcattatgaatatataggaagtattttaatcaaatctaaaaataaattatatatatgataatttgttcaatgaaaaaagacattaattaaagttactttcttttttgttataagttacttctatataatatatgtaaattacttttaagctttactaaatttacttttatatgtctaagaagtaacttagtgaaatctaaaagtaatttagacatatcataaaagtaatttgtgatttttcatcaaaatataatcatgtgagatcttgttgtaaagatttaattattacaaacgcaacggtataatcggattgtaaatcggatgagtaatttaagagaaaattttatttgaaacatagatgataggaatatttcccatacttacttaatggactagtactataataaagtaagattcttccatcaacacatatctagattctggataggcgtcgctagttatgactaaatcgagagtgctctcgaattagattttgtgtttttcaattataaatttggtacctcatagtatctagatactaacaggtaccaaattttacactaattttttaatacctcatggtatctactcaaggaccatagaattgctctttttttacagctataaattaagaaaagcaatagtacttactcaacgaattcgaaggataccaaaactacaacactactttaaaaaatgtctatagatgcaggtttaggaaccgcctgatctgacggaggagacggtgtgagcgccgcagccgcagccttccatcccgccgcctcccctgtggctggatttggaggaggggagggcgcggatgccgccggcctccactgccgtctccaccgggccaccgttgcctcctcggccggaccgccgccgaggtccgctacctctcccctgtaacaccccaggtaaccacgtacctagagtgccacaccaaaatatattcaaaaccattaactttcaaaattattagaaatttcagcagagtctcccctataaatacggacatccacgataggcagttataagataaatcaataacgaaataattcatactttccaaaccatcctagttccataaattccacataaaaatacgaaccagaactttaattgacctttacaagttctacgcaaaacttatactaagcagaatcataatctaaaacaaaatttcaatagtacaataaaatgtgtaatccaagggagctacttcttgcccatgcatgctgatctcaatgtgtacctaaaagcaaataaacacgagtgagtacggaaatactcaacaagtatattatggaactagaagacacgcatacacatcatgcgtaataaagcctgaacataaaactttcttttttggaaaagagtcacatttcaaacaccaagttaaaggcagtcgtagttcccattccaggcaaacatgaattaaaatagtagtttccatctcggacaagtgtgaatacatccgagcattttgccggcaaagccgagtaagcgtgattagcgcttacccacaggaatatgagtaaaaaccatatagcacatccatgactcacatggaacataaataattgaaactagaacaaagaaccaaattaaaaccatattgcacatccatggtaagcatggaacttgaactatttaaccaaaacctgaatctggaatattgaaacaagaataacgtcgtaaacataagataaagcttgaaatctaaatagcattaacaataatctgaacatatgcaatcccatatcacacaaaaatatattgaaaataaatagatagagcaaacactcagagaatcacacaagtagttcgtcatgcactcgccttttaacctcgacggcaacccgacgaaaccccttccacaccagatctctccacacccgtggagtaaaactacgcataaaccaatatattgaactaataatagttataagagatatttactaaaatcgaaaccacatataaactatttaccgatttatattaaacaacctatagcagttccattactgttttatgcgtaactctcataccgtctaacggaatctggcaaataatacaacttcgatcatctaaaaaaaattttctgcaactttcatgttgggagaaaaatcagattaagtctttgtaaatcccagattaagaaaaatgaattgttgtcccggtttttggacccggtcagcagtactgtttctattgtttctcctaaaccgtttatcggaatcgagcgaaaccagcgacgttaaaaagatatagacgatgactacaaactttatttaggacaactaacctgaatcccgatagtttaacaccagatttgaaaatactattgtcagcctataatcagcaagtaagaaaatactcaaccaacgatttaatcgattcccacgtgaaaattgtattttttttggactaataggagttaaccttgcagaggagaaaatcaaatttgaggtcaatctgtgaaaacccagaaaatccccaacttttgcctctcttccctttttccttcttttctcctcctgctttccctgctttctgaaactcctcctctctgttcgttgtagaagcacagcagtagaccagcagcagcaacagcagcaacagcgaggaacgttagcagaaacagccacaacatggaaacatattagatcggtggcagcagcagcagcagcaaggattggcggcagcactcaccaaggaggagtcgagcaagaggaaacaattagtggcgcagaggcagggttggggactggcgctagggctagctgccacgatccctggtttctttttttttcttcttttttttttacaagttggttaaatagagagcctaatgaagatcaaacgacgtacattaattcaacctctaggaccttgttcggacttcgattactctaaacttatactctattttgcactactcggcgagctctacgcatccacggttcctaatcgcctatttgaacaacggtttaaaattttaacttttgcgcgtttgttctaatatttcccgaaatacactaattcgatactcggggtatcaccacccccccccccccccgggcggatctggcagaggggagagcgcggtcgctgccgagattggtgagagagacggagatattagatatggacaggaggatggataagatcgagagatggatatggcggctcgctggctcggctcagtataggtagcattttttttaaaaaaaaccgacacctataatagattataggtgccagttttttctttaaaaccggcgtctattgcttaatggtgccggttttatgtgtttttagtctgcggatgaggggaaagaactatatatgacagttttaactgttccaacacctatagtgtcaatctctatgagcttttttaagtagtgcaactacatatgttgatagaggaatgtacagtgaactctagaccggtaagagaatcgatcttgaccatccatcctttctcatttagatccatttgttccaaatataaacatttctaaagtttttcattgagattaaggtgaagggataaattaaattaaacagaaaagggttttgattggttgagatatgatgatgaaatatatagttgcagaagttgctatatttagagataaactatatatgctagctagaagttgttatatgtatatttttttattacggagggagtatctataacattgccacccaattactgttagattatcagttttataatagaattcctaaattaatggttaaaatcatttttactgtgaattaatggtgacaataccggtagtattctactattagtcaagaccatggtaggttagaggaattgaaggcatgcttcactacgccagaccaagtcatctctgacgggcccaaaccctaacctttaacgggtttggtcttggtcagtgattagtggtcacttatgacaaaatcacctgtgatgggtgaaacacccgtcatagataactcatctctgaccggtatataagtcatctctgacgggttaaaacttgtcacccgtcacagatgtgtcatcagtgacgtgtcgtaactacctgaccgtcactgatgactaatctctgacgggttgtaacttacgacccgtcactgatgacaaagcaagaaatacaatttttgaattttaaacgcaacaaaaaaacctcaaaaaaatattttgaattttactagccatcctatacatggttacacatcactacccacaaattcacaatttttcacgcaatataacttgcatgctaaactatacatggttacacatcactacctacaaattcacaatttttcacgcaaatataacttgcatgctaaacgtgagattcaaactcaagacctcaacctccatagagagctcccttaccaactcacctactcaacacatattgactactcacccaatgttattattttgtctatgcttgtctgaatcatttaacatatatttaacaccctaaatgacttcaaatgaaagtattatcaactaaatagttatagatctcattgtgttttataacttttacatagaaaatatcttcatccgatgttgtttgaagaattcaaaatttcatttttcaaaatagatttcactttataacatgtattttgaacatgtaaactttgtcaaatgaaaatattttcaattataatgttgtagatctggttgagttctataactttgatatggggcatgtatccatccatgtcatttgaaaaatactcaaaaaaaaatttttaaacgtaagatctcatcacttgtaatgcatgttcggcgatgtaaacgatctctaatagaaatattgttagttataaagttgtggatatcattgagagctacaacttttatataggacatgtctcaatccgaggtgttttgtaaaatttaaaaatttgaattttcactcatcactgacgggtcataactaccacccgtcagagataacgttatatgtgacgtgtgttagttaaagacccgtcagagatgagtggtctcttttgtgatggttcataatactacacctgtcacagatggcatatcatccgtgacaagccatggttttctatgacgggttacaagtgtaagccatcacagatgacttcacatctgtgacaggtcctccatagtagccatatattgaagaggatatttttttggcccatcagagatgactcatctttgacgagttgcgttggcctgttacagataacccgtcactgaagcccggatttttagtagtgcttgtagctagacacccatttttaacatgcatgcatgtattatcccattatagctggccatattttcccacacaagaactttttgttggattttgtcggctataaaaattatatctgccaaacttcatgcttccaagatagactttacaaaatgattgatcgaagcaaacgccatgcaaaaatttcgtcaaattaaaacaaattaaacagaatacaaataccatgcgtttgaattattagagcacatcgtcaacattgcaatcattaaatattcaaaatagagcatatatatagaatcttctttggaaggcaacattgtagacacctctctttcactcggcgacctatagttgaacgagtctgcacatgtaaacgtaggaacatgtatgttgacacgtacgattaaatatttggccaacaatctctttcatggaactagtgttaattagtgcaccctgcattaatgacatgtgtatgtatatactaaatctatccatgtgcgtgcgtggtgcacgacagcacacacagccacaaaccaagtataatgataaaattagataataaatcgcgtacttagttctccattaaatttatatctctaattaagcacgtacttagttgccctttaaatttagtttcccacaggaagacggacacacacaagtgccaaaaggtagcttaggattgtgatgcacatccaaccatattaaggctaatagctagcatacttgtgtttcgatggagacaatcttgaaaagactagtaactgtttccctccgttataaatatgtatgctcacaaaatgaacacattaattagcccattaaaattaagttgagagaagtaatcatttaagcatatacttcctccatctcaaaatacaaggcacaaccattttttttctatacaagacgtgcatgcatgcatacattaactattacttcttggttttttaaatttgggttattttaatttctctaccattaagtcacccaatcacattgtttgcatgtatggatgtggttcaattgatgaggtgattaaattctttcttagtttttgtgtcacgagtggctgagccttatattttgggatgaagtaagtaaatacttttagtgcatagtacttccgcttcaatcaacacacgttgtagattgcatttgcaattaacacgactctgattaaggtgagtagaagtgatattttaggatcgaacaacaataactaagcctatcaaagagggtgaatggtagctacactaaaaaaaatttttagtagaattaaaatttaccccaatcgatagagatcggtctgaccggcttgattgccccggtctaaccgttagtccatcttggagaatagcgtctgtcgggccggcgaggatggcgggattccttaccgttgtctgagcccttgtggtggcgccgtggcaacaaagtggtgacgcggggaaaagcggcggtttcaccggctaggagaggagggggaaggcgtgcgacggccggtgatgggcacggtggcccggccatggtggcgcggcgcctggtagcggcgttgccgctttgccccccggggaaaagggagatggagccgggctcgggaggaggagtgttagacttctccttccgctagcctgggagaggaggaaagaaaaaaaaattgggctgttagggaggcaaagtggactttttccagagagggtgaatttggtcgaggaggctgagtttaggggaggtaaacatagttttatagagtaaaacatatttcacaaaggaacaatctttttaaaataagcttttcgagaataaatgaattttaggtttttaacaaggacatggcactggaataggaagaaaatttcgaattggcaaatccagcatgatgcaaatttttcgcaaagtttttggggatgagtttttgagttctcggattttatttgcgaatttttcaggatgttacagttaggtactcctaccaatgttgaacgttttgctagcacagtactactagcagtactcaaatgatttggttgtcaatattctgcaaacacaacagatgaaactgtagagatagttgcaatcttcagatcatcctgcagcatgatatgatatacagtatatgacccacccaatttaaggcacatacattcagttctttttttccaatggatcacatctttgttgacgatcagttcacaaactagtcacaatcacatcgttattacttctgcttcttcaagcattcatgtaacatcaaaacataacacacatcgtctcaatcgccttgtgaaaagtacaagaaatttactatcttttcaacacactgaagctcagttaattaacaaccctgcagttcttgcgaatctggccgtcgtcaccggtgagtgggctgatgttgcccatcttcaccatggatctgccaaaatcccagaagaacttgtgggcatctgcgctgtaagtctccaccagctccttggtgttggcgatgccgtcgtcgctggagaagaggccctggtcggaggacaggaggcctttctgattgaggaggttctggtagtagcggttgtcgaaaacgtaggcggaggtgatgtccagcacggtggtctcgttgccgtctccaccggcacagaggctctggaggttggcggccatggtggcgtccagcgtcgggtcggctgagcttgaggtggtcgacaaccggttgctgaacagcgtgcaccgggctcgtccgatcgtgtgccctcctattgatgatcaatgagtttcagatttccagatcatttaaaagtttatgaaatcttgaaatgtgcaacagatcattttataattgatcaaatattatctctgacggtttccaagtttttactgtagacagtatgaaaattcggaactgacagagagcatatgttccctgaaacatgggctgccactgtacagtttcaggaagtactacagtgtaggaagaggttatcttagcatataaaccagattctgaaccattcgtgcaccatgagatggattgatcactagtgtgctacctgataggacgacaacatcggttgtgtcgaggccgacatcattgaacttctgtatgatcgatttgatgggttcgaacggtgaagggaggccgttgtcagctcctgattgatttgcgacaagaccatcccttctaccgagaagaacgtcatagtaagggcctccactctgaacaaatgatgaaattttagcatacttgagattttcaaacaaagatgtacagtatcagaaagtgaaacaacaaggacaatgggtagacgtagactgaacatacaaatagtactccatagccagctgcaagggctacaatgtcggcgcaggaaacaacttcagggcagatgttctcgagatcttcctttatcgcgtcaatgacttcgaaccctctgacagagttcttgttgggaagtgcaaatttctcgccgtcgtcaccgtccagaaggatggaaccgtcacacccctgaaatgcacaacaaattttcagtaattgtgacacaactagtcaatttaatatgtatgtagaacattcagataaagttcagagatgtgtgaaaagggtagttaatgtatacattgacaaagcagtcatggaaatggagccttaggagggaggcacccatcctcatctcagtcctcatggcagcataaacatgctgctggacaacggtgtacacatcaggacatatgtagtcgtagaaatcgtcggataactggcatctcgcaccccgagtattaaggcacagtacaagaacagagcatacaagcatgaacctgtagctgtaagagtactccatctctcacagaagttactgccctgctcttgtgctggttgcacagtccatgttttcttgccatgttcttataggcggttaaagcgatagatcgatgaattatactatttccgataggcgaagtcggcatgatagtgggcggctgcgcatgcactggtctgatgctgctaactagttttctatccagatattccactttctgaaaatggctactggagcctggttctcctttctgctctgcaatggtgaagtcactaactagtgtaatggagctgcacttagcatccttgcttcctagtgctaaccagctttttgtatcaaatccaaagtggtagtgggtgttccaaccagctgagaaggaattttaacgtatcgatcgcagtttcgtgtttgatttgggtattgcagatgtctgaagcatgataagataagtggattgttcacttgttcagttaagtagtggcaacggtggcatgtttgcaatgtggggaaattcatctggcctatcaaaagattcagatgaggcttaaagtgcattggtgctgcatacgagttgtctctgcattaccaattgagtccagtgcaatgatgtaatcatgcattaattcatgcagataaagcttcttcagagtcaaactgattttttttagataatggattaaactggcctctacacccagaaaaggatgtacacagcccaaatgccatcctaatcaataagcactacagcgaatgactgattgattcaaatccatgaccgagcagaaactcaaatttatctcctttgctgaaaggtacaggttttcttgtacacgctcgtactgaaaaataaaagtagcaaacaatagatcaactctttcacttgtttacaatagaaccaaactgaactaacaattttgtcttcaaatctttacataatggaagaatctattactcttcaaattaatggcatcctaatcgaaaagcattacagagaaatgattgatcgagagtcatgtgagataagaaattcggatgcacgttggtttagtttcttttctttatttacatgttatctgtcttgcaattttgccggttttgctacagtcaacgtggtcgccatttgagctgtaattctttactcccagtgaattcacagagctcttgatttctattccaaaaataacaatgagaaaacataaattttcccgtgtacagaaactaaagaacacatgagctgattacaatttacagattcacaattcgatcagcaattctcaattaattgattgaatccttgtacttgtatcgctttgcgcagcagatgaacacgacgaggttgatcgagctgaggccggcgacgagccagaagaagcggtcgaggtggccgtcgtcgatgtcgtcggcgatccaccccggcgagccgcccctcgcggtggcatgggacacgacggtgacgacgacggagctgaggtagctgccgagcgagcacgtcatgtggccgagcgccgagcagaggctcctcatggagtccggcgcctggttgtagaagaactccagctgcccgatgtgggccaacaccgcgctggcgccgagcagcacgtattgcggcacctgccacgcgatgctcacctcgccggcggccgccagtcgcctgccctcgacggtcgccgcggcggccatggcggcgacggatagcgccatgccggcgccgatgcgctgcagctcggtcagccccctctcgctgccggtgagccgccgcgccgcgggcaccaccgcggcgtcgtagagcggcacgaggacgagcatggcagcggcgtagacggagttgagcgacgccgccgggacggcgaacgcgaccccgaggcggcggcgcatggcgcggccctgcaccgggaagagcggctgctggacgagcaccatgcagtagacgatcccggtggcccacaccggcagcatccgcacgatcgccttcagctcctccacctgcgtcaccgtgcacagcctccacggctgcgccgccgccgacgacggcaccgccaccgccaccgccgccttgtccaagaaactgaactggtcggtgtgcgccatcctccgcccctcctctgccggaccatcgtagaggacgaagccgtcgtgaggcagcacgacgttcctcttcctgacggcggcgacgacgacctggcaagctcggaccacctggctgccacgaggctggtggtacctgtacatggcggagccgaggaggaagctggccatggcgaggacggtgcagagggccgggacgccgaagccgaggagccagccgaagttgtcctgcagccacaccacggcggagccggagacgagggcgccgacgtacatggcgaagtagaaccagttgaagtaggagctcttcttgggcctctccatggcgtcgccgccgtcgaactggtcggcgccgaatggccccacgcaggacttgatgcagccggcgccgatggccatgaggtacagccccagggagaagacggccggctgggtgctccggctgatgaccgccggcgacgcccccgacagcgccatcgttcccatcccctgcaatcagtgcatcgatgatcgatcacaagagaagatttcaaattcgtttgaaatttgtcagaaatcattggtcaatctctttttgttgccgtaacaaaaaattgtttaatccattgccggttatcaaaatgcctagtaagttgctacagtattatcgaaatcggtagtgggtttttttattctactctggatagcatagttattatagacttactttggttatagaatctatatgtcatttctattcaatacttcgacttatttttattgtagtatctatgtgatttctattcgatacttcagatatccaccattatattatgagggagatgaatcccataacttcaatttgagcttaacttttagaactcatctttgtgaaacattttcataattaatattttagaatgaacaattagcattgcaaatcatttatttgatgaaaattagtgtggacgttggtataagtgcatgtcactagtgtaggccatgttgcggtatttgtgccctgaaacgattgttttgtctgattgtgtggaggtgatttgagatcaaaccttaattgatggcaagaaccgggactacgctgcaggaggacccgaggcttagcatggtctacatgtcatgtaacaagatcgtactagagtcaggattcttgaggtcaacatcagtcataggtaggattattggaagtaaacttaggaagcaatggaggtcgtgatgagattggataaggtgtcacatggtgaatggacaccgtgcgagaagtctttgtaaatggcttttgcatgtcgtgcggtgtaagtgcatgtggttgcggagaatgttggaagaaagaagggcatccagttgcatggcagctacagtaaatggagtactgtagctaaatatacatactctctctaatattataagttgtttgacttttttctagtcaaattttgttatgttttaccaagtttatataaaaatttaataacatataaaatatcaaattagtttcattaaatttaaccttgaatatattttgataatatgtttgttttgtattgaaaatactactatatttttcaataaatttggtcaggaaaaatttctatcaacttataatataaaacggagagagtacgtaatgtggatggatggcatggtacattttttgggagagcaaattaagatgtgaactattgtcattgttaaagaaagttgtgtgaaatcaacaagaatgattaaatcaagcttacgatgatgtagatggagaagaaggcgaggatggtgcggtatcggccgaggcaggagtcggcgacgatggcaccggcgaggggagcgatgtagcaggtgccctgccacatgctgaagttcctggctgcttctgcatttccctgccgcaattgcgtcgtcaggaatgtcaccaggctgtactgcaccccgaagaacgccaactgccccaagcattccgtccctgatgaattcatatttcacaacaaaccgaatttcaatatgcaacttattacatgaacctgcagatcgatgcaactggtataagacaggttgaaatgggaatagaagataaggaaaattggtgaaaaccatgtagcatctgtaagaattcagaacatggagaaactgaacaggcagcatggccggatccgtactaccaatttcaagaaactaagtgagctaaatggtatatttcaaaatgccattttttttattttaatagcacaagtatcatttttttttcatgtaaggtgttgtatgtttaccaagaacgaaagcacatgccctccagcaaccagtagagtgtttggatgcaggattccctttgacatcaacagatccatctcctgtgtgctggcttagtttaccctgcagcaactgaacaattgttacctacgtgccactctgtaaattcttcatgtctgttcatccctagctgtcactatatagtagcatccatatcagtaaatttatatatatatatatttcaagaatttttctacaacaaaataaaataaactgttggggcacaaacatatcttctttctttgttttttttttgacaggagagaaaagcactgaactcaacgtaaccatgaacacaactttgtgacagtttggacttgggatccattctccttggaaaaaaaaaggataagtagggccgtttttaattcatacaaaaattactatgccctaccattttttttaaaaaaagaggaaatgtggtagcttcaattgaagccaaataatgtggtaccagtttcttcaccgtagtattaatatttgacttcattattgatctaactttacctacccaaaatttgtcactaccaaaaatttctggtagggctttaaaaccaaaatggcccgtcataattacttcaacatattcctcattttttgatgtgtattattccttttcacgagcataggtaaatttgtagcataccaataatattctttttagagtatttattttttattacacggtgacatatagggaagaaaacggtcagaaaatagcctcaaccatttcaataactttttttctttctgtacaacatagtcaaaaacagtaaaaattagaaatgagaacggtatctagaatatcaaaaaaatcagaaacgaacgaggacagggataaatcccaaacctcactgaattactgttgggagcacagatatatgtgtataatatttatggacaccttgattgacacgtgactttgccgtcattctactatttctttacattttcttcctcaagaactgtaaaagctgaactcaaatactctgaattacaatttgaattgtgcaggtagatttattttttcgtaaacgtgggaaaagaaaggaattaaccacatttctttggcacaaagaaatttatgttaagtgaaaagtcatctgaatattttttggaaataaaataggaaaagtgaaataaaaagaacagtgtagaaagagaagttgttcattagaaagcagaagcaggcagtcacctcattgttaagccctgcttcatctgccaaagcacccggtttgtttgtgtccatgtgtcttatcaagtgctgtatgaatgttgtctgtaaatgcacaatgcaacacaagcacacatgatgcatccatatatatactcaataatatataagcaagagaccataaaaaaaacaatgctattaagtctataaccaagagtaatgactctttccaaaaataaacaagaatgatgttgtacaggaggttacagcttcgaaggatcatgctaatgatcctcatgattgatcacctgaggacctgaaacacacgagatcgaattattgggttatttatgatactattagacttgttcacctcataattttttttctgatggaattgttcacctcatcattgatcacatagttaattaagctacacgtattgagatattcttgatcgagcttgttacaaccttgcagttttaagtagtgttcgaactgaattatgcaatatccttatcccaatcaagattttccttccccatggagaaaagtagcaaaaaatattgcagaaaacttcttgttgctgatgacataaacatatatgcaattgcaaaggctttcatctagaagatttaaccaacttgaggatatgtctgtctcaaaatgtgttgtgttgcagcactcgatattttggagacgacgaccctgtgataaagttaaacacaggttgtttcatcgtgttgcacttggcataatatcttgaacacatgcatacagcaagtaatgtttagttattgagtaattttattgtactttaggtattatgagataccaaaattttacacgaaattcagtgcctttcattacttttttttctcgaacgcgcaaaaggattgcacgtcaatatattagaagaaaagaatgtttgttacacgacgcaatgagtcagaccgacttatgccaagaaaggggagaaaaaaaagactaaaataaagaagagacgaaagactactgtgacagctacacacaactccaaatagctgggagggggcagagccactaccttcccaatagaaccccaaaattagtgataccagctaaagatcaaaggtggccctcagagaggatagactcaaggacctccgagaccgatgacaatgcagagtcaaaaactctagagttccgctctttccacagttgccaagagactaggaggaccatagaatcgaaactggcccggagatgccccggcaagccaaccctagaagaaggccaccaatcttggagacagctacctcggggaggagagagggtagtccaaccaagaggcgacagcacacggagccaaacttgccgagcgaagatgcaatcgaggaggatgtggttcgctgtctcaagctcttgaccacagaaggggctggccgaatgactatccaagccacgctttaggaggaggtcggccgtccagcagcgccgctgaaatgcaaaccagaggaagaacttgcatttagcagggcccttcgcgtgccagagaagatcggcacaggcaaaggagtgctggccaaaaaagaaggcctggtacgctgaacgcgcagagtagcgctggtcgctcgtccaacaccaaacaagacggtctctgacacccggcgagagctgaattcgaagcgcagcatcccaaataagaagaactgggagatgacagggacagtgagggccccgcggatgtccgaaacccaggagttgttcgccaggccagaagcaaccgtgcgcgaacggaggcgctgtggcacagcgaagaggaggtcaggagccaaggaggccactgagcggcctccatcaatccaatggtcagtctagaagagcatagattcaccattccccggcatgaagaaggtggacgcctcgaacatgtcggagacagactgctcgaccggggccttcaagccatcccaatagagatgcccggaacgctaaagccaaagccagcgaacgcgcagggcgaaccctgccaacctgaggttaggaattcctaacccaccgaaggccttaggacgacagacattcgtccaggacacctggcactgtcccccatgaaccgcatctgtacccgtccacaagaagacgcgtcgcttcttgtcaatagccttaacaacccaggcaggaaggccgattgccatagacacatggactggtatggaggagagaacagactggaccagcacagagccaccagcaagagtggtgagacgccccttcgaaggtggtaggcgatgagcgaccctgtccaccagtggctgaagagccgcctttggcaacttgcgaacggacagcggaatgccgaggtaggtgcaaggaaaatcagaaatcgagcaggggaagcaagagtgaaccagctccaggtcctcatccgagcagcggatcggagtaatcgagcatttggcaaaattggtgcgcagcccggatgccgcaccaaagaccgagagaatgccctggatgaactcgagatcctgccgaaccggggagaggaagaggaccaagtcatcagcgtagagggaggcgcggtgtctcaaagcgcgatcattaagcggatcatgaaatttgtcttatagttgtttcatctagtaagatcaaatcaaagaaactagcacaatgtttcttaatcatgttattcagaaacaatgagaaatattgaagggcattggaaaaatgttatttagtactcctttgaattgaaggggttctttgtttggattgaacggtttttggaggataattggatgattccatttcctatagaatttgccactattgattcatttggaattaatgaaggaatggggcatagaaaaagtggaggaaatctatctttgccatcgattccatagaaaattcataggaattttatatccattgggacctcttttattgatttcctttgagaagcccaggacaaatcaatgtttgcacctccaaatgaacatagtttagacacatcttgaacatataaaatatatattatgcacagttagcaggaattgataagtattaattgtttgttcggccagattatgttggactaattggggtaattaagtagaacaagtggattatgttatagcactgttttcatgggtaaatatattctcccgcatcaattagctaagatgatatctcttttagataatgagctaattaagaggatctgaccggaaaaaaaaacagttgaattaaaaactctaagcctagttgttccgtgtataaatatatgcatgaactggtcatttgagtatcatatatatagagcacgatttaattaatcacgttaaatatcgggtcgtgttttttatgcgtgttgtcttctaattttgtcacattaagcagctgggctatcattattctattttttctttcctttttccacaaaatgaggaaaaggatgaaatatacaatccattgatcaagcaaggacgcatttgcaaacgaccatgcctacaatctacaaagatcatataaagccagaaggtttcatcgtgtttatctatcttgcacatgtgaatccaaaatttggaataattcagaatgcagaatatggagataccctcataatagatgttgaaatatcttttcgcatgatttactctttcaattccgtccacttttactaacctagctagacttattctaatttcagataatcaaactttatacagtttgccaataattatatgtatagtagtatttagtacctacaagctataccaaattaataatagatcatatatctgattcacacaaactatatatactgaatttatcgtactctaagatacatattgcaaatcagaaatcacccatctgagcagttctttacatttttctcttttccaaaatatctttgcatattccaaagggtcatgaatttagtgcaaaacccaaaagaaccatctagtttgaaaataataagatataaacactgatacgtttgttttgcctttacggtagtctttgttggtagtagaagccaacctagacattcatcttctctaatctaatggattgtatatatttataacgggaaggctaaatggctgtcgaatgatttttgatagctaaatcattcatgttttaatatattcagaaccgttgtttcatatgttgtagtaaaatattacatgaggtgatttgattgtgtttcagtcttttaaaagattgaaacattttcgatctacttggtaaaacaacgctcgattggcttcgaaatttgcatgatggaagcctaaaaaatcatgcgaatcccatataaactttttctcgatgtactcggatttgtttcatgttttaatatatttagaaccatagtttcatatgttatgttgtagcaaaaagtttcatggggtgatttgattgtgttccagctttttaaaaagattgaaacattttcaatctacttggtgaaacattttcgctctacttgatgaaacactgcatgatggaagcctaaaaaatcatgtgaatcccatatagacagctatttataacgcacattacaattacaagaactaaatggggtttatgcagatttttgctaaccatagatgaaggtttaggaataggtcatcatttgtgcctgtaggctggtgtaggctggtgtttcagttagttctcttgttttccatcaaattgcgttgtgcaattcacaatcgttttaatgcaaacttcgtaataatttggttgtaacttattcagagcaaagactggaatggttcttccattatctaaaatgtagaattcataaatcaacaattaggatcacttttactagtgataataagcaaaggtacatgaaattggttttttagaatattacagaaattagaaaatggcaaagtatttattgttgtcctgctgttaattaaaaaaccgacgtttaaacatctaaaaaaacctccgatgaggtttacacatatcacaaatagcacatttataattgattcaaccctacactacataggcacttccaaggcaattttattactaggactaattaattaattagctgaaaacacacatacacaaaaagaaataaaaagtcaagtggtaggcagcttgcgtttgtaggtggcagcgcagcagacgaaggcgatgaggttgatgagctgcaacgccgccatcaaccagaagaatcgatcgagatgtccctcgttcagattctccgggatccatccgccatggccgccgccgccgccggtgacggagctgatgatggtgagcatggcggagaggaggtagctcccgggggtgaccatgatgagcgagcacgcctggcacaagctcctcatggcgtcggggctctgctcgtacgcgaactcgatgtacccaacgacgccgaacaccttcgccaccccgacgagcacgtactgcggcgcctgccacaggatgctcaccgccggagcatccgcctccacgctgcggaggcgcgccgtctcaacggccgcggcggcggcgagcgcgagaacggcgaagaccattccgacgccgatgcggtgcagctcggagaggccgcgcttgacgccggtgagcctgctcaccgccggcatgaggaccctgtcgtatgtcggcgcgaggacgaggatgcagacgcaggtgaaggtcgtcagcgacgccggtggcaaggcgaaggcggcggcgacgtggttgtccatggcgcctccctgctcgacgaacagcgggaagcaggcctcggcggtgttgaagattactccggtgaggaagatggggagcatcctcgcaaagatcttgagctcctccacctgcgtcaccgtgcacagcttccatggacgactagctgatgcttcatcggatgcagtgatagtggcagctcggtcaaagaacctaattgcaacaattagtgataaaaattcatcaaatttgatcttgtgttttcagttcactgaacaactcaatataggtacggtgaagattaataagtgatcaccatctgtaattttgtaagctgaaagtatgacttttagcaggattctacatttcggatttaaatttccagtttccatgctattgcattctaagatttagaaaattttgtcgaaattttgttaaacgacacctgccgttagcccgttacggcagatgatgcataatgaattgagatcagaaattgatcagaattggcagaatttagtttacctgagtccatcagtgtgcatcagcttcctgctgccaacaatggcagactccttccctggcatctcatagagcagagagctgtcacttggcacgtccacgtggaccttgcgaaacgccgccacgacaacctggcagatcctagtaagcgcgctaccgccgggtttctggtacctgtaaaacctcatactcgcaaggaatccgacaacgccgatgaccgagaacagtgtagggatcccaaaacccagtccccaaccacagttatcctgaacccacactataaccgtgctcgcgacgaagaacccgccattgacagcgaagtagtaccagttgtagaagagctccttctgcgccttctctgaaacgtcggtgtcgtcgaactgatcggctccgaatgtcggcacacatggccatatgccacccaagcccagagctgtcatgtagaggccaagagaggacaatgcctcctgaggaaaggttgccattgatctgtgcatgtttggtggaaccactgctgaaagtgtgagtagaaccattccctgaaaatgtacagtacataacacaaatgttcagacaacttaactgatattcagacaactttgctcgtattcagaaaaatatgaaaatgttgtgatctcttacaaaggtaaaggtggtcagggagacgacgattgtgcggtgccttccccaataggagtctgcgaggaacgcgccgagtattgtggtgaggtagcagttaccctgccaagcagcgatgttgctagcagcagtgacattgctctgtccctgtaccttggtcaggtagctcaccaggttggtccctactgcgtagtacgccaatgcgccgcaaaattcgccacctacatacaccgtgccaagaacatgttcttcactagttcaaaatgaacactgaaatgtgattgatgaacactgagatgttgggcagtgtgtgttattcaacctagaatagagtagcatgccttccatttcccagtgtgtgttttagatgctggattgcctttgacatcaactgatccattgcctgtgtatggaccttcctcctgcaaccaagcacaagcatttgattactcctacatttgattgttaggacacctcatcagatgagcaaaagagatcatagaatgaaaagaagttgcaatggtgaatttctccaggcaaatcaaggaaatcaaagaaaatgttagcaaccggctggcagccaaactccccgtccatccactgccgctgctcctcatttgccatgctctgctcgatcgccggcgacgaagcggacagtaagttttaaggagctcccacgatagcattaacaagaagcacttgccatgtcatttggcacggaaattcgtatcgttagaatataaaaagcaaactgcttgtgcgacacgatcgacagttgcagcctttgcagcagagattaaggttgattaagtacacttaataggtcgcgtgaaggttattgaagtgtaatgagtcatcgtactcaactttcagcacgccgactttcagggatcctagcaacttttgtgtcgaagtagttggacggcccgcgcaattgcgcggctagcatcaatgtaaaattatatatttttacacatgattttatttaaaattattatccccgtgactctaataattttatagtttttaaaagctatggcagtcgctaccccttacttctttggcacatttttatttgcttacccgatttaccactacttctattaatcctttttagaactttaaaaattaggccatatagtttttagagttcagtgtcttgttgggtttcgttttcataatttttagaagtatcgtcaaacatcgccaatttactattctatggcccgtctgctgacacctctctttattgtcattgggattttaaaaatcgaacacaaatattgtttgtgttcttttttactttctataagtttcaccaaatcgttagtagcttcgccactatacttctctatatcctacccgctactttccctccttattgtcattgagattttaaaaatcgagcatgattatcaattggttttatttttactcttcataagtaccgccaaccgtcgtgaccatgttgcttaacggcacacccatcgtcatttctcttaatcattattggggttctatttggggttttgtttataggttttagatatcccatcaaccgccagcactctactcctttacaagcctattgcttctcccctctttattgtcatttgttatcgttctgttctagatggactgttttttttaaacaaaattgcatatttttcattccgataatttttatttataaattatattcctacttaaactcttataattatttttctatttttgaaatatattttatttgttattttgaactttaattcatctcgccatgtgttccagattgccgcttatttcaatagtcattacgtttttattaaaacttctagttatttataaattatattctaattgagctcttatttttctttttctatcttttgaatttatttttattttatattttaattaatctcgtattgtgttctatatatactatttttaatattttttaatttttattttcaatttcaattgtttcaaaattttattcctacttgaactatctttttaatttttatttttctaattttgaattttatttgattttttattttgaattttatttaatatggtattggttttttatatggactattctttcaatatttacttatttttaatttcgaattttagttattttcaaattgtattcctacatgaactcttctctttttttctaacttcagatttaattttatttttattccgaattataatttatctcgtattgggttcttatatggattcttctttcaatattccttatttttaatttcgaatttcagtttatttttaaattgtattcctattggactcttctttttgttttctaatttcgaattttgttttatttttattccgaattttaattaatctcgtattgggttcttatatggactcttctttcactattccttatttttaattccgaatttcagctatttttaaattgtatttctacttggaatctctttttctttttctccgattaatgtgggaatttttagcccccactgcgaacgtggtgtctcttttcaaatatgttttaataatataatagatagagagatatatagatggcataaatactggctttggatctaggcagatcacattagctttcttcagtgttgtgtttcctgggctcttctgaagtcaaatcgttagtacaaatcgatatttattgattcctaattttcaaaattattaaattgacagaaagtaacgaagacttttaactctgaggtagggtttgttattccagttcaaaattttagtaatttcagaccccaccggcaaacttaaatatcccccaaaaatttcagattttttcaaatatttatgaatttgatcaaaagttattcattaaaaatacatgttaaaatttcaaataattgcgtgcaaagaaataccaaaactcctaagtagattgttttttttcgttagccttaaaacgataaattctatatttaactttcaacgtaatgtagttaatatctataatactaatgaaagagtaaagtgcacaagcgatgcaactcacatgttggcagttagtggaagctagtaatacttaagtggcaaaccgatggttgcaagggccatggaacaacaaacgtgaacttggtatcttccatggctctcttcgtccttagttcagacctcaactgattttctattcatgtatcccgcccaaggttcacaattctgacgaaaaccggtcgaattccataaaatttcgaagcttcgacaaggctcgaaagtaaaagccgtatgagatttcgatgagtttcatcgaaattcaaatttgaattgataaaaaaggaaaaaaacaaataaaatcttataaatagtatgatattcatagaacctattgggatataaatttttaaaaaaattgatttattccgtgtatttactgaaatttacactgggaaagaaaagaataacgaattaaaaaaaggaaaaaaaattcagtttacctcttttctagttaacgattgaaatttcgatgatttcgctcggaatttcaccaaagccgactggttttcatgagcttatcggtaaattcaagaaatttgtattcaaattttggtttataaaatttgttcggaatctaccgactttccaccggattttgcgaaaactgtcgttccgctagggatgggtcatgatttcatttggcccgtccaaataaggcctgagttacattgaacgatttggagcaataggttgttctggcccaacaaaaatataggaatactatcaattattggcatgtaataaaagacatgccaatacagtgcagtagtctatataaatgtgttcttcaaaaaattattataaactttgaaaatgccaacaaatatgtttttttatacataaaggagttttgtttattccggaatgccagcatatatcgatagcacatataagctcgcagctttaattctgcgtctgctccaaatttttcttagcatgaatcagtacataccataaataatttgaaactttctgtataaacgtgtgagttataatattctgaaatacaaacataaaaaatcagaatataagccaaaaacaaggttttaaaataatgttccggaccatcacatcgatcctaggaaagtaggaatgagttataaaaacgaacggctgcccttgcccttcccaaaagtacaaaaccatcctttcattctcttgtttttttgttaaaaacaactagatctgccaagaaaaaggaaatcaaagaaaaatctcaccaacaaagttcaactttctcatatgaaatataaatcaatgcatgcaactgaggaggtatgtttaaccatccgtctcaattctcaaacaaacaaacgattttttttaccctcgcccagaagaaaagtagaaaactaagatgaaagcagagacatgcatgaaaggttagcaatggttacctgcagagaaggtgtgccattgaggagaggaagaagaggtagtttggcgtcagtaatggagccttccattgtgccgaccctgctgtggctattttcctcttgtccaacaactctgcctcacaagcttacagtcctgagaatcgtggatatatataagcaattctcattgtaaaggtaagattaattagaggagcaaataatggaagcacctgaagaagaagaagaagaagcctcaaaagaaggacatgaaagaacgagggccatgccttttgtcattcttttgctgtataattaaagcgagtagggcaatgactgactagagccttccatgtcagtgtctccttaaaaatgtggaggcttggtactgtttggtgatcagaaatctgtgaccagagaggaaacagatcaataaagatgtggttggtaaatatttattctatggaaatcatagatgatgtgctatttgttatttttaatttttagatgaactagtctttcgaaaatttttagatgaactataaaaacttgtggtcccctatatggatggatactcatacagtacatattgtaacgaaatatttatatatttataaggtgttgtgtgcttccaattaaacaaggtagttgccaaaatatttatgaattagtactatcaatgtatgtcctggattggaccaatatggccgtgtttagttcgtgtaccaaattttttttaagtatatgaatacacatttgaagtattaaacgtagattaataagaaaataaattacagatttcgcctgtaaaccgcgagacgaatttattaagcctaattaacctgtcattagtaaatgtttactgtagcattacagtgtcaaattatggtgtaattaggctcaaaagattcgtctcacgatttacatgcaaactgtgcaattggttttttttatattcacatttaatgctccatatatgtgttcaaatttttaatgtgatggaaaagttagcagtttgaagaaaaaatttgaatctgaacacggcaatctcaagttgttccaagattagccatacgatccgtaagctattgaatattgagtcttcgagtcattataataatatagtagtactccattagagtccccgcacccatccgttcagaaataattaatgcgatcaataatgtacggaaccaatactcataagtcacaattaatggcctaatgaccatcttgttggccccatgcccagacactttcaggatgcttaattaaacaacactgctctacttgtgttctgattggttaagctatgtttgataaagtgataaaaatcttttatacgtgtgttattagtattttagaagttaacgtaggatcgaatcacaagaactaagccaatcagagggggtgaaaagttagtatacccaaaaaccgaaaacttttaacggaaataaaagttaccatcgaattcgacggagatcggtctgaccggagttgtcctgccggtctgaccgctcagatgccgtcggtctgaccggttgaggtatagatcaaccggtctgaccgccgaagctgctcgccgcgcctgtctccgccgccggtctgaccgccgtgcttccgtcggtctgaccgccgcttgccgccggtctgaccgccggtagatcgccggttagaccgccgaaacccggtaaacacaaatcgaagaactcttaaagtagatgacgactttattgattctctctctgtttacaaagtgcaccaacagcactccttacaaaaaatttcgactaaactcgaaaccctaactcaaaactcaactcaatgctctcaaaagcgataccgggaagcctcacgctccccctctatttatacccgaggtaggcagcctaaagccacaaaccaaactcatactaggagttctaaacaccttaggaaaccctctagtacaagaaagaaactttacataaccaatcgtaccaaatttggactccttccaaattcgactctgcatcccacacgcacacaataactccatcgtatgccatatggaatctccatcaaccacgtgcatcaactctagcctaagtatcccgcatgatctccgaccaccacggacgtcgccttatccccaagccgactcccggtccatctccgcaaatactctcccgagacatcgagtcacctacacatggaacaaacaaagaaaccatattccgagactaagctatctccaacttgactcattagtagcaaacaacagtattacatacgtatagtatccatctagaagtcataatcatgaaataatcacggatatcgaaacaaacaacccgaaaccgaaactgacacagtatcggacggtcagaccgcgggctggccggtctgaccgcgcgcataccgccggtccgactggctaccagagcctggtctgaccggtcacatgaaataacaaatcctatgatcacctgtgaaatccaatcatctccaaaaccacttcgtgaataaattccaaataacaaaaccaataatctccgatgcccaattgttcatcacagaataataatcaaaaacacctttgattttacaatctcccccttgatgaacacattgtcaaacccataaaaaatgttttggtttttggaaaaaaaataaaaacaaaggtggtaaaagcacacttcgtacaaacgtacacatcgtgctcgaaaatccaaaagaaaacttctccccctttttaaacatgctcttctcaacaactcttcaaaaattcaccttgcttctccaaaaataactctctaaaaattcaccttgcttctccaaaaatccaaaaaatttcacattacttctcccccttttgacaatgatttcatcaagcataggaattatattcattaatgttcaagagcttagcatacatatagcatatcatgtcatgtgttgcaataaaaagaagatgaacccatctataatataagaagcatgcattaaagtataaccatgaaccaaagattttacaattaagcttgaatcaacaaccaaaattcatgatttcatacaatttataatgcaacatcttaacaagcacataggttgaagaataaacactaaatacatatacctattgcatttatcactctttctcaaataaactttagcacaaaataaccaagagaatttttgaaccttttcttttcttgagcgtttttgctcatatttttctcttttattccgggtacgtccctgtcgtcaagactgtttccagggattcagcacccattattttgctcacatcgaatacgtccttgtcgtcaagactctttccaaggattcggtattcattttttttcatattttgtactctctttttcacaataagcaattaaagctatttgaggaataacaattcaataaagcatatatatagagcctttataaatcaaaccatatgctagcatcaacattgcatatttgcttaattcaagtatagaatttaagtgtcatgcatcatctcccttaaaaacaaaatctaaatctcatgaaaaaactagaatacatacaaactatactagagacaaataaatcttcaaagtattgctagcatgcacaagaaaataccatatgcataaacaaagctcccttttctcaattttcattgtcatattattgcttgataaaaccatgaggtacaaactccccctcaaaccgtgccaaaaggatgaattatgcccaattcaccacgaagaaaagcaaagcgattagaatccaaaggtttagtgaaaatattagcaatttgcaactttgtgtccaaaaactgcaattcaacatctcccttctcaacatgatccctcaaaaagtgaaaacgaatatcattgtgctttgtgcgtgagtgttgaacaagattcttagcaatattgatagcactagtattatcacaaaagagaggtactttctcaaaagtaagaccataatatttcaaagtagataaaagccaaagaatttgtgaacaacaactagcagcagcaacatattcagattcagcagttgattgagcaacactagattgtttcctagaagaccatgcaatcaatgatttaccaagaaaatgacatgttccactagtacttttcctatcaattctacaacctcgaaaatcagcatcagaatatccacttaagcatatagaagatgaagtagaataccaaattccaaactcaagtgtatgattcaaatacctcattattcgcttgaccgcttgacgatgtgaagcacgaggagaagcttgaaagcgtacacacaaacacacagcaaattgtatgcctggcctagaagcagttaaatacaacaaagatccaatcatacttctatattccttttgatcaacagcttcaccatcttcatcagaatccaacacaactgtagaaccaattggtgttgaaattggcttgcaattctccatctt

SEQ ID NO: 6169 - DNA, 6032 bp, Oryza sativa
aatcatgtcgtccaccggtcgatcgcatccatacacctcggtaactaggattcaatgaaacatatactccgatttttgattaagatatgtctcatcaaatttcaggtaattactccctcccaaaatataagtgtgtccagattcgtagcactaggaagtgtttcatccgtctaaaatcacttattttttaaggagggggtaagtatattttagataaagaaagtactctagtagtagttaattacgtgtacatgctattgtgtttgcttaccccccctattgtggttatctaaattacccccttaaactctaataccagacatttgataatctgaacttgtaaatccggacgaatcaccccctttacttaatccggaacggttttcagccaatatgacagcaggttctcaaacagcagcatatccatggattatggatagattgtggttcttgttaaaaaaacaaaaagctcttcaaatgttcagttacgctcattgagctgactgaaccaccatgcagttgtatgaaggtgtagattggcagatcaggacttcaggatgaacaagtatcttcctagtagttcttaaaacagttcagcaggggacagttgctttgccatttagagcacccatctgaaaacagaacggtgttcccacagcaccactgcaccagctcgtccaatgatccagtccatgtagcaacagaaaaattgttacaacttctaagtatccatgataggcataaaaccttaaagcttcagcttccctttatgccgcctgtgaagcttctgcttcttctaggcgcagcttctggtaatcgttagcatgcattatgtcctcatgattgattgcactctgagaaaagtagaaaaaaggtattcttttcagaaacaaaaattgacccaaattattcgtgttagagatcataatttattttcttacatgaatgccctgagcacaaaaaagactcttcaaaatgttggatacttcatccatgcctagaagagctcagctcagtctcagaggttgtcggcgcagccaaagctgcacatggctgatcttattgcttcatttggaatcccgatattgacatcttcagacaattggctgaaaatatttgatgtttcagttcaatcattattgtcatcgtcttgcagttcgaacaaatccttcacatctttggctttaaaaaaaatttcacctctgctaaatttttaagtttagtgagtagttgtgtcaactacccattttgttgtaccagaaccgacccaagcggctgtgggatgccaccactaggtttctagaactctttctcggccaatagtctgcgtatgcttttttgttgaatgcttcttgtgttgtatgcctttttgtttttgtttgataatgcttgtgcgagctacaatatggttatgaaatacattagatctattcacggggactactttctcatttgttttcctgtaaaatgctaattttgtagagaattactgttgaaaataaaactacatataagccaaaattcagtgaataaatgacaaagcattactatgctagcctagcagtaagggaatatcaaaacagcaatgtatctcctctccaaccctatcttaatgtttaagataattggctgaaaatattggatgtttcagtcaaacatttactgaaattattggatgatcagtctatatactatcacatctcctctcccatcatataataatgttttaagacattaagcttgtctctgcttaagacacggttttctgattattgtgtgcatggagtatgttgtatggaggagtgttacggagtaatcgaactattttgcaattggttgaattatcccatgagtagcaatgtcaacagggaaaaaaaatctaatctacaaatttcaaaaaagcaaagcgctaatgtctagcgctgcctccaaccgagagacccgactgtgtgcctctagggcatctttacttcttttttttttatggatgcagctgaccggcagggggtcgcctgccgtgcccccgtaagtagggggatcttttcactgctcctctttttttttttttgcagctggccggcagggggtcccctgccgtgccccgtataggggatctttacactgctcttttttttttgcggctgaacggtaggcgggtacacggccctaccgctgcccattgcagtcggggtgggtgcctctagggtggcgatggaatagaatcaaatcgagctaataaacaggtcgtgttgtctcagaatcggcgatatggtacaaaactaattgccggatggattcagtccgagccaaagaacagcgcgcatatcgacctaggagtagaggcagaagcatacctggtctccacggaagccggcggcgaagggcgccgtcgatctaagccggtgctgaatcttcgcgccgccgatgccggcatgccgcggagagtacatcggagatccagatcctcctggagttttgacggcgcgtccgcagccagctgctcgctgccggagccagaattggggaatcggcggcgtcgggggaggagaggaagcaacaaggtgaggggggagatcgagggttcccatcgactcaagtgtcgatgcaagccctatacgggctaggcttctctcttcaggcctgggcatcgagcccaagctgctgcaggcccagtccacgcctgtttttcttttctttttctttttttctaaaggatttttgtttgtgctcaaattggtaatgcggttgtttggttttatagcggttacaagttgaaataagtaagccaaggatattgatttgttcacgcagccatgtatcctgcccaaaagtttggcagaggacaacagagtttgccatttatagagtacccgtttgaagactttggcccttccctgtttgaagtttctggtggctaagaagggtctatttagattggtatcattttaaaccataccattatttaataaaataaacaaatatatagttgcatttagttagttatcaaatattagtaatgcataggaaattttggcacaacatatttattctcttctactaaaatttggcaatactgtcaacttgctaaaaatttggcaataaggtttattttggcagtaatctgaacatgcctctgcatcaggctattgagtgttgacttcaacctaagtttccaactcactttctcgttttctatgcacaaatttcccaaattgctaaacgtcttttttttgcaaaaaaaaatatagggaaattgtttaaaaaaatcatattaatccattttttgagtttctgatagctaatactccctcaccaaattgatcatcatataatggaatccaaaacttctcaaattgaacatcatataaccgcattaacatggatttcatcggaatacaattaatacaatatgggagaagtgtgtgcacgctacggtgtaattgacatgatgttttaatcgatacatgtattgtgggaggatgtgtgcatggtgtcttgattaatgtgattttcttggtcttagtgtataaatatatatgatgatcattttgagataaagagagtggttaactaatcaagcattagttcattgttctgttttgcgtgtgtaggagagtggttctaacttctccaagagaacccatcaagttcaagaacacagaggatggtaggtgcctcacagcagcacaaggtcttgcggtccatgtagcaacagaaaaactaccatgatttctgagcatccgtgattggcgccaagcttctgcttctagctgcagcttatgttcatcgtagcattcactatggcaacatgattgatcacaccgagataatcagaaaaaagaaaaggacatcattttgagcaataaaaaccgaggcaaattatttgccttagagatcatatattgttttgattccatgaattgcctgaccatcaaaaaggatcgtcaaaatgttggatccttcgtctatgaatggatgagctcggttcatattgaaccccggcattcgcatgttcagacaattggttgagaatattcgatgttttagttcaatcattatttccatcttcttgcagcgttaagaaatccttttacgtttctggcttaaaaatagggtctttcagtactatgtttctcctctatcggtacacctctaatttccctagttttccatgcgcattccctagcctactcaacagatgatttaatctggtatcgttattagatactacaaatgaaaatttgcagagaaaattactgctcactttatattttaatgtatgatgccgttaattttttaaccaacgtttgaccattcgttttattcaaaatttttgtgcaaatataaaattatttatgccatacttaaagaatatttcatgataaatcaagtcacaataaaataaattataataacataaattttttgaataagaaaaatagtcaaatatttataaaaagttaacggtgtcatacactaaaatacggaggggtactttacatttgggtatgatccaaaccattcatctgccagatcatctgtcactagcatccaatcgaaactcggcaaggtggttagaaaatttggcatcttcacagcgaaattgctggcagaaggttagcaacacagcaatgtatctgctcttacagtcttagagcaaggataataatagtagctataaacaaactatatgcttatgtgaaagagacaggtaaagagaagtagagagtgttggctctcatgcacgagttagctcaacacaagctgcaagaaatatgcattaaattcatagtgagagaacgagagaggatgacaaagataaaactaaccttgtagctaacataacatattatacatgttagctataatattgacttatgataagtagtgagctttattgcttttatatcatgtgcacgagtatcagagtatgttgaatgtgagtatcatggagtgcttgaactagttatccaaaggaaatttggaattggtagattaataaccaatgagttcaacaacaaaaaattcatcaacatatttttatccaaaggaaatttgaaccggtggattaggattagccaacgagtttaagaagaaaataactccatcttacaaatttggaattggtggagtaaccagttagatggtgtttgaatctcctaaagataaagattaagtttattttgcaaaacaaagtagtattaacgtatgattgattgagttgtaattattacaaacttgaaaaatagattaatatgatattttagagcaattttcatatagaaagtttttgcacgaaacgcaccgtttagcagtttgaaaagtgtgccacgaaaatcttaatcttcatctaactcttattgaataaaaagaacgggaccttaatgcaaccggaaaaaaaaaagaatttcatctcacaatttttttaaaagccaagcgctatgtacacccctagcgccctctgtagaaatatttttttttctttcgttgtattccatttcgttcatgccaccgattatttaggattttaggggagagagaacctgaagctgcatacgatagtttagatcagtaatcttttcaactaactcatggacagattacatctctgcaaacatgtttcttgttatttctaatcccagctctctccagatatatttaacatacttacatttgaaaaagaggtgtccctgatcctcatcaagcctcctgcaaacatggcatctagtatcaatatgcatcccacgccgcttcagatttgaggattacagaaaatgtccggatcaaattgtgtcccttaggtgtgtgactggtctcgtaattcctcttattagtaaccatggatcatcattgcaaatattgatgctttagccattcccaactctccaaataatgccctctttcagcagctcaacaccttttacaatacttcgctatgtgtatgacatattcccgatcagatgggcagataggatatcagcagtagggaaataccttgctttaaggatcctagcacacagagcctggatctt

SEQ ID NO: 6170 - DNA, 10778 bp, Oryza sativa
aaccggggccaaagatcccgggggggcctgacaagccctgacagcatttgaaccgggactaatctgttaccaaccgggactaaagatcaaatatgcccgttaccctttttaaccgggactaaagatcatctttagtcccggtttttgttgcaaccgggactatcgtggaattcgaccgaccgacgaaagatggtttctccaccagtggcacgtacttcgtactgatgtactccctccgtccgtcctataatataagagattttttgagtgtttacttgcgctgtttaaccactcgtcttattcaaaaaaatttagaatcattatttattttttttacttactttattatccaaagttctttaagcacaacttttcgttttttatatttgcacaaattttttgaataagacgagtggtcaaacagtgcaagcaaaaactcaaaatcccttatattatgggatggagggagtagtagttatatgtggccttctttaaagttacactttaatttggacctattcttattacgtaagttgcatattggactaggtgatagcaaatccgttcactttatagaccatatctattctattatatacttaaaagtccattaaacttcttacaaacgctcttaaaccgctacgtggcacttttacaaacgttcctagaccgccacgtgacagcgtctaatctcaccgtcgatttttacttaaatcgatggacccgataatttagaccattagattagattagatgtattttatttaaaggaatcaaatactatactgttggcaaaaaaaacaaaaatataagtactccataaatacgtacgtacgactgaaaaacaatcaagcttacgtcactcccaagccgccaggtgggactcagctcctaagttatcaaatggcgttataataaattaaaaaaatctgttgattttttattaaatcggtggacccattaattttaaccattagacctccctaaaattaaaaatccggtagccttcacctccactatacgtccgcaagtacgtactccctccccttccctctgtccaacctccaactctccccttctctcttatttttagctaactttcttaatattaagattttcaaattacgttaatctaaaaaaaatcatacgtagaaaatgtgctatatctcttcatgtggacgtgcacgtacatatgtacgtaccctctttgttctttctttcttttttcttttctccccttcttggttagatgagatagaaaatcaatattcatattaagtatattttaagttgcaaaaatacagtctaaaaaaatctagaaaatgtgagaaaaactaaaagatctaaccattattttttatttaaattgatggatccgttatctcggaccattagaataaatctattaataatctgtcctaatctccatcaacgtaacgactagagaaaggtacgtgcgtacaacttataaaaaaaccgaaaatacatatacaactgtaatgtaacgtacagtttaaaaatataaagtgcaaaaaacataaaaaaaatcaattacttatatcattaaaacgtacatttgcttccttcttctctcctcacgtatagatgaaatcgtaattattattagtgataataaattttaagaaattataactttataaacataaattatacatatcatcatatatatgtctaattagctccacaatgtttggaaataaattttataaaactatattattttacccatgatattaacaatataatattttttttgtttacttaaaccgttgtacctattatatcaaaccattattttgtatcaaaaattttaaaaacacgctgtttaaaataaatgttatgcaattatgttttgtaccattaacttaccaatttatgatctatattaactaattttaatttaattagtgaacactgtattttatactatttttaataaaaatatcttgcccatcaataattttcaaatacttatagtttcatttattaccgttatatcttatattatctcagctatagttgtagtcctgtagatgtgatagatggacgcttaaagttttttttaaaattttctattaaagtggaaatttctagagttttctctaattaatgtgggaacctttagcttttgtgttgttgaaaactgatgttggggattcttatacaagcatttatgaaaatctatcaaagcttttagaattgaaagtttagcttgttttctaactagttcaagcaaatttcaattgaatgtgaaactataaattatttgttagtgatcgatcgtttgattgtaggtatttgtcatgctaatatttcgtcctctagtaatgtgattaaaacttcaaagatctttgaatttgagttattttctctaaagttatgtgtatcatttgaaaaattactaagacattatctgttttcaaaaaaggctcaaatttaatctaaatgtgagtatttgaatccttcgggccccattgtatatatagtattttatatatatctttgttactgcttggccagaatataaatgttcaataatatatattttttaaaaaatggaacagggtatgaacccactcgaaacaggcagaattgttctaggtcatgtggcaatatgactattcctttccccttcgggctccaagaagaatgctccgcaaatagaaaattccttctgaattgtacttccaagcaagcatttattggaggatcatacacgcaatatcaagtgacgaatatttcactagatcaagggcttctgtttgtcaacttttctcagcacgaagaggcctactcagaattggtagaaataagcagagataacatctcacagtgggtggagtcctggattgacgaattcaacgattttgacgtctctcagcattacggtatttggaagtggtttgtgaccaacatgacttgtgaaaaggctaaaaaatcatctgcttatgcctgcattagcaccaacggtgagtgtactggtgtcacgcatggacatgtgcatttgggatatcgttgcaagtgctctactggctacgaaggaaatccgtacgtacataacggttgcataggtaagaaaccagtttgttgccaatatcgacaaaaatcgttattatgaacttcaattagtagccattgtatatttgttttgcagatattgacgagtgctcgatacccaatgattgtaagggaatgtgccacaaccaagcaggaggctacagttgcactcgttgccctcatggcacatctttcgatccagccgaaaggaaatgcacttccaccaagcaacataatattgtcttgggtatttctcactttaaccgatcccttttcaataagatcacagtcaagtacgaagcataaccatattaattacctatgtatgtaggaattgccagtggacttagctgtggctttggagtgttaattcttaccttaagtgtgacaatgttattttggaggtggaagagaggcattcaaaagaaaattagaagggattacttccataaaaataaaggtttactattggaacaattgatttcttgtgatgacagtgttgcgcataagacaaagatattttctttagatgaattagagaaggcaacaaacaattttgactcaacacggattctcggtagtggaggccatggcactgtttacaagggcattttatctgaccaacgcgtagtagcaataaaaaaatccaaaattgtggagcagagtgagattgatcagtttgtcaatgaagttgctatgttatctcaaatcatccatcgtaatgtggtcaagctttttggctgttgcttagaatccgaggttcctctacttgtttatgagttcatatcaaatgggacactatatgatcttctccatggtaatttgcaaagcaaatgtgtattaacatggtggaatcgcatcagaattgcccttgaggctgcaagcgctcttgcctatctccattgtgctgcctcggtaccaatatttcatagagatgtgaaatctgccaatatacttctcgatgataatttcactacaaaggtttcagattttggtgcttcaagatctgtttctattgatgaaactcacgtggtcacaatagtgcaaggtacatttggatacttggatcctgaatattatcatacaggacaattaaatgagaagagtgacgtttacagttttggtgtaatacttattgagcttataacaaggaaaaggccaatcttcctcaattcaattggagaaaagcagaacctgtgtcatcactttcttcaaagacagcaaaacaataccacatcagaaatagtagatgtacaggttttggaagaagcagaccagtgggaaattgatgagattgcttcgcttgcagagatatgcttgaggcttagaggagaacagagaccaaaaatgaaagaagtggagctaaggctgcaacttctgaggagtaaagtagcaaagaagaagaatagagtagaagtaagcagggaaaatgaaattgatccattactgctttatacgcccagctctagttccgtgaacccaagggattttaattcggcaagtcacaatgatgccactcgatgctacaccatggagcaagaattggtttcttggaccaatttacctcgctaaatataacattactttttaagtaactcggtattttttaatagctaaacatacaattcaacacctaccttaaataatacttaaaatgaaacattagattactctctaaaatttgaaaacactattgtggtgtttgtttattgtatcagtctattggataagacaaaattatcattttttgtattattctatacactaggaaggtggcccgcgcgcatgcgtgggcacttgtattattgaaaggtaagtttagtgtttgttcaaaaattttgcctcaaattaagagcaaactaacgttcggataatgttattttataataatttaagagttctatttttcttaagatattttaaaaaaacattcacaaacttttgagtaggagatggattgagtacttgacttttgaatcatggttcattttctcgagtaaataataaactattgctagttaattatcagacagttcatctatatacataccgtgtagtttggccacaaataaaaaatgctagagcaaactaatcaaaattcttataagtaaatagtctcttgaaggcatatgatatagtaaaaaatggagagaagtgtatgcatggaaaaagaagaaggggcaaatgacaaaaaaggaaggggaagcatacatacccatgtacgtaggtgcatacctatgccacgggaggagaggtgggactgtgaaggtagagaggtcggacctcgtagtatttagtttgttctaagatcaatttaatctaacggtttataatataggacctaccgatttaagtaaaaatcaagtaatatatactttgctttttttctcttagaatttatgatattttctctaatttattagagcgccatgtggtagctcgagagcattttaaggaattttaatggacttaacacatgtaattcgtaaattaaccgtgtaatatatatgtatgggactacggtaatattcgttctagctttgtccatgtttatatatatgtacagagaaattaattatgttgctagcaagccattagatgtctaattaatagcaattaattgtgacacatatttacaattgttcatagtagctcttacatattcatcctatgactttgattatccattgatcaccatgactcacacgaaaaaagaatgtactacttaggggtttaggacagctgaaattgatgaattatctaatttacgtgatagctatttgaggatataaacgaatgatttgacttctaaaaagttaaaaaattgtttaaaaaacaccatttagaaatttcaaaatatagaatcagaaaaaaaaataaagccttaaacttcattttagcactcttgtcttagtaagagttctatcgatattcgttaatactattctcatatttataacataatgatttctttcacctgtacgaacaaatagtacaggatccaaatacgacataacacaatacattataattattatgtaatcaactctcggtttcagcttaaacgaagctatgtgttggaaaaaacacaatggtgcttaattcttctctcgctgcataacacctttaatttttctttttatgttattaacaaaattaatcatatccatatataatttgatatgtagcaaagctgtagcgctgcaatggtcgtgatcaccttagatgcctcagacatgatgctttgtcatgcgtgcaaaaggtaaaattacagatgtgcattgtgcaacggaccaaaaagagaactttagacgttttaattattagcaaacaatagatccgatgatttaaataatcggtacacgggttctaatgtaaatgtaaattagttaatatagattttaaattcttaatttaatcggtgcacagtataatggtgtaggctttattttaaaatagtgcattatttgagaataatagtccaaagtaataaaaggatagatccaataatttaaataatgggtccatcggtttaactgcacgtataaattagttaatatagatcttaaattgtttatctgataggtacactataattatgcaaactttattttaaaatattgcattatttgaaaataataatacaaagtaatgagtacactagtttaggtggaaattatcttacattaatttgatgggtaaacatataatggtctaaattttattttcaaaaactgtagagctaatttagttacctgtgtttataaagagttatatgatggtatattctttgtatgtaaaattatgattattctgaaaaatatataccaattatgtaaatggaaaaaagaagaaaaaagggggaaaaaagggaagggagggaagcgtacctccctatgcgcgggagaaggaggggaggtgggacccataatatttggtttgttttaaaatcaattttatctaacggtgtataatattggatccactaatttaagtgaaaatcaaggaatagatgttttgcttttttattagaatttctaggattttctctattttataaaagcgccacatggcggctcgagagcgtttataggaagtttcatgaacttttagtatataatttagtatataatagatatgcttaaatccattggtttgtggaatatatcttcggacttgggaataatggatttggtaagtgctgggactaatgcatgtgcgcacatatataacttgactgcatcaactcagcaataatttatctgtatgagatagagaatggtttgttgacagtgattgattttacttgtagtatcacccacagactctcagtcctcataatgtaagtgattatgccttcttttttacaaaattaaagaaatatcaaaagaacttatgatgatataaaaggtgatgtcggtgatatgggcccgggggtatgtgaagtatggggaagtctccttcccgtctagtcacgtggccctacagcctagctctccccccacacctcgaacgacgcagaggcagccagggggcctcggggtgccacgtcacacccctcgggtcctcgcgctgcctcgcctcgaggccctcgcccgaccgccatgtggcgaggggagtgagtggggcggagacccaggctgaaccgccatcaatgcaagggcggatgtgcggcgctgcccgattgacccacgtcaatcgggcgtgaccggattgtgaccggcctgtcgccggtcacgtccgatcggacgggcggaggtgcccccacatcctaccctgtgctcggtggagtgggggcaggtatgccccgtcccatcaaagcatcatctggagccccctccacgtgagatgaaccgccgaaagtctccattcatttaaaggagaatgacaaggatgtcccccatgtcaggcggggggcggcgctgggccccactcgacaacggacggctgcttagcttccgagcgaaggcacgaacggtggtccgatccaggcggagtgggcctcccctcccgtgaaagggtaggtagaggcggtgcatgtggtatccccttgaactataaaaggaggaccttacccaccgaaaaaggggacgactctcagttagcctaaaccccaggggaagaagagcgagagtgctccctggagtttaggaacctttgtaacactcaaccttaaaatcccacgcacaggagtagggtattacgctccatagcgacccgaacctgtataatcccggctctcgcgcgcggtctcggaagattctaggcggacacacgttctcgatcaacgcgccctttcccccagccgaactcacaaaaggggggtctctcgatctcccgctagagaggatcattcatcgacaggtgatatgtgagggaataaagtagtataaaaggtgtgttggtggtaggtcatcaggcactataggatgaggatatccaactttgctaatcttgatcattagcaattggtttgcgataattattcaattttgttgttaattactgttgaaattataagcacataatgatttaatttattccataaataaatcatgacattgcagatgtaaactagattgaacgcatcattagatctacacatgtaaactaagaagtaaaacatggacagatcaaatatgcgcaacatgtcgaacacgtaccgaggtggcggaaagaccggttgctcggtaggaactactcgcggttgtaagcgtcgacgaagttgcgaagcacacgagtggagaggaaggcgagctgtcacggatgaacagggagcagtcgcgcgaagcgcttcccaaaaaccttattgccgccttctcccggtgcaggacgtcgaaggcagaggttccggagacctgctctcccgatcgccggtgcacgccggcgagcgggatggagtagcctacgagcgacggcgcagtacagagtaggaggcaaaccctagattgatttcgtgtgtgttgcgtgaagacggcgactaggtttatatagagatagatcgcctaatcagggcgcccgcgtaaaccgaaccggataagtcgcgcgtaacttatccagactccatgtcgttttcacgcagcggatttttcggaatgtttccaaaacaaaacaaatccgaatcccgcagcaaaacaaaactgcaaaaggaggctgcatctgagcaagggtgaggagccaattttccggaccattcgacgcgtacgtcgtgcacgcgcgccgcctgccctgccaggccatgccagggagcgcacacgtgtgtttcccctcttctctccaccacacatgcttcaagtggctaggagggcatcctcccttttaaggaggtcccgctctcctaaaataagcaaggtgatactaaactccacatgcatgtcatcccatgaggtgggcttttgtaattttccaaagaattaatcttcgaatgggctaaggcccatccattaattccaacaattactcccttcgtctcataatataagggattttgaatttttgcttgcaacgtttgaccaatcgtcttattcaaattgttttgaaattattatttattttatttgtgacttactttattatctacagtactttaagcacaatttttcgttttttatatttataaaaaaaatgaataagacgagtggacaaacgtggcaatcaaaaactcaaaatcccttatatcgtgggacggagggagtagtaattaaattgtcaatgttgactagatatagttagtctattttattgttaattagtacaatttatgataagattaatgataattaacgtatgttattattagttaatagtttattgttttcattcatttaatcatcatccatctaaccaaacaagactctgctcctgagttttaccctttcaataactaaaacacccttgttgtggagagagaggggagcgtggaagaggggcgagctggatggcaacagagcctattcctcggcagcagctgtgctagagatggcgagcacgcgggcgagcgagcaagcggcggtgctagagatggcgagcacgcaggcaagcgagcaagcggcgctggaggcagcgagcagcgagtaggcaggtgtcacacctgaagttcttctcccaagccaaaattgaatttataatttgtctcgagaaaataccggcgtaaaagcaagagtgaaaccctaaacaaattaatgcaaataataatcggaattggcatgtggaatttttcttgagttctacatgtcgaaatgtgctaacaagatttttagtggaattttcagagctccagaaataattttaaccaattaaaattgagcacaagcaatatttaatccctgaaaattcatttctttctttttctttttcttttcccccttttctttttgaatgggccgccggcccattttcctccccctcccctccccgctgggctggccgaaggccacggcccaactgagccggccgcctccctcctcccttcgggtcgccgataggtggggcccatctgtcgggcccgtctcccacctccagccggcgccaccgcatcccgcaaccgccgccccgctcgctcccgcgtctcccgagccacgtcgcccacgtcgccgcccgcgcccgctttccccgcgcccactccctttttctcccgcccgcgcccgcgctcgagacgggcgggattcaatttttgaatcccgcctctctctcctccccac

SEQ ID NO: 6171 - DNA, 25449 bp, Oryza sativa
ttcctctcctcccctcccctcccacctctcctttcttggtggagtggtggcgtggtgcgggaactgccgttgccgacgaggccagctcggagtggcggaccatggcgcgagggagtgtccaacacgcaacccctcccatctgctgcctccgtgcctcctcctcctgtgctgacggctccggtggaggccctcttcgatcgccaccgccaccgtgccctgctacccccttccgcttccctttctccacccgtgtccctctcctccgagtagcgttaccggccgcagcccctctcctccgagcagcgttaccggccgcagcccctcctcctgagctggctgtcggtgccatgccgcgccgctcctcggatgagtcgatgatgccgcgacactgagccttcgtcggagagcatctgatttggccctttgtgcccaggtatgctcagcccaagtgttgtcgttgacgccggattgcacgtctccttcctctgcttgtcgactatcagcaggtcggtttggccactgcaggtggagccgtgaaggtaatggccgccgccagccagtggaccaccttcttggtccccctacgacctgcgcgcgtcgatctactaccggggaacgccggatgcaggccgtcgtggctggatctaccagcgctggtgtacgacggcacgaagttttgcaatggcgtcgtgcttgggacaataggagttggtgcgattttgcgccttttgccacaaccaacctcaacatggtgaatttcgatgctttgcttgcttgcgcaaatcagcagatgtctttgatggtgagtcccaacaacccgtgcatcatcgaggacaaggatgatttggttgctgaggatacaaaccacgcactttagttcagttttgtactccaatttgattttttttttgaaacgaagggttttttttattattttttttacgatgcttgcagcttgcagggtacctgtgcgtgcactgtgtatttgtctctgagaagttactgtgaaggaggtgacatgtaagatgctctaacatttttcactcttcactgatcctacagttttatcttccaatgttctaagtcactggaacaagaacgacatggcagagaggataagaagagaaggggtgtccttttctctgaaaagataagaataggttagtgtaagtagttgaaatggtggtgctaccaattgcatcgctttgatgaatccctcatttacctttttttaccctataaataagatggcatatccattctttagtgatgctttaccaagaattagttttcaccagttactgacatttcaaacttctttaagtaccaagtgcacttttttggatttgctatctactccacaatgtcttacctcatcagttagtgctaaagataattctttgtttgtttttctagctctcttcaagtatgttcaagtaggctagcgtgaaggttctcaaggaggtgaccaagacgaggaaggtgcctgtgctggaggtgcccttggcgttgaccaagatcaagaaggcaaatcttgagacatcctcattctttgagactcttagagggacagagttcccggtcaggacatggatgcgcatctttgtgaaggttagaaatagatgcatgattgcttgcaagagcagttgatttggtttttctaaaaggacttttttttgcttgcttacttgcttagttcgttgggtaaaaatgtcaggatcagctgaagaaagggtagtgtacaatgtttttatgctgcatgagctccttaattaatcatgttcttcattatttgtcatggtagtgaaatagtgatgatgctttagcagcccagttgccatgggcattcctgacattgagaactaactgttacagtgtattactgcaccctgtttgctgaacactgcaagaactcctgaattcaaactgtttgtgatagtgtgatggccatgcgatattaaccaaaacaaggaactgacatacctaattttaaattgttgtgtaaggctttattttagtcggaataaacaaatgtttggaaccgtggtctgctatatattatgtgtttatcatgcccaactcctaaacctgtatttgaactaaatgaatttgtattcttgtattgtttatcaccacagaaagaggattgagaatggtgtgtatttgtgtccttaacctttaaggggagactcatgaaagaagaaaaagattctagactttatggcctttctgtcccctcaatttctgccattgtttggatgccatgggaccatcaccagttcaaagctactgacagtgctctttgtagtggttccagacgttaccattgtatatatgtatctatttacatgtctaacttgatgcttatagagattatatttgttgtttatgtattttttttgtgagttattcccatatcaaactaatttagttgcgactttggagttgctggtatagtagagaattgaatggctctgctttttgtaagtgcaagcaattgtgttctttgggttttatactaattctcgaacttgatgatgttgggccggtcgttcatgactctatatttgctaactcaatacaactcttttatgttatatcatctttattcccaaatttttgggtttgtaatttctttctctatgagcaattctggtactacatttacgaatgtaagagacatggtcctaattcgtgtatgtctagggaatgggaattggttggaaaaaaaagttactccatggacctcctttttattaggctcatgtttaacttgcccagctggtagtttcctaaaactttcgttaatactgtgaatacaccaaacttgttgcccatttttattgtgaatacaccaaacctgcttcccctcgggtagtggttgccatttttattgggattttctgatttttatcaccatgctgctgctcttgttttttaacaaaaagaggttgctatgtatgtatgggttttcagttcgtagtgtgtgttgatttctgagttgttatatcttccgtactttctgtttgctttgacctgttagggttattttttttcgcgtgagttcctgattagattggatgtttatttgtacactgaattaattgtttgttccttacccgttcctgtatatatgtattgtgtgcttgtccatatcaattaccatataatggataaatgcgcaaacccttatacaagtattaacaactcgctgtaatttcatttggtacatgatctgcatagtaaacctattggttatcattgctaaacccatttacgactaaattctacttttcgaaccaatctctgctgtcctcgcatgttaccgcctactttctcaaactgtaccatttttcatctactcttagatggaaaaaaaatgtaacacagttcttaaaaaaggggccccatataataatctgatgttaaatcaaattaatatgcacataatatgccactccatgtggtcaaattaaccttaattacgtgtagttctaaccacgtaggtgttagcgtgcgaggcgtggcgccgcgctcatatttctagtgttatgtcaaaccttcaccgttattccaaactctgaacttggcctgaaattcggcaggccatggagcgaacattatcacgaatgcagggagatcttgactcgagaggtcaccgtctgcacgtcgaggcagtagagagcatcgatgagatgcatcctgagagaggcgggtcccttggcgccagactccatcccgatctccccggccaggccaaagacagcaagggcgcacgccgccgcggccatggcgtcggaaggctcctccaccaccgcgaggaaggccgcgatgagggccgtcgcggcgcagcccgtcgccgttatcttctgcatcatggccacgccgttgctcactccgaccacccgctcgccgtcggtgacgtaatcgacggccccggacaccgcgatgacggcaccggtggaccgtgccagtgcttttgcatcttgaagagcgtcccctgaatcatgtgtactgtccgcgccctgcaaaatcgatgggaattgattggaacattgtacattatatactagtatcaatgtactagtaaattgttttggttagtcagtcagttttgattcttgacagaactgaaagatcaatctgacattagccatcaatctgacattttggataataatcagtcatggaacggtctgaactctcgagtaacaaaaacaggtgcatcgattgggattcagattgtgaggacagaagagaggatttattttcctcatcacaatccatttttaatccattttctaaaaaataaatcacaatcaagttcagaaaattgttaatcgcggcactctttttctttccagtagagagcacgaggcagttcacaatcaaaccaatccatctcaatcgtatcaatcaagatttttttttctataacttgttcggatgggtaaattaaagcgaagacaaaatggttgcaataataagcgagcaaagctagaaatggtaccttgaaggtggtggtggaggaggaggaggaggcggcgagcgagcgagaggcgagggcaaggatctccgacgcgttccccctgacgacggcggggcggagggcgaggagggagaggcaggcctccatccggaactcggaggcggcggcggcgacggggtcgagcacccaggggcggcccgcggaggcggcggcgcgcatggaggggagccagccctcggacagcgtgccgacgttgacgcacacggcgtcgcagcgcggggtgaactccgggacctcgcggagggagtggaccatggccggcgacgcccccgcggcgagaagcgcgttggcggcgatgtccatggagacgaggttggtgacgcagtgcacaagcggcgcccgcgcccgcaccgccgagaggagctcccacgcccgccggccccaccacgccgccgtccgctcctcgtccatgttcctcgatccggcgcgaccggaggtggggagtctctgaggaattcgatggaggagaagagtcgaagtgggagcggcactaggcgcggcggcggcggcggacggcggcggggtcgaagaggacggtggaagcctggaagaagaaccgtcgagttgtcgtgttcgcggcgcggcgcatcgagagacctcttttgcgctcaagtgggggatggatggatgcaagagagccacgcgtccgaatccgggtgcccagctgccaatccgacggccaggccaaaggtcagggtttataaagaaaggtaaattggtttctatgaatttcgtggcttctatccattactttagcatcttaattgtttgtttgacacatgagcatttgactcctaggtgggtacctttttctgtgttctatgaaaaataggtgtaataatgttgaacggttgatggtgctaatctaaaggacctatgggctgtttggtttgctgttcaaaccaactacactgagaatttgcctacatatcaaaacaatatattcacatgtttttttaaaaaaaaattggcgctgccaacattaaacaaaagcttataagcaattgtacaaaacttttaacaggaaatagaatgcctatgcttccctagaaattttggtactactttttttccccaacgatgcatcctcttttattattaaacaaacttgagaaccaaacacttttttctctattagtacaacctataacaacaaaatacatgtatgcttcaatgcgaaaacttttaacaggagacagaatgcctatgcttcactagaattttggtattattttttccccaacgatgcatcctcttttattattaaacaaacttgagaaccaaacacttttttctctattagtacaacctataacaacaaaatacatgtatgcttcaatgcgagggccccattcaatagggtgggtcagctgacccatctcgccagggcatacctcctaacctaaaggaaaaaaaatgttgttgtgccatcttcaaacacgggtttcaccataatgccatcctgcattttggcttcaccaaattgccactttcaaatgatatctatatgctagatactattatagatgaaaaatgcccttgagttccttttctccctccctcagcacgccgaaggtgcttgccggtggccaccaaacaccatggccatcatcccaactcgccagcgccagtatgcgctccactaccaccagctcaacccactattgcttcccttcccccccgtcaaacctcaatcgtgccgcctaattaaagccacaaccgtcgtacatccgtcgtcatcccgcgacctccctatcctctctctttggcatcccacaggttgcggcagccttcacagtcacgctgatgcaggaggaacaaggaagatagaagagccggcttgtatagctgggtgacacgacgatggggtgccagtgatgggctgtctaggcatgatgtacccatctgtatctctctccgcagcacgccatgacgatggtctaaactggtgtggtgaggccaccagagttgaaagagaaagaaaggatgaggggcatttcagtccattcatatagcaaagggtattctagcgtgtagcatttgtttgaaagtggtaataatttagcgaagccaaaatacatgagggcacgataaaactcacgttaaatttgaaacttacaacaatgtgttcttcaattcttgatcaactctatcattgtgagaatgggaccaccatgagaatgaggtcgttgcttgcattcagctcctagcggtaatgcacaagctttggcactggccacagcttctagctttcgagccgccaagtgtttgtgttccatgctttgatgttgtatgtgttctcagtttctcataatatttctgatgtgatggattaatattatatatgttacaaacattgtttgcttactatttaatctatatgtacatcttatatgtatgcagacatgccattaatttatcgtaattcacatgatctcaatataaataaatgcattgcgtgtctgacctactatcttgccatgaacatcttaacattgcgaggaagagaaaaacaagcacactccgttcattcatagttaaaggcaaaagccaacccaataatactaatattgtacatatcggaaataagcaatattagtgttggaaagtaaatagacgataatgtgtatggagaggggggaggaattggcattgatacttagtgatggttagataccttacctacacggaaggacttccaaagtgaccaagctacctaacataaaaatatataaaaggagtgaaagaaaaaaaaagggacaattgcttatttgaccacgttttgaactctaactaccaatttgaccctactttttagagtttgcttacttgaccctccttttcaaaaatgaagctcccgtctgaccctgtttctactagtccgttaagttttgatttaaataaaaaaagaaatgcaactaatattcataatacccagaatacccttagaaaaccctatccatccacccaaccctatccacatttctctctctccttcctccttcctgctcactcgacttgtggcggcggcgctgagggggcggcggcggcgactgagggggcggagggagggagtggcggcggcgacgactgaggggcgcggagggagggagcggtgtcggctgaggcggcgccggcgcgggatgagggaagcagcggcggcggcggctgaggggtgtggagggagaagatccacgacggctgaggggcaacggcggctgaggcggcaccggcgcaggatgagggaggcggcgccagcgcaggcgtgcggaaaaagggaggaggcggcggtggcggcaccgaatccgctgaccgcagctcgagctccaccgcccagactcaccgccgccactcctcgtcgtcgtcgtcaccagggccagcgccgtctcgcctttcgccacctctccctgtggtggatacgtggaggagaggacaagaactcgccgcggccactcgtcgtcgtcgtcgtcgtcgtcatcaccagggctggtgtcggctcgccgtctcgcctttggccgactctccctgtggtggatccgtggagaagagagaagagaggagaggaggagaggagaagagaacttacgtgtgggtctcacatgcaataaggtcaaatgagtaagggcagaagagatattttgtgcttcagttaaccccgttagatgcccttaacaaaatatggtcataccatagcttcgtttttgaaaaggagggtcaaataagcaaacttcaaaaagtagggtcaaattgatagttagggttcaaaacggggtcaaataaccaattgccccgaaaaaaaaacctcctctactactattgttgtttcttaggcccttcacagtgagccaccatgtcacgtagattcgttgtgccacgtaggatagatgatgtggtggaagagagagaacgtggggtgaggggggcattgctttgtgaggttttctcaggtccaaaggaagagtcgagttcctcacctgcaaaaataactggtgataggcaaaagtggagcatgtgcaagaaccaatgccgcaagcaacctgcgcgccgctatcctgccgcccctatgacctcactgcctcaaccaaaaaaagggaggggatgccctcgccacccactagaggaagtggaggagccgatgacggggctgatctactgcgtcgccacccggcgcgcccgatctatgttgccggagccaacgtccggagaaggagagcagcttgagcttgtcccatcgctagatttgcctgccgagcttgccgctgacctcgtcaccatctcccactttgtgctgcagagcttgccgtcgtttcccattctgtgccgctcacctcgaggcagccccaccgatctcgtgccccgctcctacgctgctatcattgtcgccgtctcctcctccatgccgctgacctcgaggcggtcacgccggtgccccatcgagctcggcttcctccgagcgatctgcgctgcgatggaaagacacttaggcgtggtggctggagtgggggaaagagagggatggtggtggccataggtgtcgatttcccctccgcccagtgttggggagggaggtgtggttgtggttggcggcagtggtgtcgtctacggtgtgaagagtgtagaaggggtcaaggggctaacagagaggcgacggtccaatctgtccagtgccgctagggagctcgtcgcgagctcgtcgccgcgcagccgagggagctcctcgactgccggcccaccacccttctaagattctccgcactgagatggtgctgacgtcgatgccggtgccggcgggagttgagaggagaggaaatcagatgattggagaggttaggtggggatggattagattttatattattgtgtagattttagggttccaagtgtaaacttttgcattaatgtaaatttaaagatagtagggactgtaatgcaaaagtatataagatcccacaataggttctttgcattgcggagagcgtgatttcaaagtgcttcatcctatttagtgcccttaggttcctcgtatgagtagcttgcattgctaacaaccttctatagttcatttggtctctaacttctcagctggctttatactttgggatatctttaaaatttctgcggtagacttaggatcaaaacaaaaccaataaaataaagggtttgttggaaccatgccaccttaattttgcaaaatttgagatatgccacccgtatctcaatgacatataggacccacatgagttaatgacatgtgggtcagggtggtatatcacaaattttgcaaaatttatgtggcatggttcaaattttccctaaaattaaaatacacccatataaaagatcaaggggctgtttggttgcttcccaaacgttgccacactatagttaggcaagtttgacttttggtgtaaatgtttggttgaagccaaagatttggcatgccacacttttctactctcatggcccacatgtcatacactcatttaacaaaaatttgccacaagtgtggctctcttttttggtgccacaaaaactatggcataccacacttgtagcatagaagtttggtaaagtgagtaatccatccaaacagcctccaattcttttcaacatgttattaatcacacaccccattaaaaataagaacgcagaaagagccaggagtaaacacaaccgcctcacgggccagtccaccgaccatttctaccccttttctcctccgcttccttttacttggcttgccccctacttctcctcagtcctcacccactctcccctcttctttcctctttcttcccccttaaacccacccacaccaacgcaatccagcaagcccccacatcaacgccgctccggccgcgcgcgacgccgcccaacccaaaccctagcgcgatcccgtctccccccggccaccgcgccctccgccgcacgccaatgcgccgcctccgaaccctaacttactccctccgatagcactcccgcccacccgccgccgccccttccccttcgctggtggagatggcggccgaccccgccgtagcgtccgccgtggcggcgatctccgccgtgatggactggcgctcctcccccgacgcccgctccgccgccttcgcgtacctcgaatcggtccgtgtgccgccaccccctccctttctcgtctcaactgctgtggatgctctttttttttttaaaaaaaatggtagggtggggagcgctttggtgatgcttcgctaggatgcttgttgtttagctttttcctaattttgtgttctactatttgtttttacgggttgatgggaatattgatgcaacacggccattttttctgttgattgtatatgtattcaacaatcacgagctttcacgagttttgatcttcgtcaatttgcacacgattggtctataagtgaactgcccacacttttccatttgctgacgcattcaactcaatatgattttagaatactgaagcatgcaagaggtctccacttggaatgctggctgacgaaattaaatgaaaagttgcagttcacttcttttccatatctgaggtctgagggaacctctatgtgagagcgattgttagaagtattaagtgaattcttcgcccttctctaatcagcttaagctctttggtgaactaactggtgcattcaactcaatattctaatctctactctttcagttatagtgtgtaaccgttactgctctgattagttagttcatttcatggataatgtttttgcacattttcgctggtataagaaaaatcctgtgttgcctccttgtcccaaatgtaatgccattgtttgacaatgagacttttgaaatgcaggttaagacaggagatgtccgggcattggcgaacacatcatttttattggtccgaaaggaccagtcttcagaggtccgactgcatggtttcaaaatgttgcaggtgcgcttgttgtagcttgctatgccaaacagtatcggcataccagttaattgccaaaagctacaccacacaattgaatatgatctgaaatccagaagttctttttttctagtgatcagcatgctgttttgacttccttactagaatcaatcacatggccaatcgaacatatgattgaccatatggtctaaactccttgtttctagtaaatcatgtacatttggtatgcacttttccttgtaggaacatgattcttcttatcactaataaattgctccatcttgcttttgttactaatatctacagcagctcatttttaccattggtgtgttagtgctttttctcacttctactactcaacttttaaccaatttcagcctccttcgacctacaccatctgacccccttcctcgaaccagttgatctattttcatggtgaacgtgactaggatatccttccaggctgagacctttttaggatgaatgaccattctcaaaagaaaagggccagtcattatttaccctcgtaaacatgacgcctcatttccatagcagtacacatctacaattgttagtgcatcgcagaaagtattttctataaaaagaaaaaccactagtatggtcaacttgattttccactgttaaaaaaaaaatcttacatacgacgtgagttttccatttagaaccgttttatcaatctcacagtcattgcctcagcaatgcttgtattgtaattctcttagagctctaaacttgatatcctgtgatgactgtggccataatgcattatttactgctatttcggtgtatgaaaaatatttttctctattaggagctattatcttcttgtattttagtatggtcataactaatggttctgttggtaacttttacagcacttggtgagattgagatgggaggaactcagtgttgcagaacgaaatgaatttgctaatttgactgttaatttgatacctgaggttgttggtcctcatgaggagtgggctttgaagagtcaaacggctgcattagtagcagaggtcccttacatggctattctcatatacttttgttgaaacctttgtactgcgacaatatttgtttctttaggtacattcttttttagtgaccgtcttatcttgtaggtagttagaagggagggagttgctttgtggaatactttactcccatctattgtttcgttgtcaaacaatggtcctattgaggtatgctccttgcagctttgcagcttttttctgtacctctaccagtcgatatattaaattgcattttattttccttccctataactgttaggctgagttagttgccatgattctgaggtggcttccagaggatatcactgttcacaatgaggatttagaaggtaaattctatttgcttacttctctgtcctgatcacttgaaactgtattcacttgaagtgtcaaactccaaatagaaactttgtctttctcctgttaaattgttaattacatgcaacaggtgatagacgtagggcattgttacgtggtcttactgagtcgttgccacaaatcctgccgctgttatattctgtaagtttttcctttatttgtcgaaaaacggaggctcgtcatttttacaacatactaatgtaagcatcttgtaatgtctcattttgtagctacttgagaaacactttgtagctgctttgagcgcgcacacgaatcagcaaatggagttggctaaacaacatgttgggacaataactgctgtgctgaatgctgccaatgcatatgctgaatgggctcctgtgacagatctcgccaaatatggtttaattcatgggtctgtatgcttgaatttttcttccatgtttggatggctttctttcccctttattttaccagcaattccattttgcagatgtggatccttgttttcttacagtgattttcgtctccatgcttgtgaattctttaaaattatatgccagaggtactgagaggctgatgcatttttcttaacctatatttcattctgtcggcaccttttctgatatgttattggcttgtccaatgcaacctagctcaggaaacggcctttggatgtcgcgattgtggagtatgatgcagcaatgagcaacattttccagttgttgatgaacattgcacaagattttttagtgagatccaagatgcagcccaacgttattgatgttaatgaatacgagtttgcaatgtgtatttgtgagacaatggttgctctcggttcttctaatatgcagtgcatactagctgatgtagcaaggactttgcacttcctacaacaggtgcgcagttcaaaatacacttctccatatatttcttacacgagattaatgcttaatgctgctgtgcagcaccttctcctctaactatttagtaacataaagtttagttactactacctccattccacattataagacattttggcctctccatcactcgtctagattcactaaagtacatatgaatttggacacatatatgaagcacatacatggatccatgcactgatctattgaaaacccaaaacatcttataatatgaaatggaagaattaactgattcacgtgtgcatgcctaaaatttcataacaccatagtttgtcgtgtctacatgttgcatcattctaatgttaatttattttgtttcctcatagatgctggaatattatcaacactacaagatcacgcttcatttccaatctttattattttggctggtatacctctggtctcttcttgcatagttaacatcaatgcaataccatttttacttagaatgttaacatgagctatgtgtaggtggtcttgagagaaccatcaaaagctaagtctgttgcacgtgtttctagtgacacccctgctgccggtaattctgcatctactggtggtggttcaactgaaagggagaagaaaggggtgtcagtattaatcactgatgaaatgtacagtacaattttggatgttacgttcaaaagaatgcttaaaaaaagtacgagtgcatcttcagggctgttagaactatggagtgaagagctagaggggaagagtgacttctgcaactaccgtgccaagctggtaggtcttgttttctcctgacatgtaaaaactgtagttgctgttgcctcttgcttaacattcaacaatttcatgaagttgcctcattcagtcgttatatccttggaaaaaattaagaaaaactactgacacttattttggcatgcaaacctgatgtatcacaacacaaatatcagtccaattgcactcaacttttctggaatagcctcgcaaacaccatctgacatctacagctttagtccttgggttgtgttctacatttggttggtcccttggttgatgtgtatgttagacaaggatattgacagagttcagacacacatgttgttgatcaacatccacataatttcagctgtttaggagccaagggacacgggacatcgtgagtgcctgcctgcctgctacttggagagtttgcctgttatcatagagcttgtttaggttcttaaactatttatcaactagagcaagcaaactgccaatctgcttggtcagtttgttaccaattgcaatcagcatgttctttgtttgacgcagagcagcaaattctctggcattcatcaagttctatgctgcaatttgttttagttcaaagtgcaaattttcctcagtcgaatctgattttactttaagtgcaagttatttgttgaggcactggagcagtgctgctcaccgaggcagccacataagttcatgggtatgcctattaggtattctagctgaataaaagcatgattgttattcttttacgttcagccacgaggcagccacataagttcatgattgttagcatgggtacatattgtcatatgccatttcatgctacaagtatccatttgtcttttgtgacaacatgcattctttttcgcagattttcaatatggacatgtgatttgtggcaatgcaggatatttgccatgcaattaattttgtacttccacaaatcatttactacttaattaacaagttccctgaattcttcctgcagctggatctcataaaagtcattgcatctcaaaggcctggtattacagcaacaagcattgtacagagaataaacattgtatttggagatgctaatgaagcaacgaaatcatcccaggttggatacattacctacatatatttgcgacatcaatttaatggagtcttgcaattttgctgaaagaaagttttaccttctatttttttgttgttgttgtgtaacttgagttaaatatccatgccaggatcttgatgcaatggaaggtgcgcagctggggctggaagcagttgttagtgctatattcgatggctcatctgattattcaaagattgaccaggacacaaaattccaaattcacaggatctttgaaggtttcagctgtctttaaactttaatttaggtctgctgttggatacttggatatacaatgttcttactttcattttttttttgtgaccaggcttacttcagcagcttctttctttaaagtggtcacaaccaaatcttgctgttattcatggtcactatttggattctttgggtcctttcttgagacattacccagatgcagttgcctgtattgtgaataagctttttgaaatattaacatctctccccatcacaattcaggtacattttctaggctgcagcaaaatacctaagcaatacacattaaataccctgatgttacgatgtggcaaatcagggactttgaatccttcactccaattcaatactatagaagacttcacagaaatgaatatagatgtggacttttcatgcgttttatttctctcctgttgcttgtcaattgctatgttttgagttacctggtaattaataacatgttatgtatttacatttttgtgtcattttctgtatcaataggacccttcaaataatttccgtcaagctagactgcagatctgctcatcattcattcgtatatcaagagctgctgataaagcacttctgcctcacatgaaggttaggatttgtccctaattggtttcccatttgatctcacatgcagttgctttgagctacatttagttgtatggtagacaacttgccattcttccagcgcagttgtgtttttggacttctaatatgatgtacttcctccgtttcacaatgtaagactttctagcattggctacattcatatagatgcgaataaatctaggcatacatatgtgtctagattcattagcatctatatgaatatgggtaatgctagaaagtcttacaatatgaaacggagggagtagtagttacaagtagaaaatgggtcttcatgatatttgaattgcaaaatgagggaaatttacctgggaagtacattgctcttatttacggtcttgggttgtacatgctctcaagttttatcaatacacggttattgtgacttgataaagaatcagtttgtgagtacaatgctgtgttgcaaagtgaagtcttgcatcatacatcataatcccggacacctaggatacaaatagctgtagtacgtggatgattttccactttttttgtactaattattctagtaagaatttattatggatcaaagaagatactcttttctagtgattaataacttaatatcgataagtagaagaacaatccatcagtgccatactaagattcgattaatttagttttgttaaaattttagtgtgatcttgttgatgtgactatctatttccacttttggcatagtgtaacagtgtgaatttctttatgaccattgtaaagacatttaagtgcaagcaggtcattaacatcaaaatacattagttatgcaacatagagcaacagggataaatgctgcagagaccaatagtgacaatttgaagtatggtgctttgaggcagtgtcatgggcattgggccgagagactgagccattagcagctcagtaccaggtgagttaaacataagattagatcgagtccttacttaggggccaagttattccatctatacaaggatgggattgtgtctattatcattaagcaatgaatcagaattagtctaatctctccccaaatgttctttcaccaacctaagtctacataccttccttagcagcctacgctgcctggctatcatcctggcagtgattatcccatcgtggcctcaggtcgtgacaacttggtatcagagccactcaccatggcttccgatactgagtgagttctttgtatcatggtgagccatctggtgtatccggtggatgaagagctactccacgagctgtttgatggctatggagcagaaaagaagatccacatactctagatgggaacacatgaggaggcctctgtttggtgcctgttagtcagaccagttgttgaacaggctggactgtcactggtctgactagtggatcgctagttataaccgtgtttcatacaagctttaaatatatttgtgtatgagagtaactagctttaaatatggaagcatagaaatgattgtgtttaatggggctaatcctagtgttgtgtgtggtttttggtgcgtggctggagcttgtgagttcagtgagtttcttagtaggtctctcactctggttgcgtaagttcgtgttgagttaattttgttttaagttcaagacttgtatgtttggggtgagtgggggtgtttcagcttcccttgtgttttcttctctcttaatgaaatgatacacagcgctcatgcgtattcaagaaaaaaactcaaaagggagataaagagagggagggagatttatggattatatggtgtagagctgtcctgtgttgatagtatgatatgtgctagtatttctgagttctgagttagtattcgtatgtaaatataacaagccgagctagctaggtggtacccgaggcaggattgtgctctgctgattagagattgaatccccctgcatgaccctttattcatgcccatttaattaatggtttgactatgcggtcctttagtggcccatgtgttccactcctgtgcttgagctgcttgctgagaatttcctggttaactggttttcatgtggaattggccagttcaattgttttttactggtagcatgtctttgaagcaaattgagctgtttgagatttctgtttgaggctgtctgatttttcttactatggctgggtcaaggtaaactagcctaaagatagcaactcgaggctcgagggatttgtgacagatgatgccagctagtccctgagaacctaatctaatgtttccaattaatcatggtaacactttgtataaataagatcctatccaaagtccaatgtttatcaaggctttacccacaaatcatatgcagaccagcagctataatctaatcagtgattaggaggcctagacgacgttaggtggtgcgccctttagaacattgatcctatcaaatcaatgtgtttactgtacttgatagcttaatctgcagctagacattagctgatagatcctatactctctctagcttgttgcaaccctagtgtgccatcttggccctaatggaatgcatgtctattgctggctggcagctatagcatgtacatgtggcagtagtttatccaattacgatcccactgaactacataacattttttaaaatcgtcgttgcaaagatttattgctacagttctacaatttatgttaacaaggtaagaaatgtgtgttgatgaactaaggaaatcagtgtggcctgtcttcaatgtagggtagcaaatgtgtacatgaacaaagtaagaaatgcagtgtgctatcaagattgccttaatttattttggcctgcatatttttgcattctatagtcctgctcaccaagtcaccatagcatctattctcttgtggtcgctgacaatgattaccaattatgcagaacattgctgatacaatggcttatcttcaaggagagggtcgcttactacgtgctgagcataaccacctctgtgaagcgtttcttgtcatggcatcctctgcagggtatttcggtttctgcaccttttcagatttatgtcttaacattatgttattgtgacattgtcaatgtgggttccatcatatgtttggatcttctaccttatttgtaggattcaacagcaacaggaagtcctggcttggttactagaacctatcaacaaaatgtggacgcaagtggaatggcaaaatgcatacttgtctgacccatctggcttgacacacatgtttgctgacagccaatttatgtggtcaatttatcacaacatcacattatttgagaaggcactcaagaggggtgggtccaaaaaatctgcatcagctccacaagcactggccacaacagtggtaactgctaatctgcatccaatgtgttcacatctaccatggattctgccccctctgttaagggtaatttggcacttctttcttgccaacacatcattcttttttttgatgtaattactatgtattggttaagctgatagctaactatagttttgacatcactatttttccccttctccctgatcttcagctgttgcgatgcatacatatgctttgggccgagcccttttctcagtctctggcaggagaagtcaaagcggcaaaaagcatgactgtggcggagcagaccagccttcttggggagacaaataaactcaccaaaggccaggttgcatctgctgatggattgttggatgttcaaagggagggagagtctaaggaaaacaccataaggaactggttacgcgggatccgtgacagtgggtaaaaatttaacctaagcatctggtctttcatatgatcaaatttctaattcctattgatagttatactggctataatatcaaatagcccaggtgaattcatgggattaacatttctgatatcccttaaaatatgagaatggttgagctacatttatctggaaaatttgcatcttacactaagacccatttgtcctgaaatctgtctttgacccatctgaacatatcatactgcaggtacaatgttataggactatcggctagtcttggggatccatttttccgatgcatagagggttcctccatcactgctgctcttatggagaacgtgcaagctatggaatttcggcatttgcgccaacttatccaccttgttattattcctttggttaaatattgccctcctgaactgtggcggatgtggatatcgaaccttttacagccattatttgtccattgtcagcaagctcttgatttctcttggtccagtcttcttcgtgagggccgggctaaggttcctgataattttggtaatctttctgggtcagatctgaaggtagaggtaatggaagagaaattgcttagagacttgactcgtgaagtatgttccgttctttgggttttagcatcaccaggcttgaatagtggtcttccatccttagaacaacttggacctgccaaccggattaattcttctcttaaggatctggagttgtttgtttccagctctatcactgggtaatacaaaaatttctagccagctgtgtgctacctctcacctcaacaaaagactgatttgctatccttttgcagatttcttatgcttaatgtctccactgctgttcctgcattgaggataactgttgaagtgttcagttggacagatagtgaagcagtcacaaaaattattcctttttgtggtgcattgattcaccttgctgttgcaacaaatcgggctgagttgagtcagtttgttgcgaaagatctattttcttccatattacatggcttatctgttgagttgaattccattacgagttcagaacttgttggactttgtcgagaaatatatatctatctctcagatagagatcccgcacctagacaggtatttttgagatatataattgggcaaaagtaactgctgaatgaaaatgcgatttaaatatcttgatttcacataattggctttctctgcaacagttgtgctgtcgcctttttgaatttgaagctatgcatatgtttttacagaaacatgtattatcacaatttgaaatctacagctgcttgcttatacaataaaataattacaccacttatagcagtggctttcatagaaattttgagcattgggactaacaggaagtgctttgcttgtaggttcttctgtccctcccacacatgaagcaggaagatttgctagcctttgatgagtctttgagcaaaactgcaagtccaaaagatcaaaagctacttatgcgaagcttacttttgcttgcttcagggaacaaattgagagctcttgttggtcaaaaggctactaatgttattaccaacgttacaagtgagaactgacttgcatttcttttatggtaatatgtttattctattattgcgtaatggatgaacacaacgttgttttaataaacggaaataagtacattagctgaaaaattgaatcatttttcttgtcgttgcctttgtttcatagtctgccactactcaaggatttttaaaccgagtaaagtggagatcatcctgcttgtactgttttcattcttctaccaactagattcttctattaactgactgaatacttttgagccctccttgctaacttttgataattccattgccagctttttgttataccatgcagattgagcacttgtttagttatcatatactcagagctagttttgaatatggattattctactctgttaacaaacgttgctttctctgatgtccagctcgaaaccggagctctgctgcacgccatggacttagtgctgaggaagatgaccacattggattagctgcactatcatcatagaactgaccagctaaagttgttttctgtacagaagggtaatgaccctatagattggtaatgtggtggcaaatttaaaggcgaatatcatatccttgctgcattgtcaaataggaacgtatgcatggttgagtttatacacaaggtgccatcatgagcaaaagagaaaaaaaacttgattacagcttctttccccataacattgtatatgcccttgtgcatagcgcttctatgcagtatgtgcagaacagtggaatgtacatgtattactgatttgctcctaccgaccacgttttgccgtggtttaaagaaggaattgcctcaatttagatttgatccttaccaatcatattcgagtacaaatttgtttgactgaccttttttttaccccctagctctaggcagttcttgagtataatatgctagcggttagtaccatactgccagctctgatacattactgcctgttggccgtggccacatgagacgatgcatgtgtcccgtaagttatttgaaatcacccatttgtttctaaggaggtcagcatgcacgaattaagttggcatcaaaagcaatgctcagttttgtggacggcgtagagttttgtggcatgcatgaccggatttatatagttacaccagctgaccagtgagtatgtgctggatttatatagtttacaccagcgagttcatgcgtgtaaaggttactactactgctcgcccgtcaaggaaaattgttactggctgcaaatgactaataattttggcgatgatttgttgcgaggcttcaagttacttcccaagttaaaatcaggattctagctagtgtcctgtggggccttgttctgcgacgttccatgggttgatttgactcaaatctcaggacttgaacaactctactgagtgatcactgagtcgtaaatgaaaacattagctcgcgaggttgaaaaggtccaaagattcttcttcctatcgtgcggaaggagacttgaccgaagcagtacgtagactacgggtatatacgctagctgcggccgagaattacttgtaggagacccctacactcgctggccctctctagctaccgccagccattgctcccagccaaccatctcctcttgctctgtctttgcagaacacaactggaagagaggaagaggataagaaggtgacaggaattggaacatcgaaatcgaatctctgccctgcccgtcacccaaggtaattttgttcgaaatttatccattttggatttgaatccgtcgttctttcctcctcccttacagtctgcgtaggtaattcgatacattacgcatcccgctgagatgcttacaacctctttttgcgtcttattagatcgatccaatcctttgaaatcattttgcattatctgacgaagacattttgtcattaaaggattggttagggaaatgtcagagacgctggctagagccgtcggatcgtactgtaatatagtattgatatgaccttgttcggaatacatgaataattctcttgatttatacatcagctgaaatatatcatgtgatcatcgttcaacattgttgtgttcagacagcccagatactagtactaggtatttgcaactcaatatctacttgacgagatcaccacaaaaaaaaaaaaaaagagagaagaaactcactgaccatttgtacacttccaatatccctggtcttcgccttagccagatcccacagattcttgccagttttttttttactgtacctgcaaggaacaaccacaatgttcgcttaaaccatgaggttcattgtaagataacccaggaggtgacattactcctatacaagttatacaaacaagaaacgtattacctgatcatctctgaccatgaaaccatgaccaagtagcagtgttcaagaaggtgctaggcgctagtctggcaccagggtgatgcgtagcgcctagagccaacttgggagggagaattgaccaggtcctagatagtgagttaagtatacaacataacaaattgcagcatgccaacatccaacttgtagaaaatacatgtgtttaggatttgaatatttgattctaccatttgtttgatagttgccaacatgccaaaggctgaaatcggcaacttacaccacagcagcaacatgcatccaactatccaagcagccgccagaaccagaccaccaccaccaccagtcagccgcctagttgactaatcgctgctgcacctaggcgccaacgtggaccgatgttgaccatcgcgctgacgtggaccaatgtgctattcgcagcgctgagctggtgcttggcaccgaggtgccgcctctaatggtgatttttagaacactgccaagtagcgctaagcctgccacaaaacaaaaggtagcacccaagaaaactgatggtatatggccaaaacttggcaagtactgtcctaatcccatagcagttgaggcagagacagaggattgcttaattcaactcactgtcaatgctagtacttgataaggatcagaaaaaaaatagagcaattaaattggataaatgtttcactgtcagttaattttgtttaataataacttagtgcaccataattaatcctgtacaacagttattatttaaatttgaattgatatttgcagtaagagccattttgcggcccttgaccgtaattaattgccaaaaaaaagacatacaactacgattcagtacagacaatatgaaagtaagcaaacatttgttcactattgtattttctttttctgacagacaaccaagatatgaatatctattgttgtttggccttatatgcaaaatgaactaactatggttgtacataacacatggttttcggaataaatgccacagttggtaaaagatagtttgataccactgaaagtttactcgtttagctttagagaaaacaccatgaaaaatttctggtcatgttgttgcagcttttcatcaccattgaaagccacgttacttttagattttgaacttaatgctctcggtagagatggctttcccttataacattcttgcagtcaaatattaaaagtta

SEQ ID NO: 6172 - DNA, 17575 bp, Oryza sativa
cctccccttcgccctcctcccctccttatccaatatagggggtcgggaacgggggaggtcgcaccacagcgacgacggcggaggtgccgaatccagccgcggacgtagccgcctcgccagatccggaggggagggccgccgacgccaccgccctcacccctcccagcggacccaccgccgcggcgtccacccttcgcgccgcctccgccttctacctccgcctccatcggatctgggaggagggagggaagcccgccgctggctccaccctccgcgcagccaccgccttgagccacctctgccaccgccggtagccgccgccgccctccggcggcagctccggccggaacccgcgtcgagagaggagaggtgggaggggaggggaggggaggagaggagagggaagggagagaatggggagagggtttcggaattggggggttagtgtaggacgttttgcagaaaaccccctatagtttttatatttacatatctacccctaaaagcggaattttctcttcttcgcattgtattttcctgaaagacgagcggttatatgaaagaaatacaacgggatgtcaggcggtccgaggacgtatgcgatattccgtgaaaacacgaggagttttttacaaaagttcccagccctctcaccgggagcagcccctccaccctaaccgccacgcatgcacaccaccacagcgcccaaattttgattaaccggcgcaccgcttatgggcggttggccccgcgcacgcgagtagcaggagggattagcagcgaggtgtaaaactataagatagcccaaaaaaaattcaagaaaataagaaaaatggtggagttagggaagttattgattgatgatttatcaaaaatcagattgatcgttacttgtccatgtatactgtataattataccggtgatctttctggactgtactgagtattcggttgtgatgccaaaacagaaaaatgctgaacaaaatagattgcataaagtattttcggcaagttgaaagaaagacaattgtgtatgggtggtagggatggcaatcgggcgtgacgggcacgggtagtgcctatccatacccatgcccgtgagattatttgtgcccgtgggtatacccattactacatgacgggtaaggatggttgcccatgcccattgcccgcgggcgccttatgcccgcgggcgtgcccgtttacccgccacaacaaaagcagtggaacaaaaagtctacaagctactaacttcgaatcgaacttaaaacatcaaatattctccgcctcggtgtcgtgtctctcctctgtcggcgatagagtaagaggagagaaataataagggaaataaaagggaaaccgtagaaaacaaagaacgtggcttatgtattctagtggattttactcctagcctacatgtaagttagatttcgcgggtaaacgggcaaagcgggcatgggtagtgattacccatacccatgcccatttacccatcgggcatagcttttgaaccaataagatacccatgggtataaaatggagaacaaacccaaccctaataggatttttacccgcgggtaaacgggcaaacgggcaaacgggcataattgccatccctaatgggtggtgtatgtatcgctgctgatgtttcttgaccgagttaaagatgaccgaatcactgcatgttccaatgttttgttggacaggatcacgttacttatcgtgttgccggttggtaaattgaaaaaggtgctgtgaataatagacacagggtatctaaataaccttttggattcatagacacaaaagttgagatggccgagttggtctaaggcgccagattaaggttctggtccgaaagggcgtgggttcaaatcccactctcaacacatgattctttttttttaactttcctcaagccttcaattcctgcagggtagttttaagcctacacctccttcataatcatctcaaattcaccccaagctaaattaagcctcaattcaaattcaccttacaacattgtaaattttgtattattttcttttaatccatcagttcttttttatactcatctcaaattcaccttacagctaataaatgaagcctcaattactacttcagtgaacatgtcaacgattaaattaagacggcaagcaggcatcatctcacggtgatcactgacagaggtaaacgaccactgttgcctctaattgactaataatcgcaatataatcatcaaatcagttaatcacacatgacatccatatcgaagacccatgcaaagcaaaatagagtatggctagtagtaggaggaggccttgtggatggtgaggatggtgagcatgaggaggacgaggtcggcgaaggcggcgatgagggcgacgacgacggcggccatggcgcgctcgcagaagggcccgtacacgtcgcacaccttggcccacctcacgtgcgcgttgccgcgctcgccgaggaggccgaactgcgccgccgcccccaccgccgagaagagcagcgccatcgccaccaggtcccccaccatcaccggcaccaccgcgctccgcctccgcaccgccgccagcgccgccgcgctgaacgcgaacaccatcgcgttcgccaccacgaagtacctgcatgcgtgaattcggagaaatttgttcatgttttcggccaaattttcgaagaatcttgcacgcttcgcaagtcgagctctcggatacagttcgtccgctacaggccggggttggaatcctgaattctgaaatcgacggccattagcgagtgcgtgccctctcgaatgttcagtgcattcgtcgcatgaagccatcgtcgcatgaagccatcgtatacggccccaccgtgtattcgtgaaataagccaaacagagcatatttgtaaacaaaaaataatctgtgaataaaacttatatatatatatatatttagtgatataaaagtattgacttaaaaaataaacttcaataaaaaaactaaaaatcaactcaatttaaaatttaattgataagtatgagtataaacgaaaagatgtggccgatagataaccgtcacagtcacgctttatcgtttattcaacatcgttcttggcgtgacgctttcgatgcaaaatcgagacaccgctcgctcgtgcatgcacgtttgatctctagctgcacaagtaaaagactttctcgaagaaacaggggatcaaagggagtagtacaattaggtagctttgcaaactatgggaaattataaacgggtggtttatattcgctttgttaatttttggtttcccaaatcaagcagcaaacactgctcctaccatccgaattaacgtaggctacatttgcacgcaactcaactggcatggcttgcatgattgatggaagatcaattaagatgaggatcaatggacggacaccgtcgatcggtctcctgttctccagtccaggctccatcaaatttatggataagatgcatctttcagtaattgcgattgttcgatggctacgaccactactactacccatttgcaatggctgggattaaactgtactaaaggatatatattatatatattccgatatagtagagcattttcttttccttggatggatgaataaacggtgttacggtggtgatcttgataacgaagaaagcatcatatccattttaccttctccaaatctctatccgtatcgatttctctcgcctttctgtaaaggccaaatcaacggtcgttaatttgggcctctcctcatccaaatcaacggtcgtgaaggaaagaaattttctgtggctgctgctgctatcaacaaacaatgtcacccacagtgccacatgaccaactcccataattttgcatagattggcaataagccatggttgtgtatcactttcaaaaatagtaggaacactaacaccaaaaaatatttgcgaaatctctttgtctatccatggatgaacacgtcaatgaaaaatagggtttcaaggttcgccacgatgctagaacgtgatttgtatgtgtaaggtaaaggtggcaacaggagttgaagtggatggtactagtggtaggctgctggtggcaatgcttgggttgtccttgtctaattctgtcctgggttttctttagctaatcagtgtgtccactactatcaaatactaccacgggtggataaaccttcttctgtcccggtttgcaatcctctatagtcccgggttataaactgggaccctgaattcgggactaaatatggttatctttagttttgagcgaaataattaggaaaaatgtggttttcggccgacccagtaaagatcaattcttcagtagtatactacaagaaccgtaatttacataaataatttaattatttcaaggaaacaactttgaaaccacacagatatatatcaatcattaattaattaaacaagccatgcatgcatgcattctactatatatatattattccgatgctgaaaaatttcaccatcagattactaatgaaaccgacaggagtactaccaagcataaaaaagaaagtagagcatcctgaaaatccctaattatatagtagtatctgttgtggcatccttgtctgttgtagcatatcataaaagttctttccattaattaggtaggagaaagagagaaacagaaggcgccttgtttggacgtgtggaattaaagcagaggccagcggcagagaatggaaggtagtagtaggagtactagcaattaggacatgcatgcaaagacatttcttcttgcgtgtcatcgtctttctcctcaaaaaaaccattccgtttcttccttccttcctcggaatcgatcccggaaagatctaccgtacaggcacataatgacgctaacacttcactagaggctaagagcatgtacgagaaaataaacctataaacaaatattgaaaaaataaaagagaaaaaaaaagagtagcgagttataaatttataattagctgtagcacggactgtaaaacgcaatatgtatatgacaagtgagactagtgtagtatatatttataggtaactattgtataaattgacgagtaagtagttggctatactattaaacttgctctaatattaaacttgctctaataataaagatgcatgtgtgcttaatttgattgtgttctatgctggagaatgagacttaaattattcaagaaagagcttgttttgttttcgaattgtgagggagaagtagatcgggatttggaaattggaatacaggtcatgtgtaattggcaagacatgcatgtgcctgtttggacccattttttttcaaacctacatgacatatgtgtactccttgtatactttgtcctatgtaatgagtgtgtcactggggctagctactgttgcatcaccaaagtagagtaatcacacacgagagaaagaacagacagaacaaaagagaacaaaaacacaagaaggatgtagtagagagaagagagaaatgatcatgctagctgcaactgatatggtgaattaaggagtggctgcagttgattaaagagcggcagtgtactggaataattgagaaactaattttgtaggcgcatcatatatcagtgttcatgcacatgcttggatggaaatcaatggagcagtagagagagacttacacgaaggcggaggagtaggtccacttggccgtgacgggcacccgcagcggcggcgcgagctcctccccggcggcgatctggacggtggtgctctgccggtcggcggccatcaccacagcggacgccagcgtccccagcaggacgaacacccgcagaaccacgcagcacgggtccaccggcggcgccctggaaccagcggccaacggcggcagcgccgcgccggcgcccgtgtagtagccccggcggctgctgtagtcgaaggcggcggcgccgccgccgctgccgttcaggccgggcttcccccgcgacgactccattgctggcgcgcggtgcggtcagcggttgccgcgctccgctgtgcgggaggcgctcttctccttggaatcgtgggtaggcgagaggagcagagcgcgtgtgtaactactggctggctacgtactactgctacctgtgtgagagatgtagggtacggtattgtggtgtagatgtacacaagattttgttgttgggtggggtatttatggtacagagaggtggtatcacctccaaggtatggttaccctcacatgtgagtactatcataccgatgctcttctagcgagtataataagcgatagaaatggattttcatctcttgaggagatgtctcctcgttgtttgtatgtcatcgaaatagttataaaaaattaaaaatttaacaacatagattaatatgaaatatatcactccacaaatatgtaagaccaaatttaacttttgcgagttgcaacaaaaagaacaaaataaactgaaaataaactgaaaatagttatcgtacattcgcagatatatttgttatttttattataacttgtagaagtaaaattttaacttgcatatttgtggagtgatatattttatattaatatatcttaccattttgtttcaaatttttttatgactatttaggtggcatgtacgaaatgagggatttctcctcgagggatgaaatcactttcccataagtgaagtaattagcgaactttaaaaactatatccatcagatctatgtttagatacaggatagaggagggggaaaaagaaaagcaaactacagatttatagccaactgcaacatgggttccaagacatcatgcgtgtatgagagttgtgccaggtattaatcgtatagtatatatttatatgcaaactacttagtccataagattggttattggttaaatcttagagctattaattgactatactatttaacttgctctttcttacctttgatgactcctgcgatcaaagatggtgtgggatcttgcggctggccaggcttgacgagggcgctcatgcggcggcggcgaccagggctggatgaggacgtttgtgcggaggacgtgagagacggcggcagccgagcaggatgaggacaggactccgatggtcgcaattgtcgatgaacactagtgagggtggcatccatggcggatgcaggaggcagccgagtttcttttccatctatgcccccacaaccttaggatgcgccatacaaccaggcgataaattagtcgttggcttgttccatgtcattacaaaatcctataggaagttggtatcatccattatatatgtgctctaagacgctaacaccattgggtttggtttgaactgaaaggtatgaggtctcaaatcaaacatgttcatgctctggccaagcctaacccaacccattgttatccctgatgactactataatttagataacaaatcaccaacaaattaaattgtaatggtgtttagcattacatttgtttatatttggagaaaaaatacattttttttagcaaagcactaaagtgaattactcaaactaacacaaactagattctgattggagtgttaagtatgcatgtgatgtgttgatttaatgagttcgggtgtcatgcctaataagcgtgcacatggtgtggagaatgaatgcaattaccttcatgcataatttgcgtgcagcatgattgggatatcttcattattattaaaaaaatccacaaatgaatcataatttgctggcattatatattttaattacttctattaattatgctgtcattgtgaactaaattctacaaaagatgtagagattaaatcgatgttacataaagcaagcaaacatgcgtccatggaggttctagagcctagatgcaccaacatgaaataaatctaaacctgtcttttcgtgatccttccgatatatacactcctttgtcccccagttccatgccttgccggcctcctcacacttgattgtgtgcccccgcttttaaaaaaactcgtacaaatatagtgcgactcctctttgtctgtccatgacgctgaaccttctactgatatgacggtgtggctgattggattgaatccgttctgctcccgcaccaccccctcctctgtttcggccattttctagtgccacttggtaaggaacttgtatcatatattcatatgattggagtatatgaggttgattgtctagtttgacgcatcttctgttagaattgattatattttagaacggggaaaatgatgataaatcctctctcccaccacttagacgatttgatggcatgttaattggaagtacttcataaatatttattattatttttgataatggaataaaatgtatacttattatgcttgattattaatttattatagcgagaaaaataatagagattagtatatttatgaattatatatatgctttcattaaaataaacccggtgatcataaagattgttgtaagatcttatacaacatgctttgcttaacacaccctcctcttttattcaattctaacaagtactccatccgtcctaaaatataacaatttttagcactcaggatttgtcctaaaatataacgatttctccaccaacattcccttcccaaccaatcacaactctccaccattcacttttcccacctacctccacttctcaaccaatcacaacctctttctattcaattatacctactttcttaataaccgtatccaactctaaaccttcttatattataggacagagatagtatgtaattaacataaaagcatctctaaggaagtggctatttttgactctccaaatgtcctatttggcaacttaccaaaaatttagagagccaagtacgttttactccaacaacatgtccattacactctccaatttaatagtgggtcccatatgtcagtctctgtgttgttcttcacccacctctctcctcctctcttctctgcagtgcggcacggctatggaggtggcgccggcaggagtagcgcgagcgacggaggacgacgggagctacacaggtggcggaggacaatgggagcggcacaggcagcgaaggccggtgggagcgatgactatggcgacgtcgaatccatgcgcgcgaggcgacgacaatggcagatccgttccttgctagcctcgtcttcctcgacagccatccgccatatagcctccctccttcccttgctactccctcgccgtcgcgccctccctccctcaccgttgcgccgccgcctccgctccgctcgttgcactggtcggccggcggttgacccgcggcggtggataacgacgaggcagcggacggcggaggatgcgagtgagcagcgatggaggcgcttgacccggcgacgatggcgagcacgggcagaggatgcaagcgagcgacggtggataacgacaaggcagtggacggcggcggcctcggcagcggtcgacggcgtggcggacaaggggcagcgctgacgtggtcaatctaggaggagggggatgttgctcccggagggagagagaatatgagacgggaggaaagagggagaggggaaaaggcgtggggcccacgattggctaggcaattttagctggctaaagttggccagtgcgaggaggagtttggccagctggatagccatgctagtctgctggagtgtgtttttatccgaaattactaagttttaatttagaggagatagagaggcggttggagatgctccgctcttctcctccacctcctgatctccattctccagtgcctccgtcgcacatcgtctcacatctctgcccttgtgtttgatcgcgccgtcggtgtgccacgtgggaatcgaagaaggataacaccatcgatcggcgggcgtccagtgtcgtgccaaacggctgacgtgtgtagcattatcttaacatacttattaatttcagggtgcgacgatgaagtacgggacgtacgacggccgcgcggcgccgaacacggacacacgcgtacgtacgtgcgtacaacgtgcaacaaccacgcgatcaaacacgtacgcacgcggcggcgcgataggaagctcctcgtataacatcagatcgagccatccagcgcgggggtgaccaactatcaccgcccgcaaaacggcgggtcggcatcggcatgggcagcatccggtgaggcccgtgcacattacgaaaatataccgttaggaattacttcatccgttttagaactttttagtattgtctatatttatattgttaataaatctaaacacacaagaactttttagtattgtccatatttgtattgttaataaatctaaacacacatatatatgtttaaattcattaacatatatatgaatatgggcaatgctagaaagtcttataatatgaaacgaaaaaagtatatatgtgcagtaaaaatctaaaaactattgttgtattaaaaaaatgaacgtctgatattcgtccatattatcatgagtaaaatttttactcgtaaatttacttatgataaaaattttactcatggtgacatgaacgagtctctgacgtctatttttcgatttaagggtagttttcaggttttcaatatatatatggtttgccccacatattttcatgtgcacataagcacaaggaaaaagtacgaatgaccttgtgcatgtaaacctaaaaatatcgtggtcgatcgaattaaccccccaaactcgaaaaaaccaaacattttaattctcaactcttcaatctggatgaattacaccctccagcactattttgaatggtttttggctaggctgcctgatgtggcattttgaacgtggaaaaaaatatttctaaaataatgggtccacctatcagtgctccatatctcatgtgttcttctcttctacctccccatctatccctagcgtgggcatcgacgccaccgacaagccctctcgccacctctgccaccagcctctccatcgccggtgccggcagccacattagcacctcgacgccctccttggagcagcacacaccaaggacatttaggtacgtcttcttccgcttcctccctccgccgccgtcgcctttgtccccacacctctttgacttgggcagcgacagtcttgccttgagcccttccgcctcatcctttctagccatcgccgattcaagagaaccaaatggggatcaagaagaggtgatctggatttgctgcaaggaggatgaggacgtggcggtgtcgtcgacgatagcgacgatggcaccaaaagatttgtgattttgtaatcgacgggcagctaatccggcaaggttgtgtttgtcaatgaggatctcgagctctctcagggtggcggcagaggctcgagacgtgcatctagtggtgatgggcggacgcggagctaggggtgcgattggtggtgatgggtggacacagagctcgaggtgctggtggtggatctggctgcaacagagggagaaggggcagatcccgttgtcggcgccatgagactccagcttaacggtagccgctgtcgctgtcggtcatcagcttagcttgtatggttgcctccacactgccgaccccgacgactaggatgacagagtgttcgccgcctccaccatgtcagcaagaaaagcagataaggggaggggaaaaattgcagcattgacaactgggctccactgatttgttttttgtttttgctggctaggctgccatgtgtattgtctgcattccatcaattttggtctgaaatttatttaaagattcaaatttcagttgtcaaatttgtgatcaaataattctaccatctttgtttattttgcaaataagtgtttttttttgcattgagaattttgttgtcccaaataggctagcatataagtatgagataagggcaacataggctcagtttgaaagttcgtttagcttttgcaattctatcatttgtcgtgatctcattttctaaattgttaaacggtgtgtgtttgcaaaacctttttacatacaagtttatttaaaacaatactcatttttcaattttatatttgttaatatttaattaatcattcactaataacctcctgtcttgtttcgtgtggaacatatcagtttaccccaaatataggttggaacgcagccataatcattttgaaggaaaattacacttcaatatattagtacaagtcaactcacgatcaaaactatttggacgaggcaaaatttatgtgtatagcaaggtttgagggaaaatttatgggctaatgttctaaaaaaagaactaagccgaagttgcctaacacgtttgaaaacgatactagtggtgatatccgtaccactaaaatatctctaactagcgcttgtctaaatttagagttaaaatatctttatattttatatttcaagatgaatgtagcattattctagtactccatacaacataacctctccatcccataaaaaaaattaaatttaaaaatatactgttcatccaagttttttttaaaataccacccgcgacgtcacgcccacgtcattttcgtgcaatggttgtacgaaatcgacggtatatttttggaaaaattgtgcatcccaaatatcctagaaattttttcaatgaacagtatttttaaaaatttaattccaaatatgacacatcctaataatataataatatgagacgattacaagtcacaaatcgtattattattattatatttttttaatggaaggagcgatgcacaatctaaacacatcgcaagtcaaacagaaaaaaaaggataaatgaattaccatgaacggttgtttggaaaaaaaaagcagcccaaatgcgacctgggcctcatacttcatcgatcccctcccgacttccctcgacaagaaaattgtgattttgctatcgcaaaagaatgatttcgctggaatactattctttcaaagtgattaaatgctattttgggtcttttggttagaaatgattttgctctattttaatttttgttttgaccaaaatacccttgtctcttttacctgtttgaccagatcgaatcgatctcatccagcctcttcggctcgaggagggaagcctcgccgccgtcgcccatggtggcctacgcgcggcgccgccggcgccacacctggctataggcgggctgaagagggatgcgctctgccggctagacgccacggccgagcacaagcaggacgagagtggcctgccgtgccgctgcagcaggggcggacggcaacgtcggcgaagatcgagggcacccgccgccgcatgagcgactctcttccacgccctgccgagaagcctcgccgccgtcggagcccacgtctattgctcccatggtggtgctgtgcctgcgtgcggcggcggcgtcgccgctgcaaacatcacgccggcgcccccgcatcggctccggctctggtgccggcgcctgcctccgccgctcccccacctgcgtcccgatgccgacgtccctgctggaggaaggcgccaatcgcgtgcgccgtggaggtggccggcggtggcgtagacgctggcttgttggagcgagcaccgcatcgggatagtaggggaggaagaggggaaagagagaggagggagtatgacaggtgggaccacgtcgagggtattttggttagacaaaaattaaaatagagcaaaatcgtttctaataaccaaaaaacgtatttcagtgaataccccttagtttaggatagcattttaatgaatcactttgaagatagtattccagcaaaaccattcttttgcgatagcaaaatcacaattttctctccctcgacggcgccgcttcccaacgtccaatggcgagcagccggctctcgatccggcgggtgtagtctccgcggcgtcggcgacggcagcgggaagcttcagcttcggccagatcgacggcaccctcgccgccggtctccgatgggaccaggtatgcccgcctctactcctaggtctgtccgtgcgccgcgcttcggtgccgatcgatcccagtaactcgttttatcccacatcgccgattctgatcaagcgcgacctctttataaggtcagttcgactctacttcatcgcctcaccaggggcacccgccccgactgaatacagcgaaaattatcgcccctgtgtgcatcggctgggcatgtttgtttatatacccccttccggttaatagctgtaaaaagaagaaaaaaaaggagcagtgaaaagattcaatacggcaacgataaggttgtgtcagtcggtcctctggttggaggcagcgctagacactagcgccttagcttttttaaaatttggattttttttttctgttgcatccttttttagtctgtcttaagccaagagaagcttaaataaagtcttaaaacattaagatggagtaggagaggaattgcatacagctgtttcgatatgcccttactgctagcagtttcgccttaagatgcaaaacttctatacattgctgttttgatatgcccttactactagcagtttcgccttaagacgcaaaacttctaaccgactgaatttccatgtttcgactggatgccggtcagagatgacttggcagatgaataattttggattcgtactctgcagatacgatggttagcatagtattagtagtgccttgtcatttattcactgaattttggcttatatgcagttctatttttaatagtaaatttctctgtaaaatttgcatttatatctgaattaatttacgctgcaggactatggcagtaaagatttggctggaacatccaatattttcagccaattgtctgaagatgtgattaccaaggatgcaaataactagcaacaagagcaggtatgtgcagagttgcagacaaccgctgagactcaaccgaattcatccaggcatagaaacggaaaaatagaccatagcagcaatagttctgatcaggtagatgaagaatccaacattttgaagagtcttttatgttgctcagggattcatgtaagtaataatttctgatccttaagtcaaatgattttttttccttaatttttgtttgtaaaaatgactgtcctttttttaattttctcagagtacataaatatgctgaaggaaatagcattgtcgcaaagagatgcaaaaggtgaaacatgggtgctgaagaataactgccagtaattttagctgaagctgaccgtagcaaagttttggttagtgtagcgaactgcaaacattaatttcattcagatgagacatgcaaatttgattgagaggaaatgtctcccatgtcttcttaaaaccttgtggaatggctagctggttctttttgtaggaaggacaaatctgaaacaagaagatgtaggtgacaggtacatactcgaatacaaacatttggtattgactggaggactgaaacattttgttctttcccagctttcaatgccatacagtattgaagcatgtcctggtaatacttccttcaaattcgttcttttctcatttgtcaggttgcgagctccaacaaatttggtgcaaagtttgttatgggaacctggtatggagtgtacacgggaaaaaggtatatcaacagaatgattaactgatcatgcttaatttgctgagaccttttacagtgtttgcatttctaaaatagtatagatctaacggctcacgatgaaaggtgccttatgaaaggtatcagaggtagaaaggtactaaggattaaaaggtaattgataacagggcaattatgtctaacaacgtatggacgtaccgaaaggtacggtgtaagtggatttgaaggtaccacaaggtaccgtgtaagtagtttttaaaggtaacgtaaaatatgatttatgtggtggggacaaaaattacattctcttctattcggtttccaatcttcagtcgttctgtttgcgtcggtttccaaactttggtccgattcacgtggtacatatcatattcgcatgatcttgataattatttccagttagtcattaattttcatagcaatttggtgatccatcgtttgatgaatgtaatcaaagatcgaaaggacaacaaattgagaagatttacgcacctaacaagaacaaaacaagttcaatgaggaagatttgcgaaaaaaactaaaccaatcgtctgacagatcgagaccatgcggccgcttctagctccggcgaacataggcagtcctggaccacttcctccgggtcctcttcctccgccgcccctccctccaaccaccgcctccggccacacgttcaccgccagccctcaattctccacctttcaacttatcgaagaacacgtaaaccttacgtacgaatagaacgtatctaagaacgatgcaacgcaacaggctacaagctaattccatcgataccttctcataccttttcatatgtgtaaaagacacatttgtcattctaatatcatcatatttacattaatgccacctattacaatattttctttccataccttgcccctcgcagatcaacggctcacgtcgccccacctccttgtacctcgcaaacatcgtaaaatccctctaatttgttattttctttgagatagcaagaagtaactgaactcactacttgaatttgatattaggcaaacattatctgactagtaccagcattttaatttcttttttctgattgcccatgcgggaacttattattcacttttgatgtttcaaccattttgtacagtttgtccctgcctacataattcctctccatgtttatctaaaaatggaaaaagtattcgccatgtttatattttacagctttctaatattatggtctgccttcacatgtagcatcaattctatagcaaacattttgctctgcacttcaatcagttgggcttgaatttctctcataaatcgattatgtaatggttatgaattgcacttcaaattacatgcagtacctgtccaggtcgttggttatttgcctccataaatcgatccttcgtatttttttgcctcaggtctctgctcttatatagaagtagtgaatttttaattcccatatactacgctatccttcttcgaacatcagtgctaggtatttgtcaactactgctaaatatgtggtaaacattgtttactaattgctatcctgatggtttttctcatggaaatatagctggacttggttgtttaccgtatacgaggagaaccatttggattgaggcaaggtgatccattatcaccatatttgttgctctgtgctgaaggcttttctgctatattactgaaggcaaagaatgaagaaagagttggtggggttaaaatttgccaaggagcaccatgcatctctcacctgctgttgccgatgattctttaattgtgattcgtgcaaacgggaaggatgcaacacaattgcaaggaactccccaattatatgagctgccttcagggcaaatgataaataacgacgagtcggctgtaatttttagcaagaacactagggatcagaagagaagtgaggtgatgcaaatgttgcacataacaaaggaaacacaaaatgagaaatatctggggcttccaatgtagattagaaaatctagagctgaagctcttgagtatctaaaagataag

SEQ ID NO: 6173 - DNA, 70881 bp, Oryza sativa
tgactagtaactgtttttgctaggcaaatctgtgagttgagtgattttaaggaacatatactctttgagcaagtttatagccaatttagtaaaaatctcacatcttatttacattcttacggggatatttctgtgacagacattatattggattatagaaggaatcaaagagatgctagccatgacctttcttctcaggaggtgatgcttcccttttaccagtgacattttctgctttatgaactacagactgagggggagatgcagcagtagcttcccttcctacttcaactaccaactgcactaaaggatccaagctagaaaaaatttcttccttggagatatcatgatctatatacttggattgaactgagttcatattaatgctaccacacctaacattaataaaaaagaaggtgtttgtttttcaagaagaatgcatgtggtaagtttggtacagagtagagatcaaaacagtaaacagcagctgtgatcggttgggcaggcataaacatcttcctaattataattagttaaccatgcatttttgaaacacggtttctttctagaccaagtcaaactctgacccaaactaactctttggattattttagttattaaatgtagaaaagctatattaaataggtagttgcctccctactttcccagtgaacattgttaaacccacaagtcaaacatggatcacccatattttgttaaagaaactatgcaatttagcacgcttgacctaagaagctaagaccaatccttgataatactaacatgcctaaccatgctcctaatgcttaccactccaaattcaagtatgaaagctattttgttatgtaacctaaaaataatttcgaacttgagaatcatcgatatcgacactagaatacaagaagagagaagcttataaattttaagtactaattatgactgtcagaaacaatcagaactaattactgctctaattttcacaaaggaaggatcaataggagaatggaaaaaaaattgctaatcactactccatttcaagactgattcacacgaaaaactgtctacgagagaggttgtgaatcctgcaaaactgaatcctctactcgtcgtctttatctcggctacaaatcactccagcagcagcagcaatcaagcaccaacagaataccccaataaaccaccagatctggtgaaagcaacacatcaaccgcacggatccgcgaaagccagcatctcttctaccgatttcccaactcgacaagggagatgttaccctcacccagatcccgacgcgccgctggcctgctgccctgcacccttgccccgtgccgcgtgcccccgcggcccgcgccacctgcccgcctctcgattgcaagtcgccggccgccgctggtcatcgtcatcgtcatcgtcgcagctagcgtcgccgctgtcgtcgccgtcgttgcagccactgtagctgtcgtcgccgcagccgccgccgccgtagccgctcgctcccgcctacctaagcccgccgccgccgctccggagggcggaggtgggtggatccgtgtgttgccggtgctcccgctcacgccaggccgctcccgagtacggaggccactggattcatgcgccgccgtcactcccgaggacgggaggcggcgaatccgctcgccaccgtccttccctggccgggggagcgacacggggaaaggcgaagaggtggctgggggcggcgcgatggattgaggaggagagggatgttggcggtgggggaatggatggtggcgccggcggcatatggatttagttttggctagggtttggggaagaggttatatggatgagaagcaatccgacacgaatttaccaaactgtccctggtatgtccacagtagttacgaaattgtatgaacaaaatggacatttcaccttaaatttatgagaactttaaatttaattttaggctgatttttgtgtttcaaatgcaaaaatcataaacaacaaaattgtagaactcatcaagatctacaactattatattggtcttttttacaaagaagttcatttgaacgattcaaattttgaattttcaaaatttgataacgtcaaacaaaaattgaggttaataaatgattcgaaatggaaaagtcaccaaaaccaaagttgtagaactcatcgagatgcaaaatttttattttggtcatttctccatctgactctaattaaataatttgaaatttgaaattcaaactttgagaacttcaaatagattttttttattagtgaacgacttcaactgaaaaaatcatcaacaacaaagttgtataattcatctagatcaaaaatttttattttggtcatttgttcatccgacaaagtaattttagtattgtttacaaaatttacatatctcttatatggttttataaactataagagagatatgtaaattttgtgaacaatgttactatcactttgtcggaagaagaaatgaccaaaataaaagttatagatattgatgagttatataactttgttgttgatgactttttcagttgaaatcattcagtatttgaaaatgttgtttgaacttgtcataatttgaaattcaagttcaaattattaaaacaaagtcatatagccaaatgaccaaagtaaaagttatagatattgataagttatacaattttgttgttgatgactttttcattcgatatcatttagtatttaaaaatattgtttgaagttgtcataatttgaaattcaaattcaaattattgaaacaaagttatactgaaaaatgaccaaaacaaaagttgtagatcttgataagttatacaactttgttgttgataattttttcatttgaattcatttactacccaaaaagttatttgatttaagagaagggaggtaaaatgtacttattggtgaggggggagcaaaagggcttggccggtggcccaaagagggaggaggagggagagagaggctgcgggctaagggatggagagagtaatacttgagccgaaaaaggcccaaggacagacagaggaattttaatttgtttttcatttattttaataggttaaataaactttgtggtattaaaattagttattgagctccaaaaattcacggaaaatttaaaagaataatttagaccaacttatagccattttagtttgtttttttaacttttttcattcaatcataaaatgaaacgccataattttgtttttttattcataaaatgagactagagatgacttcaatcctaaaatcctaaaatgagatattagaattaatgtagacaagaagagtccacctaggaaaaacgattatggtctagtagcaatgtagtataactagatttttttttgtttttaaaaaatataatagttctatattttatgacgatccattattgtcatcgtgctatcgtcacagagcccatgcagagtatactgtgacgatgattatgacagatacacggtttggtcataaacaactgtcaacctgtgaacaatcgtcataaacagcctctgtttatgacagatatgtgttccgtcatcaggtaatcgtcatagaagcccatatttgttgtagtgccagggcgccatggcatggacccagcctttgttcgacccatccatggtggcacaccaagcgtcaccgttcggagccgggcagccgaacactgtggcccaacctcacgcgcaaatcatgacttcgccctttgccacgccatatccaaagccaaacaggccttcgcagcaaggtgccgtgaacaaggcaggggcgaaaaggggctaccgctgagcgggggaatcaagattcgtccaatcccactccagttcaagttcccacccgttccgcggtactcgggcgaaacggacccaaaagagtttctgtccatctacgagtccgcgatcgaagccgcttacggcgatgaaaacaccaaggcaaaggtaatccatctcgctctagatggcatcgcccgttcttggtatttcaacttaccagctaatagcatttactcttgggagcaattgcgtgatgtttttatccttaattttcgaggcacctatgaggagccgaagatgcagcagcatctactcagcattcgccagaggcttggggaatcgataagagagtacatgcgtcgcttctcacaggcgcgatgccaagttcaggacataaccgaggcgtctgtcatcaatgccgcttcggccaggctactcgaaggcgaacttacaagaaagatcgccaacaaggagccgcagacactcgagcacctgcttcgtatcattgacgggtacgcatggggcgaagaggattccaagcgaaggtaggaaatccaagccgagtacgataaggcttctatcgccgttgctcaagcccaagcacaagtacaggtcaccgaacaggctctccctaccattcgtcaaccccagccggcgaaccaaggacagccgccaaggccgaatcaagctcccgtaacttggaggaaattcagaaccgaccgtgcgggcaaggcggtgatggctgtcgaagaagtgcaagccctccgcaaggagttcgacgcccaacaagcaaacagccatcaccagcccgttcgcaagaaggtcagaaaagacctctactgcgcctaccatggacgctcttcgcacaccaccgagcaatgccgaaacattcggcagcgcggcaatgctcaagatccaaggccgcaacaaggagcagttgtcgaagcacctcgcgaggttgttcaagaacaagcacccccagccgaacagcgccaacacgtgcagcagagagtaatccaagtaattacaagagccgatccgccagctcaaccgacaaaacgatagaagaagatgcagctgcgaatggcgcacaacatcgcttcggtgggcgaaggggctccacggtacttgaatcagcaaatccctttcgggccggaagatattgaaggagtgctgttcccgcatcaagaccccttggtgatctcggccgaggtagctggctttgaagtccggcgaatcctggttgacggaggcagttcggtcgatgtcatcttcgcggaggtaccggcaaggtacggtgacaagggctgggggcgaaaaggagttgagtccaagctggggggccgcgaagccagcctagcctctggttccctttcgccacacccacgcccttcaccacagtacccgcaacgtacggcgacaagggctgggggcgaaaataagttaagtccaagctaggggccgcgaagccagcccagcctctcgaccacttttgccacacccacacccttcgccacagtacctgcatggaatggcgacaagggctgggggcgaaaatgagttaagtccaagctgggggctacgaagccagcccagcctctggacccctttcgccacatccacacccttctccacagtacctgcatggtacggtgacaagggctgggggcgaaaatgagttgcttccaagctggggggcctcgaagacgcccaagcctttggacccctttcgtcacacccatgcccttcgcgacagtaccggcaaggtaaggcgacaagtggtgggggcgagaaggagttaagtccaagctggggggctgcaaagccagcccagcctctggacccctttcgccacacccacgcccttcgccacagtatccacaaagtacggcgaaaagggctgggaacgaaaatgagttacttccaagctggggggccacaaagccaacccagcctctggaccccttttgccacatccacacccttcgccacagtacccgcaaggtacgacgataagagctgggggcgaaaaggagttaagtccaacctggggcccccgaagccagcccagcctctggacccctttcgccacacccacgcccttcgccacagtacccgcatggtacgtcgacaagggctaggggcgaaaatgagttgcttccatgctgaggggccacggagccagcccagcctctggaaccctttcgccacacccactcccttcgccacaataccgcaaggtacgacgacaaggcaaaggggcgaaaaggagttaagtctaagctgggggccgcgaagccagcccagcctccgaacccctttcgctacacccatgcccttcgccacagtaccggcaaggtacgatgacaagggctaggggcgaaaatgagttgcttccaagctagggggccgcggagctagcccagcctttgtaccactttcgccacaaccacgcccttcgccacagtacccgcaagatacggcgacaagggatggggcgaaaaggagttaagtccaagctggagtgccgcgatgccagcccagcctctagacccctttcgctacacacacacctttcgccacagtaccggcaaggtacgacgacaagggctgagggcgaaaaggagttaagtccaagctagggggccgcgaagccagcccagcctctggatccctttcggcacacccacatccttcaccacagtacccacaaggtacggcgacaagagctggggcgaaaatgagttgcttccaagctggggggcttcgaaactgccctatcctctggacccctttcggcacacccacatccttcaccacagtacccgcaaggtacgtctacaagggctggggcgaaaatgagttgcttccaagctggggggccttgcctatggacccctttcgccacacccccgcccttcgccacagtaccggcgacaagggttgggggcgaaaaggagttaaatccaagctgggggccgcaaagccaggccagcctctggatccctttcgccacacccacacacttcgccacagtacctgcaaggtacggtgacaagagctaggggtgaaaagaagttaagtccaaactagggcaacgaagcctgcccagcctctagacccctttcgccacagccacgcccttcgccacagtacccgcaagttacggcgacaagggctgtgggcgaaaatgagttgcttccaagctgggggcccgcgaagccagcccagcctctggaccccttacgccacacacacgcccttcgccacagtacccgcatggtacgtcgacaagggctgggggtgaaaatgagttgcttccatgctgggatgccgcggagccagcccagcctctggaaccctttcgccacacccactccctacgccacagtaccgcaaggtacggcgacaaggcctaggggcgaaaaggagttaagtctaagctaggggccgcgaagccagcccagcctccgaacccctttcgctacacccatgcccttcgccactgtacccgcaagttacggcgacaagggctgtgggcgaaaatgagttgcttccaagctggcgggccgcgaagccagcccagcctctggttccctttcgccaaacccacgcccttccctacagtagccgcaaggtacggcgacaagggctgggggcgaaaataagttcagtccaagctgagggccgcgaagccagcccagcctctcgaccactttcgccacacccacaccctttgccacagtacccgcaaggtacggcgacaagggctgggggcgaaaacgagttaagtccaagctggagggccgcgatgccagcccagcctctggacccctttcgccacacccacggccttcgccacagtaccggcaacgtacggcgacaagggctgacggcgaaaaggagttaagtccaagctagggggccgcgaagccagcccagcctctggacccctttcggcacacccacatccttcaccacagtacccgcaaggtacggcgagaagggctggggcgaaaatgagttacttccaagctggggggccttgcctatggacccctttcgccacacccccgcccttcgccacagtaccgacgacaagggctgggggcgaaaaggagttaaatccaagctgtggggccgcgaagccagcccagcctctggatccctttcgccacacccacgcccttagccacagtacccgcaaggtacggcgacaagggctgggggcgaaaataagttaagtccaagctgggggccacgaagccaacccagcctctggacctctttcgccacacccacacccttcgccacagtacccgcaaggtacggcgaaaagggctggggtcgaagatgagttgcttccaactggggggattcgaagccgccctagcctctagacccctttcgacactaccacgaccactgcaaaagtacccgcaaggtacggcgacaagggctgggggaaaaaaggatttaagtccaagctgggggccgtgaagccagcccagcctctagacccctttcaccacacccacacccttcacgatagtacccgcaaggtacgacgataagggctgggggtgaaaaggagtaaagtccaagttggggggccactgtcacgtcctgataaattcatcccgaaataaaaatcattccttaaaaggaataatagaattaattaaaattcaaaaagaaattggcaaacattaaaatgcgtacaagaaaatttcgaatgtagcctggagaatttttgttaaattctccttggtctaaaaggagccctcaaattttacttgaattttcagagcaccgaaaatatttattaaacaacaacaacaattaacaaagtttagtaaaaagaaaaaaactaaaattaatccccctcctccctttgggccaagtctggcccaaagtctccctctctccccctcggcccgcagtccaagtccctctcccctccctttgtttttctctctttcctcccgggcagcccactccctcctcctccttcctcccggcctgcctcggcccagcagtccggcccaagccaggccgagccgagccagccgcgtgcacgcgcgccgcgcgtgcgctgaccgcgcgcctgaccggtgggtcccacccgcccggtcgtcgtcttcctcccgcactgcctcctctctctcccgtgaaaaccctagttcgttcctccctcgaatccgcgcgatttaagcgttggattccaaaattaattgaggggaattaatcccctttccttcctctctcttttccccctaatctcccctttaatcgtgcactattttgaccagaacggctgcgccattcatggccgccttccatggccgccgggcgccttttccgccaccgttccccgctcctcccgtgctcggctcgcttccctccgctataaaatggaacccactctttgcgttctatcgttttagcaccctcccgcgctctcccgtggcctcaccacctctccccgcctcctccttctctttcctcggtgccggccaccctccagccacccctaccgcctcgcccacgcgccgtccggccgtgccgccgccttccccggcgtcgcagcagcctcctctccactggcctgccctccgtttcgcacggagacccctggaggtgcgcccccgccggcaacagtggcgttgccaccactgttccacccccggccgcctctgccgcgtctcccgtgcgccggccgacgtcgccaccacctctcccggcaccgaaacgccgtcctcttccccagccaggccacgatgtcgcccgtatttcgccggaacaccgccgtgccgcgccggcctctccatccacctcgccggaatttccccggtcgaccgcgtcgccgtcttctccgtcgcagcggcaaggttgtcctcggcatcgccttccctccatccgaaccccgccggtgttcgtcgtcgtcgtcatcgttcctcctcaccggctcgttctctcgttgcgccgcctccgtcgtcggattcgcagtggcgtgatccacgccgtcctcgtctccgtgcagccgctgccggctgccctcgtcgcctcctcgccggccccggtcgtcgtcgtcgtcgtcctcccgtcgttcccggtcatcgtggcgttcatccctccgtcaagccgttctcgtccgtcgtccgcgtccgtcaagtgtgccgctgcagccccgtcgtcgtcttcgtcctcgcctccgcgtcgccaagcattgcgccggccgcatctcgccttcgtccaaggatcgccgccgaagtcgtcccctcgcctttcgtctccgtcattcccggccgtctccgccgcgcccgttcgtcgttgtcgttccctcgcctcgtcgcgtggtggtaaggatctctccttcgctgccctgtcctcgttctttttgtgtcgcccagtacccgttgtgcggttgtcgaccccggtacccgtgtaccggtgtcggtagtcgttcgcttgtgcgtgtggtgaccgtgttagtgtgcccgctcggtagccgcgtggtttcacgtgtgcagcccgcgtggtgtctagtggagtccgtttgtcggccactcgcctcggttgacacacggggtccgcttccgtcgacccgtggaccgtctctgtatactcggtctaccacggtcctttagttgacatgtggggtccgcatgtcaacggcggagccttcctgtcttttccaggctagtgcttacacatgttttataattgcaaaactaatcacaataatccgtaaatctccatgtaacagcattaaacttcggatgatcatatcttggtcatacgaaccccgaatcgacccgttcaagtctcctaatgtttatcataacctaaagaaccgtgtgctttctttttatgtattgttattgcttctttataggcttgtagctttgcttgtgtgattcgcgtagcttctgtcgttccggaggttcccgaagcgtggttcgcggtcgtcgccgaaggttcggaaggccgttctctctgagcaaggcaagtcacatcatccttgagcatattgaatcccagtttataaaattattttgatttaaattaatgcattatcgctttatttaaattcccgcgttatcactgttttatttagccatgcctatttacctttgttataaccttatcattgttgttattgttattattaccttgttcaccctaggataaacaaaaccccaactagtgggtactctattcatggttccactagtatgaatttaggtagatgcttcgctgattaattaggcaacattaggtggttttataactttagactttgggaattctcatatcatttggacactatggaatggttggcttattgtggaatcggacacacacctccccctctattcaaaacgcccaaaatggttttaggctgggctcgaggtgcgtggttgggttttgttagtcatacctcgggtactataaggattaagctcggacctctgttgcaaagcactaccatactttcacatgtctagtgggtaaggcttagtttgtggttcagtctggttataaacaaaagtacacggatagagatggatgaagtcgggggtcgatggacatctctaggacaaatgaaggttacacgagctgcggcccagtagtcgagatgtcatggcacagggctggtgtcctgctgctaggggctcaatcctgcctgcctgtcccggaggttccggccgtaggtggggttgggtcggtactcttgtttatggctaggatgggttgggaactatgtcacgtcttccgtccgtataccgtggtggtatgtggcacgtggttacacgtgaggaagatgtaggaagatgtgtcttgtgggtaaagatgtacatctctgatcagagtataacctattcgaatagccacgccctcggttatgggcaagcctagcaatgtacccaagttagtgttttaattcttaaaacctgcttaacaactaaaatgtggaatggttggcctgggttggcttgggacgagctgggacccagggtcgggttgccagttcggtctgaatcatcgtaggccttaagttaaggcaggttcgtgagggttcacggccttgattaataacactgtgtagctctaggatcgtctttataaaatggctttgggcaactaagtgacttttaaaagctgtttactgcaaaacttaacccctatattattaccccttgtacccccccttcattaatcatgcatttgccggtgtggcttgctgagtactgtggttgtactcattcttgctcaatctcccccccccccttcagtaagagaagctttggagaaaaattcttaggtggagtcctggcttataccccagttgaacgcctgtgaagatggagccgtaggcccgctagtccgttgctgtttatttttgtttgtcaggcctgaaatgcctttgtaataatgtaaatattatcgatataataaagatgtgccttttgtatcatgtttgtttggtgtaccccggcttttcctaggacgaggattaatacactagcgttcgggaaaatgcaaattttctcggtcgcgacaagatggtatcagagccatctcgactgtaggataagccaagtggataaaacctaaggacatattttataaataaaactatttgcgaaagttcctttttttctccttcccctaatgctatttgcaaaaggtttactcccttcttccttcttcggatttcaactagtactagatggtcagctcagcgaagaagaagaaatcgtcagttgtctgccgaagctccggaaggctgttggatccgttagcaaagtggaggaagcagtgaagccagctgtgaagaagcagtgaagatcttggagaacctgtcgcagaacctaagccaccctctagtgtttcgtttgtcgtgtgtttccttgcttgtgtgtgtagcgcgtggtttgcatcggtgggttgtgatgtaaccatgctaggttgtttgcttaatcaacttgcagaataagcaaaacaaacaacacatcaacaaaaagagttagttcctttaaggtattgtccctagttctggtctattctttccttgtatgcttcctctctcaacctctcccttgtgacagatggataacactggtaacaaaggctatgggaatgatggatccgatgactcaagaacccaagccaatgggaatgagaaaagcatcaacgaaacctcaccagagctaatccaaattgtggttaaccaaaccaacatgttggcaacaacatttcaactattacagaatcggaacaaccccgcaggggcaaccaacgttcaagtacctacagtccagcgacagtgcaagttatcagaattcctcaaaactgatcctccaacctttgccattgccgtcgatcctatggaagcttgtgattggttgcgcacagtcgagaagaagctggggttgattcagtgcacagactaggagcgggttgtcttcgcaactcatcagttggttggaccagcttcagaatggtgggatagctatgaagcatcacggccagaaggacataccatcacttcggatgagttttcagccgtgttcaagagatcacatgttcccacgggaatgatcacactgagaaaacgagagttccgctacctgaagcaagaagatttgaccgtcacagagtacctgcacgagttccatcgtttggctcactatgcaccagaagatgtggaaactgatgaagacaaacaagagaagtttctccaggggttaaaagatgagatcgcagtgcaactactcctagaggaatatgaagattttgagaaacttgcggacagagccatacaactcgaaagtgagcataatcggatgaagaactgcaagagaaggattgtcagcatcccagtatttccatgtggtaaccaaagacagcgcactgagccacttcagatcaccggatcttctgttgcgcatcaagaattcctgccccaagaagatggacacaatgcagacaacaacattagcaatactaatgatgaggataccaccaacaaccgtgcttcttgccccattagtgaccactcgaatcaagcgtgcaatgtcaacatcattcaccaaggtgtcgacgatagtatcaatgatggcacccagaatgacaaccctagcaattgtgactctgagaaagactccaatggtgattgcaactatggtaccaccgatgccaatgttagcaaggatttccaaccatcaattccaactccaagtcagaatgatcgtccccagacggacagctcagtaaagaagacgttgatttgttataactgcaaagaacaagggcatgactcgagggactgtctgcaaccaaggcaaagtcggcctccacattaccgccaatttacatgaagcagacatcctaatcgtattgtggtcactggagcaaacgccatacctgtgaggcctcgtgttaatcataacccatagcagaaacaatgtaccaatgctaagcacctttccttttaggcagtgcttagtattcattaataagggagaaatgtgtaatacagacatgttctatgaggattcttttggaagatgtggatatgggattatgtgtataattgcttactaataaaggagacctagggtctcgtgtcagaggaactatattctaacctcgagttaataaccaacctgttgatggaaaagaaaaccaattaaactgtgttagattaaaaagccagtgagacagtagttggggataagagtttggatacgccttttacggatcaagataaggattgttggatgaaacccataatggtacctaccatgcctctacattgataagttcggatatacctgcaaacagttaagaagatccaggagacatcaatatttgagaacatagtagtcgatggttggtaattagtctatcaggtatcagaaaagggtcaaaggtgatatggcagaagaacaatttggatgctccccatctcgaggaaacactaaagatgatcatcggcaattaaaccctagtggcatagatacagatagcaagcaatgtatttccctgaaggtagtcagtgcagctttttgacgaaccacttcaaggtttcactgaaaggcagcaggccaaaggacctcagttctctagccagaaagaagtaggccgaaaggtgattgataaaggataatcagaagcatgctttgcatcgctcgaggaagacccctgatcaccctgcaacagtcaccttgtcattgaggtagaaaaaaaaattatgagtaagcaagatgacctaggtaaaagtgtttctatgaaggcaaggagtgaaatcttcaactcggtatcagatgctacacggagtgaaaagtgtaggcaccggttaccaggcaatgccatgtcttggaagatgatccaatgggaaggaactcatcaaggtcgaaggtgtaaaggaatacgttgaatgctaaatgatgacaacatgaagataatagtcggaagtaaactgaatgtaaagaaagtgaatccgagctgcttgttcgtgggagctattcccagttatgaaccaagtgatatgttcgaagatagtctacagaggtcagattaaaatcacatctaacaacgaagcttcagatttggcaggataacgatcagacaataaaaagtccagcagtaaagccatttgggaagacgtcaaagcatgtcaagtgggataagttggttcggttgagaaacataattcaaaggcaaagttatcgaccctcgcatggaatagcagaagtagctagcacccggagagcaggaaagctaatatgaggcagttggtggcaagttagaagtaaatgacaagcatggtattctcatgatgacaagcatggtatcctagtaatgacaagctgatatcgacgcataacgtgaagtgggtaacttgtatgaggttgacgccaaagatatgaattataagaagttctagaactgaagccccatcttcaagtgccgcaacccagtcgaagtcagctaaaggttcaaccagggacaagtcaggtgaagagaagattccatctgcaacaggagatcgagccaggcagtaaagagtggagaagttttgctaggcaagtttgttataaaagacgtgacggaagaagttagacaagaagagaagaccacccaacctatattcttgctagcctcctcgaatctcggggacgagattcctgtaaggggggtggatttgtcacgtcctgataaattcatcccgaaataaaaatcattccctaaaaggaataatagaactaattaaaattcgaaaagaaattggcaaacattaaaatgcgtacaagaaaatttcgaatgtagcccggagaatttttgttaaattctccttggtctaagaggagccctcaaattttacttgaattttcagagcaccgaaaatatttattaaacaacaacaacaattaacaaagtttactaaaaagaaaaaaactaaaattaatccccctcctccctttgggccaagtctggcccaaagtctccctctctccccctcggcccacagtccaagtccctctcccctccctttgtttttctctctttcctcccgggcagcccactccctcctcctccttcctcccagcctgcctcagcccagcagcccggcccaagccacacccaccaccttagtcacagtacccgaaaggtacggcgacacgggctgggggcgaaaatgagttgcttccaggcttgggggattcgaagccgccctagcctctggactccttacgccactcccacgcccttcgccaaagtacccgcaaggtacggcgacaagggctggaggagaaaaggagttaagtccaagctgggggccgcgaagccaacccagcttctggacccctttcgccacacccacttccttcgccacaatacccgcaaggtacggcgacaagggctgggggcgaaaaggagttaagtccaagctgggggctgtgaagccagcccagcctctggacccctttcgccacacccacacccttcgccacagtacccgcaaggtacgacgaaaagggctggggacgaaaatgagttgcttccaggcttgggggattcgaagccgccctagcctctggactcctttcgccactcccacgcccttcgccaaagtacccgcaaggtacggcgacaagggctggaggagaaaaggagttaagtccaagccggggccgtgaagccagcccagcttctggacccctttcgccacacccacacccttcgccacagtacctgcaaggtacggcgacaagggctgggggcgaaaatgagttaagtccaaggtggggggccgcgaaggcagccaagcctctggacccctttcgccactcccacacccttcatcacagtacccgcaaggtacggcgataagggctttgggcgaaaatgagttgcttcaaagctggcgggccgcggagccagcccagcctctgtacccctttcgccacacccacgcccttcgccacagtacccgcaaggtacggtgacaacggctgggggcgaaaaggagtttagtccaagctgggtgccgcgaagccaacccagcctctggaccagtttcgccacacccacacccttcgccacagtacccgcaaggtaccgcgacaagggccaggggcgaaaaggagttaagtccaagctggggaccgcgaattcagcccagcctctggaccccctatcgccacacccataccgttcaccacagtaccgactcggaaaaacattttctgccgattcgttgtgctgatacagttcattatcgacaataacaagcggtttgactccgagaagtccaaggaaatgtgcgaggggttgaaacttgaaatcaagttcgcatcggttgcacacctgcaaacgaacagggcagccgaaagggacgaacggcaaaaccctagttaacatgctctgggccctccggacaacgtcgataaaacccaccaagctcttatacggcaatgaggctatgacgccaagcgggctgggggctaattcaccaagggtaatcttcgctggaggtgaacgaagaaagccgacaacggttaaaaacggtcgaagtacctaaaaaagaccgaaagccggtaacggttaaaaaggtcgaagtgctaaaaagaccgaaagccggcaacggtcaaaataatcaaagtacctaaaaatatctttgccaaaggaaaaaaggggaaagtacaagccgaacagccgtaacacgcaccacaccccatttatttgccaaaaaacacaagttatagataaatttcattgcccgccaaaaggcattcggactttagatccgatgcatcagcaaaagtagtcctcaatggcgaaggactaccccttgagcatcttcttaatcgcaagttgttagatcaacaaaaaaaattttaagcggtgaagaaggaaaaacggggactatgcagtgtcgacgctgggcaatggcaaactgacgctcagtcatataaaattcatgggtgtcttcgtcttttttctgtgtatgatatttcgtggaaaaaccccaaagcaaacgcctgatcaacgaaaacgccaggggggtgatacgaatcggccaaagtactgctcgccgaatgttgaaaccgcgacagctcgtttttggaaaacacaccgatcgtcgctacactcgacttatgcaaatacttaagcatttctgaacgtgtatgccaaaagtcgagagcgaatgatgagggctgaaaagtcgacatatcttttcgctaaattacgcaaaggggccgacatgtttcgacctaacgaaaggacgaaagtgactatgcaaacattagcaaaaagaaatttgaaacacacacataagctccatcaggcgaaagcacatacattacaaaaaaaagggagctacagcttcgccataaaaaggcgaaaaccaaaagatggttaaccatcagggcagccaaatgcaagtgtcaatttttttgcaggtactaaagaaaggtttcggtaggaacatcggctgaaagggggcgcctcatgccataccacataatttgcatggtctcggccaaagctccctactcatccttgcccatgaggggcttgttggaggcatgtcacgagggccttcgaccggacctgtcgaaaccaatccacaagcgaggaatcaagccagaggcgtcaagttcaaccgggacgaagccatatgacaaaagccgtatggcgaaagccgtatggcgaaggcgcgtggcaaagaacaaaggaccatgtctatgcctcgcaaccaagaggaccacattggcgaagggcgcatggcgaaggccatgcggcaaagcacgaaggcttcgcccaagctggagccgaggcgaagaaggaggacaagagggccgctaggcccatgggggccccttccgccataaccaggctggcctagttggcccatttagagcacataagtgtaaatgacatattgtgccctcaataatgtccctatcataagggtatccatgtaaattcccctgtaaacataaaccctagaagagggaagcttgcaatggggctataaatagccccctagggccatgtaatggggggtcccaagaaaaatcttaaattactacatctactgtttccaacactgttgagtgaccacgtccttcgacgtgcacagttgtcgcttcgacaccaatcaccacggccaatttgttcatcacaaaacatcaatcatggaaatgattttatatcatgtttatgttagaaatttggtcataattcggcatattttaatccaaaatattaagataataaacatgacatttgcaatttgagttgatctagtaacagtgctagttgtatacaacatgagcatgcttaaggtgaaataagcatcaacatttacatagtaacgtaatgatgccattgcgaaggatattaacaaacaaacatctagtagaatagggagaatagaagtataccccgagaacgtcccactgctggattttgagatagcattgcctctgttgatgaccttcacttctttgtctccaatcttcgttgacatgttagcgaaggtgccgatgcagcagcagtagtcgtgaagaacaggaacagttgcgcttgaagcgctccccaaaaacttgatcgcccgcctacccgtgcaggttctcaagcggacggagttccggaggcacctgctcatcccgtacacctgtacacgcaggtgaacagaactggggaaggattatgcagcgcaggaacagagggaggaaccggaggaacttcggaaatgcaagagatgggaagaacagaagaactcgttattcttctgttcgtccttctggtcgctgcagagtatatatatgcgagcgcaagagtaacgttcggggtcatcaaccgtggtgtttaattccgtaaccgacgcgctcattaatacagaatcaattcatggcgtttaattccgtaaccgacggaattaattcacggcgtttaattccgtaactgacggaatcaattcacaatgttttgttccgtaaccgatgcgctcattaatacggaatcaactctccgtgtttattaccgtccgttatgagagagcaacagcagcaacaacaacagccgcctgcctgccttgccccgccccgtcccgtctggctatccacccaccatctcaaccggtcaacaaagactctctactagctttgtatttcacttgagaccttttcacttagatttccaaggtagtattattacccatagcacttaatgtgggccaatggaatttattaggatttaattgggcctagcccattaatctaacaatccctaccaaatttcatggctcacacgaaatgctctcgattctgatcatgtttgttataccagtgtttcggtggagactgttaagttgaacttccacctaggaaaagagctacactagaccacaactgaacaatggactatgccttgaattattagtcttgtgcaatcaggtttcactcaaacccttaaagggtactgggctgccgtttgcatcccctctgtttggagcgtttaagtcataatcctggccttttcatgaatatctagagatcaccaagatctcatagactgtgactagcagtcggactcatataggtgtattccttctatgatgttctgtagatcaacatctctgctttatgagaagtactcagatcacattaaggtgtataccctccttccatacagaatagaagagaagtgcatcatgaatataagcccattttagggtctcttctctcagctacacaatagtttgtttcgccatccaaattcacgggatctttgatcacaatggacaggtttccactattgtgcaactctaagtggatctcaagcccatcttccttaatgcaaagtctatcacattacatgctagccccttggtaaactgatctgccagatttttagccgtctggacatagtccaatgctatcactccgaagtttttcggctttctgacagacttcagtcttctttttacatgcctggatgacttcatgttgtcctttgaactgttcactttaataatcactgtttgattatcacagtttatcaggattgctggtactggtttttcaaccaccggcaagtccaacaggagctcacgaaaccattcggtctcaactgtggcagtatctaaagttgtgagttctgctttcattgttgacctcgttaagatggtctgcttgcaagacttccaggaaacaacgccacctccaagcgtgaacacatactcacttatggcatttatctcaaaagcatcagatatccagtttgaatcactatagccctccaacatttttgggtacccggcgtagtgaattccatagctcattctcccttttagatagcgcattactctttcaagagcatgccaatgatcatctcccgaatttgaaacaaaccggctcaacctgctcatagcaaatgaaatgtcaggcctcattgcactagctaagtacatcaatgaaccaatgatctgtgagtatctcagttgatcccttgctactcttcggtttttccctaatagcacactgggatcataaggagtaggagctgccttgcagtcactataaccaaagcaactcaggaccttgtccacatagtgagattgcacaagtgtaatcccaccctcatctcctctcagtagcttaatgttaagaataacatcagtcactcccaaatccttcatttcaaagcttttggatagaaagtccttgatcaatatgtcatcgacatataaacacaagatcactccctctcccccaccatagcgatagtacacaaatttgtcagcttcattcacaacaaagccagcagatgtaagtgttttatcaaacttctcatgccattgcttaggcgcttgtttgagaccatacaaggacttcaacagtttgcacaccattccctcttgaccttctagtacatacctatctagttgatccatatagatatcctcctccaactctccattgaggaaagctgtcttaacatccatttgatggacgggtagaccatgagaggctgccgaagtgagtaatactcgaatcgtggtcaagcgagcaaccggtgagtaagtgtcgaaaaagtcctcgccttccttttgggtataaccctcggccacaagccttgccttttactcttcgattgtacattaggcctaagctttttcttgaaaacccatttgcatcctacaggcttgcatccatatggacgctcgacgacttcccaagtaccattagacataattgagtccatctcactgcgtaccgctgttgatgcggaaaacacacactggcctaggagatctgcttagctccagtgcaggtccaaaggatgatgagatgcgagcgtgctagtcagtttgatcctgcaactgacaagatatacaaataacagatcaaatagccgatcggctaaacagccgatggagtaatcccagtcgatgccgataccagccgatagcgatagggtttaagcaatcggctatatgtccaatatagataatgatataaaggcaatcggctgatgatgatataataaaataaaaatatgatccagtataaactaatcggctagcaatgatatgatagaataagcactgatccgaaggttaaagcatacatcggctggaggtccgatgccataaaatccacaagattagattaaacagtgaaacctttgttgcgatcggctaaatccaacttgtatgtatatgtaatccttataagccgatgcaacgtccagataacttataggctagcaccctgatagaacattagcatgaacctatcggcttaacaagacttatattatcaacaacaatctagtaggtcgaacctaaccgatgcagcacgagattgtatatgataatctaatactcgatgagccgatagatctgtctaacgtgatggatatagcaaatctatctagaacgacattgtgattgtagagatatattggctaagacagaagatcggacctaaccgagacagttctaactaaaccgatgagtctctaaacacaatgcaattaaagatagaatcgagatatcaggtaggtacatcaatcaaccaaaccagagcaatccaagatatcagagcgacgcagccttgaacaacgccgacgtagatgacagattcaccagggcccgatggaacgtaggacttaccccttcgccggagatcgaaagccgatgcagcctcgcatcaggtgcccaaatcccgccgaaagataagtaaaaacctcggtaaagagggtggcgatgcgccgagagtattattgattgagagtgatagattacgtacatagaccctaggtgtacatatttatacccatgggttgatacaagtccttgtcggataagaaagaaattatcctaaagataaaaggaaaacataaagtccttatcggacactaaacatacttttctaaagataaaaggaaactaacaaactattcctaattaatagataaactgccatgccgcatcctctttgaactcgattgcttatggataaactttctttattagattgatttccttaaccgaatatagcagggatccgactattggcaacttgataactcccatcggctgattccgtgatgctgcagccgatagtgattttcagccgatgatgactttagggcttaccaaatttcactgttaacaactgcttccttccaatagtcagcgtcaggagatgaatatgccccttcaatggttcttggagtgccatccacaaggtatacaatgtagtcatctccaaaagactttgcagtcatttgtctcttactctttcgagttgctacaatgctatcctcctcaggattttcctcatgcgtttgatcaatgtgttctatcggcgtaaagtgctcaggggataaaataggttcttgactagaggtgctaggtgcatttttcatatgaaattcattctaaaaaatgtggcatctcaaaaaaacttgatagatccttttcggtagttggctttgctgcatcactaaaaccacacgctttcgatggttcaaactataagagatggacatcacgtgcacttttgtggttgacagcgatgcaatgtttctttgtctcacggggcaaactgagtgaaccgcctctctctcctgaggaggaggctaagttcaaggctgcggattgcttgttccctggagcattgataagtgtgctcgccgataatattgtggacgtgtatatgcacatccctttagggaaggacatgtgggatgctcttgaggccaagtttggagtttccaacgccggcaacgagctgtatgtcatggagcggttctatgactacaagatggccgatgaccgttctgtagtggaacatgctcatgagattcagatgatgccaaagaaacttgagaacaacaactgcgagttgccaaacaagtttgtggcaggaggcattattgccaaattgctaccttcttggtcggactttgctacttatctaaacacaagaggcaaaagttcagtgttactaacctcattggctctttgggtgttgaggaaaaggcgagagcaaacgttggggctagagccccagctacatgccggcagaaacccctgccctgcatgcagagcagcagccacacagcgtcaggagaggagcagcgtataacacaagtgcagaacaaccaggtggcaaggaaggaggagcaaacaaagacaacatggcgtggtccatggatgattaagtggactaattggctgttaggccttccttattaacctattagtttttgctttttttttgtctactttaatggatggaacgatcaggggattagggaagcgagtggtttttactcacaaagtaatccaacaattatcaacaattgtgttattaaatttgtggttgtgtctttgtcgtattatgtcttctatcatgggaaagcgttttcatcccttcaggagatatcccctcgttttgtacatgtcatctaaataatcataaaaaaatcttaaaaaattgattaatatgaaacatatcactccgcagacatgcaagttaaaattcaacttctacaagttgcaaaaaaaatataattgtgaatgtacgataactattttcaatttaatttgttaattttgttgcaaattgtagaagttatatatttgcagagtgatatatttcatatcaatccatgttgtcaaatttttttcaaattgtttagaactatttagatggcatgcaagcttccatcatactttgtaaaacacattagaaaggagcaccccctatatttccattctagattcgccactgagatcaagggagattctagcgccaatttggtgcaaaagaagaaccctcatgcatcccacaacaacaacaagaaagtcaaacctgacgtcaaacccaaggctacaacacattttaagaagaacaggcaagggaaaggcaaaaagagattgctttgtgtgtggcatgtctgggcattgggccaaggattgtcctaagcgcaagaacaagatgtctgcaaacatggttattagtgagggcggaggaacatcgagttatggtaaatttctacctacagttctttccatatgtcactcacctgattggtgggttgacactgatgctaatattcatgtgtgtgctgacattttcctgttttcttcttatcaggttgggagaggttctccttgttgatggaaaatggatcgcttgcggctgttcatggtgttggtacggtcgatctgtagttcacttcgggaaagaccgtgcagctgaagaacgtgcagcttgtcccttcaataaagaagaatctagttagcggttctctactgtgtagagatggttttagacttgtgtttgaatccaataacgtgtcgtatctaaatatgaaacttttattggaaaaggttatgacagtggagcttgttctgcttttctttggatgatatgtgtaataaagttgtgaaccatgtaagcaatgatgatgataagtccaatgtgtggcattcgcgactgaagaactgaaccatgtaagcaatgatgatgatgagtccaagtgcaagagacgggaagaactgaagaactcgttattcttctgttcatccttctggtcgctgtagattgcatatatgcaagcgcgagagtaacgttcagggtcatcaaccgcggtgtataattccgtaaccgagcgcttaaccgacgcgctcgttaatacggaatcaattctcatgtttatcaccgtccgttacaaaacaagagagttacaaaacgagagagagagagggagcagcagcaacagccgcctgcctgcctcgccccgccccgcctggctatccacccaccatctcaaccggtcaatagagactctccactaactccgtattttagttgagatctcttcacttagatttccaaggtggtattattacccatagcactaaatgtgggccaatggaatttattaggatttaattgggcctaactcattaatctaagagtttactccaatgcaattggcatatggaatatgggaagtacatgacaagctgcaacatatcccaaaattttgcacaaattttgacaatttgaccctttacaaaaactatttttacaaatgaaccgccactaaaacttatttcaaaaatgacccttttgttcagcaccaaatcgtgtgacgctgaacttagacacctcagcgccaaatagcgtggcgctgaatgttcgttggcatgttgacttagcctcctgtccgcagtggcacgacattcagcgccagtcgacgtggcgctgaggtgtctaagttcagcgccagatgatttggcactgaacaaaagggtcattttttaaataagttttggcggcggttcatttgtaaaattagttttttcaaagggtcaaattgtcaaaaattgtgaaaattttgccttcctgaatcctgaagaagaaagtaaaacagacctgtccttttcttgttcttttttttttaatagaacaagcaataggtggtatttatcttatcttctttcccaccctttctgctgtcaatgttcataaattaatctcattcccacaaaatacatttgaacctaattttcatggttcgaaagtagggatttgagcagtaactccccatgttgcctgataaaacgtgcgcgctgtgatgcttcggtaaggatcttgctctctcttcctcttcagataagacattatattctccacctctgacttgatgtccaaatataattggtttgcactctccctatccctctgtacaccgtccattcctttcatttcaattggttttccaaatagatagtatagccgacctggtaatttaggtagaacagcaggcaagtgtaagacctgatttccttcctctccttttacagtactcctgaaacaaaactcacaaaaggttgcaccctaaaaaaggactcaaaataggttcgtcattaacagggcaacgtatcctatgcacacacctatcttggtgcactcatgcactcggtcactgtcggcccttcgattctaatccaaaggctaaaaacgcaggtgcggcatttttacagaaagctgcccgcaacacctgtgtatgtttgcagaaaacccctcacttcccttcgtcttctctggtccaaacctcctcgatccaggtcgatccccaaatctgctctatcaccttcggtcggggccggcgggactcgtcgtcggcgcctgcagcatggctgttggcgattttgtgtccatctacacgcagctgaacatcgagctggccgagcaagcagcacagtggcccgtttggccggcaagcagcgacatgactggggagcatcgtggtgttcaatcgaggaaaaatggcagcgaggctgccatatcaataattaaaataggccatgtccaaccaggagaaaaacaagaagagaaatcaacaaataaacatggacattatagctgaagaatcgagagaaaaaacacgaagagactcgccggaacgacggcctccatggctccatgcggacactatagatggagacgaaccattcagcgagcagctggacagccacgccggctgtgaaggacagcgccgaggcagccgcagcctggcgtgtcggccgatgctagccctagcagcaggattcaatgaaaatcgagatgaatcgtcgttctgttcagccccatcgcatggagatgagatctggatcgaggaggtttggacgagagaagacgaagggaagtgaggggttttctgcaaacatacacaggtgttgcgggcggctttctgcaaaaatgccgcacctgcgtttttagcctttggattagaatcgaaaggccgacagtggccgagtgcatgagtgcaccaagataggtgtgtgcataggatacgctgccaattaacagtatgctttcctttattttttttaacaaaaggaagaaaagacaaagtacagagatctgaccttactcctggacaatcttggttgaacgactctattgtttctctgatataagggatgttctttagttcattgtaatccagaactatctgtgaaaagtacaaacaaggtataaatacattatccctaaaaaagaacagatacagttttatattccactgagcaccgatcataaattccacatcataagaaagcatatatgctatttggaaaccatattatttcagatgatttactgttaaaagccagagcaaactacctctaacatgtcatcttctcctacacaaccgaatggtatgacagtaactccaaactgtgctgccattcttacaaattctggttgatctggccaaaacaactggtagtcttcatcctgcccaattcagcagaacaaatatattgagaaggaaaagacatcacaaaagtgtagttgataaatgtaaagtttcaagcaaacctttctatgtagagcttctcgaataccaccaggatagaggagaacaaattcatctctctcaaataacctatatgtattaatcggactgacttgtactcccccatacaatgggactacgtcaaaaaaagatagctcctggcgcaaaatctcataattccccacaaaaaacactggatgagccaaagttcgcagaactgctttcttctccctcaagaactcttcagccattgaagtgatctccattgccaacagctgatggtaacccaccaacaggacggggcctttgtcaggaacaccggcgaggccgcggacgattttgccgtttctcagagtagatagcatgactgggctcagcaaatggtgaagcagcctgcagaaattcccagctttcttttgatcaattcaatctgtttaacgaaagtacaattgatatttgagaatctgaatgcatacttgaaatcttcaccaaatgttctcttgaattcacttattgtaggtgggaggaaatcagtgatagtgtccctttgtttgccctggcggtacatgctggctccttttatgacagttagcagattaaagctgctctcctgtggaaatgttctattgctgagattttctaatggacaacacaacagataaataatagtacatatataatttctatacataattaagcactggaaatgaccaatgaagtggagaaatagaagcaattgtgagaaaattattaaaagtatgtaccatgagtaatctatcgctggaagtcctgaagtatcgaactttgcaacttttcagtgccttaaacagtcgatctgcttctccacttggaggaagattgtcattgccactgtaaacccagatatatatcaaatatttatagttcaagaataaatatgtaaatatctaaatacaacaaagagtagaaaattgccaaatatgagatatttttataggaagggcacctggcaagaagcagaatttctgcttgtactgcattaagacgagagtttgtatagtctacacctgacataagaagcttgagcttccacacaagagtatccattcgtacgatatgtccaaattcctgagaattatcaaccatgaagttcgaaagactaatatgacgatctgtgttttcgctgatttctttcattcagtaggatatcaaaacaaggatgggatgcttcttcctactttttatgcaaagattatttgcacatgtgataaaaatatttaagacctatatatcatatttatagaacaaaataaattgctatgttacacaaattccaatgcttattgtgcaaatgaaaacatatataaaatgaaaaaggagaaggaaattatagcttactgaaagtaaaggtagcattgaagaaagactgtctgaaaaactttccagagtatcttgaggagaggtattgttctgaatgctaaccattgccatcttaagaggatcacctatttcacaacaagaacatcttaaaaaggttttgatttctcaagttgactaaaccagctaggcagatccagagtcaaccattgattaacattttagcaccaaaataaaaaagaaaggaaaaaaaaactatacttcaggagctgagctagagtggttcacacatggatgaaaaaataaaaacttaaagaattagaaaatgctgtttgttgagactattttcatttatatttctgcttctattctgctaaactaaattgtatgaaagatgtttattttacatattgatgacctttgcaactcgggataattgtagaaaatgcagaagaaaggcaactttgagttgtctgtaaacatggacgttttacagtatgaaataagtttgagcatgaactgcaaacaaaataattgaaatattatatcttcaacagtttactttgaacataaatctatcaatatcattattaaaacacagctggagttaaaaggtaaaagttctgccatcgatttatagggactagtattccaaaagagggacaaaattaggaagacaagaaaatataccaatcaaatatctgagaaggtgagggagagtgacaggaaggttgcttggcaccatttccaaaagaggcaatattgcctgcaacggagttttcgcaaatgatgttgctgtagaaaacagattaatatattctaaaatctatagtgtaagaaccatattatttttggattgctatatgacactgaaatttaatgttgagacgaaaagggtttcacctgcctggatttactagtataagaaccaaatcaatttctggatttcgtgatgccaaagaaagagccaaacatccaccaaaggaatctccaatgatatatattggtctgtttggtgacaaattgtgctcatatttgacagattcctccataatttgtaacaaccctgtatgaattttacttcaaaacatgttagtgaagggaaccttgattagtgctcgtatttcctttcttcatacctgaatcagagaatactaaattttactgtgttgattttaatcattaatatgttccctatttaaaaaaaaaagatgaactgcagatctctgacttcaagaagaatgagaacttgcacccacaagaccatgacaatgaccacaagcaccatggagtccacaccatatatggcataccacttggcaacattatgctctgctcccctatttagggtaagttatagttgtagcaagtacatatagtcaagtatacttgtcaggacatggacatgttaatctgacgctgataacatatctaaaacaagacgtctattattaccttcatatggtgtacgatcattgaccggtatatgcaagcagcggacctcaaataccctgttgataaaaggagggaatgaaattaaattatttgcacttctaaactccaactttaaatttcaacttcctcattttcgctagcacgtttcccaaactgctaaacggtgtattttttacaaaaactttttatataaaagttttttaaaaaattcaaatgaacccaattttcatttttataacaattaattaattatgtgtaataattaattaattaattatgtgttaattgcttgctccgatttccgtacccctgaaatgctcgatttttatgctgcatcgaacgaagccttatttccctaagagccaaaaaagttggatataagacacagttggcatacgtgaactatctactgtaatttaattcagtgaaactacgtaaagcttgattgtcagttatttagtactacttagctacacgttctgaacatctaactgaacttgtctgaaacttaggagtaatttataaatgtacgaagactacctatatgacaaaaaaagaaaaaagaacggacatgcaaatgtaagtgttttcaccctattatattttgcagatattcaatgatttagcacagtatgttagtaaaataaattgcaatattatattttggcatatcctttagcagtaccattcgaacaaagaaatgcagctaaagtttatcttgaattgaaaaaaaaaagtcttaatccaaacgtgcacaatgaaaagttaaaatgggtatatcttacacaagaagggaacgcacttacttgcccaaagatttgtgctgcatgataagttccattccaacaccgtcgattcctgcaattcagtcaattcgaataacagcgttagtacaaacacattcatgaacacaggcatatgacaaaaccttttaattttgtctatggatttctaacaatcctaaaaccctgaagaagagtgcagcacagaccagccacaactcaaaactgttaaaatcagtttggaacacgaacttgtcgcatcggaaattcagaattcgcaacatgaacatgaactgccattgttaagctatttccagtgtaaatgaaagtaaatggttattttttttgtttctgtgtgtgttgtgcacacaaagtgtttgtttgattgtgtcaccgagcgaatcagcgaaagcaaggagagcggcggggccgtgaccgagacctggcaagaagagcagcagcggcggcgcgtggaccgccggcgggccgcactcgacggggcagaaccaccgcggggggccgccgccgccgccgccgtcgagcggcgtggccctcagcgcgtcgaagtagtccctgacggtggcctccccgaagccgtcgtcgtagagggcctccagccccacctcctgcaccttcttcgctctcctcctcctcctcctcatccccgttccactcttcctgtccgtgtcctcttgccccttctccccgctcgctggcgcctccgtcgagctcgctcggaggcgggtgggccgccgacggggagttgcggctgcgggggggaggacggcgtggagcgcgatggacatggacatggttagcagcgtactacgggcatttggtgagagaaacagggtgagttggagaagaacgagaggaaacaggggaggaggaacaggggaagaggaagcagagccacgtatattgggggtggatcgatggagaggggagcgtgatttgaattgtggtgggaacgagaacgagaggtggtgacactactatatagtggatgtgatactatgcgcaattcgtcccaaaataaatcgatatacatcaataagaaaaatctatataaaggttatattttaaccattaatttattttgaaacaaaaagagagtaccgtggccatttttttaattgccatgagttatatgaaaaatacggtccgtcaccctaaaaatattccaactattatgctgatggtaaaatctgattaaaagtagtgtcgaatgctatttgtccatgttttgcataagcattattcttaataatgttgtctattctgattggtttaggttcaatctctttgttaccgagctttaaatattcttttccttataaatactcctctgttttgtattatgaaacattttgattttttttcttagtcaatttattaaatttataggaaaacaaaacaatattttcaacaacaaacggaaatactattcaaatatatttaacatttgatttgatgatattaatttggtattgtatgatgaaatgaatacagttcaactatgcagcaagcaggatgagtaaaatacacaatgacgcacaaacctaggtataattcctcgtccatatatgtgtgtatttcacgtaatcagagtaaaatataaacagtatatcccatactgacatacagtgcgtgtgtggtcatggaaagcaacggatttggttggatagtcatacaagtaaaatgattttgatttgcgcacaccgtattcatatcattatcatcaaaaaaataaaatatgcaggtatcatatgcttatctcttactgctgggctacgtgtatggaagtggacttctgaacttcctttcagagtgatctatcgatctctgccacgcccacatgcgtgcggtactgcggtatatatgcatttcgtttttgggtcgaaacctcttgaggccgacgtgcacgcgatcctgaccgtccgtgtggacagcattttacagtcgacgacagccagaacgtacgaggagtcctgtagagtaacgctccagaattctgcacgtggccggtttccactccccaacaaaattggagcctgtatcgctacgagatttcaacgctacccatcaagaaccatcatatatctacattggccatatcgtaacttccgagcaagaattgctctatcagagcaagtttaatagtatagccaactactggctccaaatcaactatagctaatctaatagcccattcatacaatagttaactatccccgcaaaaaaaaacaatagttaactataaaaatatactataccattaatatccgatcccacctctcatacacatataacgtcttgaagtccgtgttgcagctggctacaaatctgtagccgctttcttctctctcttctcttttcttctcgatatgtggttgtgctgctctatcaccatctgtattttttttcagatccaaaagtgatccacaaaagtatcttacgctagtaattttatagtcctttaggaggaggtaccaaaaatttaatgtaatttttggtatctcatagtacctaggcactaaaaggtactaaatttataatagaaaaaagtggtacctcatggtatctctttaaggactgtaaaattgctcatattaggtagttccttttctgaccgataattcggttaaccgagctatcgggtcggtctttggtcttgtttgagtttaaccgaacatcgcagcggctccccaaagcccaggcaaccaacggcaggcagcagttcggaggcacacatcggagccgaacaagcaggaatcccttcgactgggatgacgagagcgttcgcagggaagacaacaacaagtggtcgaggcggaaaggatagaggcaccaatgctacctcccggaggctagaacgaggccctgtacgcagggaggctggggagccatttgccgtcttggaggatgacggcgtggtcggacactcggatttgatttcagtcgtatgtcgccatggctgtcaccattagcagcgccgccacacacctaccccgccgcgatggtgcctcgatgggattccccagtctcgagccgaagccgttcgctctatgatgcacagatgtcgtcgagtcaacgagtcatagagatgaggagcagaggtgttgccaaggggataagatcttggggaatataactatttgccactgttaggtttaataattatccaaatacccttcttaaaattgctcttgttattttcctctaaggtggtggcttgttgactatttatcatttttgctcgcatggcatgccaaactggctacctagggtagaaaacagtgcaggacccaatagtcagcctctcacacacccttcatctccccctccgggcctaaatattatcttcatcaggcctaaattagagactgtcaccgatgagacgtatcggtgacgggcttaagataatttttgtcgagcctaaacatgagcctgtcaccgataggtctcatcggtgacgggctcgaaatacatgcatatggataatgtttgtacgagtatatctttgtcggtgtttatttcccgttagagatgatggcggtgtgacggtccgcatgcccccgacacgggaaatgccattacatattagaagttctatactagtgcacggtaggaatataatttataaataactgatgttcggaataaaaaaataaggacaagaaacatctagaacacgagatcaattaaaattcaaaatataaaataaaataaattttaagattagaaaaatatgagagtacaaggaggaataatttattaaattaggaataaaaaatattaaaagaactgtagccgtagaaaaaacaagattaaataaaattaataataaaatataaaatacattccaaaataaaaaaaagagagttcaaatatgaatacaatttataaataacaaaattcaggaataaaaatgaagaatattgaaagaaccgtctgtcttgaacataacagtgacaattgacaataaagagagcagcagcaacgggcaagtggtggaagttgatgtgacatctaaaaactataaaacaaaatcccaatgatgattaagtttgattttcacaatcctaatgacaattaaaaagggagcaacaggcatcgttaaataacatggtcccgacggttgatgggacttctagaaactaaaaaataaccaacgataatcaggtttgattttttaaatcccaataacataaagagagagggttcacgggcgtttgatgagacttctaagaactataaaaaggaacccaacaagacaataaactctaaaactataatatctgatttttaaaggtgccaagaaggatggatagaaaccgtggtacgtcggacaaaaaaataaagaggtgataaagaagcaaggggtggcggccagtgtaaattttaaaaactataaaattaaaaacacaataatggtagattcaatgtttttaagtctgaaacaacgagatggctatttaacattttttaagaaaaaaaatcatgtctaaaagattgataattttgtatggggctagccgcgcaattgattggtcacccagctaattatttggataattatcaaacttaaaagtgacaaatagttaaattgccataagatctaggtctcgtcctcactcctgatgtatggtgcccccccccccccccgggtgggggtgtgggctggaggcctggaacaacgtgggtgtttggtttattcggttagctggtagtaacaatccaagttgatcgtgtgattgaaagaatgaccgaagaaggggaattcaggtttttcaggttcattatttggtcctcggttcctaatctataattatgatctgtgagatcatgatcagtttaacgaaatagtactctctttgttttatattacttgttattttaatttaaattttatgttaaaatacctattgttggctatgactcgaatatatagtcaatcctatttttgataggaccgattgacaattgaattcaaattttaccattagttgactatccataatagcgtggaaagaaagcctggaggaagtgtggcccttgagtttctcgccactttgcattaggatttgttaattctctttctcgaggggacagggaagggatataacacagcagtagagtgtcaccttgagatggtggaagttcagtcgtataccgtcacaactgttattagctcatctgctttggaaaactacttgggatgtatttaatgagggtaccatgtattctgtcacatctccttggtttatatcagatttacaagaacaacaaagataacaatgcctaaaagtacacccaatagcaaaatgactcccgattcataccatcacatatccaaacttaaagattatgtatggcctactcaatgaattttgtgacacgaaactaaaataaattgtttgttccatgtttgaatctagatcttttgaggtgtgcatccatccatgcatgcacatttcagctagctctgctcaaggatcaaacgatgggatttcagagtcgtggccgcaaccaagctggtacagaatcctggggaggatgctcctgaacttgtcctcctccctcttctccagcaggtaggcgatcatggccttgacctccgacttgacgtgcaggtagagctcgccggcggcctgcttgtccgtcatcacggcctgcatccccttcgtcgggatcggcttcccgaaccggtagtagaacctgcccgggatcttcagatacacccccgggaagaacacctcgtggtcgatgtccctgcattttttttcagtaaattaatggttcatggtttggtcagatttgggatgaatttagctgttactgttcaaagttggaatgaaatcggtgtgaattaccttagcttgagatggttgctgtatgcttgcatgatctccttgccgaagggtgcgttcctaatgtcctcgaaagtgcagagcagctgcagaagcaaattaatcctcaggctcagtgcatcgcgatcatgcaaatgcaggtctgaattgttagctgcagagcagtatgatttttttctaagaacagtagagcagtatgatgcgtgtggattcgcttacttccattaggtcgtcctctccgacgactccgaagggcacaatggtggcgttgaactgcgctgccatcctcacaaattcagtctggtctggccagaacagtctgtgctcttcaccctagatagattccagagcacacataagtgcatcatcagttggaaacataattgttagacttggaccaagtaaggttctgctaattatttttttaaaaaaaagacaatattttcgtctggaagcacatcttaaacccctgtttttttccaagtattttggtctaaaattacgaatcctgctatcaatactcaaatcacaaccaaccaattgctaaaattgaacttaaaaatgtgatttgtttatgaactttgtagggttcctgaacgcaattccaaaagataacaacaaatacaccatgtaaatattattcctgccgtttttcaatatacaacaccattgactttcatcctattaaaaaaatatataattgtttttattttgctatgacttgttttataaaaaatggtacaatattaacatatatttttatatttttatattaaattttaaataagacagataatctttgtgcattaaaacccgaggggactaactatatatttatcgataaattttattctaaaaatttgacagatgtaattatagtataatcgtagtaataattacactgtaacttgtatgtaactacagttacacttgtatttaagtttcatgtaattttgaatcgttaaatctattacaacatttgttctggtgaggaagaaaaaaatcacagcacacacatatgtgaaaggatttgttcccacgacctctattttactgaaataacatagtaccgagagattcttgaaagttacatacaagttacattatagttacagtgtaattacatgcaagttacagtgtaattacactacgattgtactgtaattacatctgacaaatttttggaggaaaatttgtcacaaatatatagcaaattcgaaacccgagatagtacatgccagcctaggtagttaataaggggaaaatggtcgaattttcagccatatgatgatgtgtcaagattcgtgtataagttacgttgtagttacagtatatctacaataattataatttattgcaactacgctgcaactacattataacctttatataatttagatataaaaagttacatattttttattatttttatatacaagttgtattatagttataatatagttacgatggaattattatattatagttatatttttgacaattttctaattaagaaacttgcggcagcattttaagatagtctttatatataataaatgacctgaaaattttgggatgaaggcagtagtaaaaagaaaaaagtttgtactgtactaccttgcagtggagtgcctcgcggtggccgccggggtagaggaggacgaactcgccggcggcgagcagctggtagatgtacttgtaggtcatggggacgccgccccagaggttgaggaagtcgaagaagtcgtggccctcggaccacgtcttggtcttgttggggaacagcagcgggtgcgcgatcccccggagcaccctccccttccgccgcaggaactccgtcgccagcgagatgagctcgatccccagcagcatgtggttccccaccagcagcaccggcccttcctccggcacccccgccagcccccgcaccaccaccccgtcccccatcgtcgagaacatcgccgggcacgtcctcgccctcaggtcactgctttttcatccatcccattttcatccatgttcatggatgcatggtgagccactctactttcttactctcaatatttaattacatgttcagagattcagaaatccagaagtgaaccttttcaattctccaagtacatgttcagagattcatagtgatagtaaaaattcagaatttgttttatgaaaagagaaaaaaaaaagaacagtactgaacttcaggaattcagtactgaactttcaagtctaaacaacacttgttcagaaatttagctctgaactttcaagtcacaataacacatgttcagaaatacagaatgatggtaaaaattcagaaattcagctccgagctttcaagtcgcaacagcacatgttcagagattcaaagtgattttaaagatttagaattttgtcttttcttaaaagaaaaaaaatcagtactgaactttcaagtctcaacagcacatgttcagaaattcatagtgatggtagaagtttaggaattcagcaaaactttgaattgttacctgccagctttctcgacctccttgagctcagtggctgatggggggatgtagtcgaaaacccggtggtaccgcctcgagtggcggtaaaggctggtgcatttgatgatcgacgagacatgaacaccgtactcctgaattttttattgagttttaccatcagcagggtttccttcacttctacattttgttcttttcagttgaaaaaaatgtctttctaaatttgcatatggctgctgaacctcaccaacagtaagctgtgcccatggttctcgaagaagaacactttgcatttaggtagcattctctggagcctgtcagcttcagatttgcttggaagtaatctgtcagcacagctgaatgcaaacataccaaagtacgttttcgatcatcataacagaaatgtagttatcgagatccaacagaagcaaaatactcatgttgggatagcttgactgaaactatgtccaagaacggtgaaattgaaaaggtagaaaaccagagataaatgggttgcttaaggtagcaagaaacctgactagcagtagcacttcagctgaaactgattctagacggcaattagcatatgaagcagcctgttggatcagcttcattttccatcctagagtgtcctccggtattttatttagtatgttctacagtgaaattatagaatttgaaagccacattaattaaatataagcagaaaattaaatcatttctactgctcgtccccctttctcctggcttgataaaatgggacatagtagcgggacgcacaaaaaagaacggtacataccgaatgcttcaggaatgatgatatattacttgttaatctgtttagtgcttctaaaggatgtcttccacttttcatgctactcaatgccatgtcaacttcattgtctgccctcatgatcaggaagaacagaagaagcggatgcagagttattaaacaggaaatgtgacaacttatggcaaagtacagaaattaaatgatgaaaactggaaagcagtcctgtagttatcaggttatttcagccaattaaatgtttcattatgcttggttattttcgttcttacatatctttttctaaatcttctgtgctgcaacttaggaaatacttaccaatattgtagttcagaagagatgtaattgcaatccgtgcacgatccgacaacgggctggaaaccgacaggagctgttttatgtctgatttctcaaatgatgttgcttttccagggaaaaaaggaaaataaagttaggtatcacaaattttattcatgcaacagcagatttatttggagatatacctggattaaccagtaccaacaccaaatcgatgcaaggattacgagcagctactgcaagtgctatgcatcctccaaaagaagtccccaaaaggtagatgggcttattaggtgaagtggcatgctctgctctcacaacatcctctaccatttcaacaagttctgaaaatgaaaaacagctaaaaccatgcaatctgagaacttcacattatctgttattcgctctaaataatgaaataagtttaaaaattcatgtatggatggaaatacttcaaacagaaattaattcacagatatgttgataccttcaaatggcgtgcggtcgtggaagggaatgtgcatacatcttagttcaaaaatcctgtgaattcaaagacaacttgtctagtattattacggaagtcgtaaaaattgaacccatgtagtatcattgtaatctaaattgcctataatcaactcctataaaattgtgagctctcatcatattctaagagaaggcctgataaaaattgcagacaagtgaaagtatctagaagtgatctcaccttccaagtgccttgtggtgcatgaagagccccatccccataccatctacccctgaaaagtttccaatccaaatcaaatcaaataaaggctaagctgcaggacaaaactattgaggattctacaacacaaacattcggtataactgtaccgggtaaatacagcatgagtggagcatcctcaatgggtgagccggcatcaacgggacagaacaagcgtggcggtccactgtcatgttctaccagctctccaagtgatctgtagtaataatccagatccttagccttctggtacccatcgtcgtaaagcgtttcaagccccttgtagctcacttgcaatctccagcctgcatgcttgaactgatggcagctgctgatcctctcaaacaagtcgtgtcgtcgtcgtcgctgtcgccacagagctatctgggagtggagaggaagagaaagagtagccattgctgtgaagctacaaagctctcattgaggtatgtatgttcatggtcttttttccaatacctctgatggagttatgcagagaagcatctgcagctgtgtgtaacagaaataactgaactgaattgaggcgcaaagtgtgtgagtgtgaccattgcatgacagctcacaggtttggctaaagtagtgaacgtgtgactagatgataattgttgtatcatgaacagttatgcttaggttgttatagtagtagttggcgttttcttgttctttcgtgtggaaacacaccaacactttgatcacacgataactatgttgttggttttcttgttaaaagtactcatattttctgttggcatatgattgttcttcaagtaatcaagtgtgtgagggcacaatcatgttgctgtgtttggcaaggttgtctttcgtctttgtggttcaaataatccattagagatggaaactaaaagagattactcgttcctgtcttctgtgatggatcaaagcgcactactcactacttcccttaaaccagaaagacaagactgacaagctatgtttatggtttagtccatttgcaaattttcttggtcatgggaggaagagagtagcttgagactggggttggagcttcactggtgggagagggacagtagaaaggcgaatcagcgaccgtgaacacacaggctatgatgtagcctccaaaaagtccaaaatgcctagatacatagggtgtgtttagttcatgtcaaaattggaagtttggttgaaattggaaaagttggaagtttatgtgtgtaggaaagttctgatgtgatggaaaagttggaagtttgaagatatattttggaactaaacacggcgatagtataatgagtgataatgccgccataattcttatactaaggaggttgtgtatatccacttataaatatatagaggccggatttatatctactccttgcgtattaagtctacttttatatatgaatgtggataagcttgtcaagaatctatagaagtaaatttatttttgggatagagggagtattatctctaaaaagaaatatgttcaagactcgggagcttacaaaaggggagaaaatacatttcctgacatcaatggctggtaaaagatagtggaagttgtgttttttatttaaggtttgttctggtctaacaaatggtacaccagatacgtacctagaggtaccaaatcaattatgatagtccgtttatgatgggcaggatgggtagcgaccttgtaacaaaagagagaatatatgctgctcatttattttcctccacgtgtcatgtgaggtccgtgcagcaccgaagtcctttccccacctcatctctctctctctcagcggcgcatatatctcacagcggcaccggaccgcaacatctccccacctgcgctatttgtcgtgtggccaccgccaccatttggtcgctcaagcgatagccggcgcataagcggaagcagaagaggattctgaagcaaatcggcgtcgctgtcgtgtggcataatgaggcacgagatgggaagaaaaaactcaatgataacaaaacttgataaatgtcgatccatgcaaattgttttataacaaatactacaacgaaaagagcatcgtcgaggaacgtggcaagggtggtggtggtgagagaagcattggtggtgacctcagcgaagataccaccggcgaggtctatgacattgagtaccgctacagcgagaagagtgctgccaaggagaagggtggcagcggcaaggtctacatcattggcggcgatctcagcgaagatacagccagcgaggtccgcggcattaagtatttctgcagcgagaagagtgctgccgaggaatgtggtaagggcggcggcggtgacctaaaccctagcatactcgaggatagcagcaagcaaggagactgatgagcgctgtcaatactagggtttcacatcgtttgtggttgatgtgcttaagccgattcagtctatactcttgcgaaattacggcggctgctcttccacgtactagtccaggtgtgacaagactcatcggtctcgatggtaccttgcagcactatcattttttattcattggagattgaggagatccaacggtccatcttcagtactgcggcaccccgctgaactgcaaaaaaaaaatctctttctagtttatttagaaggtgatcccataatttaaaaaataactatagataaacaatgcatgagaaagcagcttctgcttacatgcatggaataaaaaacaagttagtccctagatagtgcacatgctcttaaggggcacacttggaaattttaaaaaaaatctacttaacctctagagtaatataggatttgcctacttaatcccaaaccggtttaaataccccatgtagtggttttgttaaaggtattgcttacatggctgacgatattgcttacatggtacacacatgagcccatctggcctaagttaacataaccgattcatttctctcactaatctgcgagcccgagaattacatatcagcatcaatatgcctcttctcagagtcattatgcttgttaaagaaatacttaacacatgccattgccatgtaatagtcaatgtggccaaaaccacttataaaaccgctctataagtttatttcaactattttgtatacttaacgggatagaatatccatttcataattcagaggttaagtaacatgtaatagtcaatgtggccaaaaccactcaataagtttatttcaacttatttgtatactttacgaggtagaatatccatttcatagttaagaggttaagtaccatataatagtcaatgtggccaaaaccacttataaaaccactctataagtttatttcgattggtttgtatacttcacagatagaatatccatttcataattcagaggacaagccttggtgcatcagaataaacaagatttaggagcggctgtatggacaggtttgcctcccacccttcagatcgagtttctgcggacgtgttagcctctttcccaattgattttcctccaaatggccgcggcttttttatgggtaagtgaagagggcgattttcagcaaagactttttgccagcgagaggtagaggaagaggccgatgagattggagtgagttgttgaagaatatctttgatttcggagaaagtgagaagtggggggaagaggccgacaagattgggacgagttgttgaagaatatctctgattatgtagaaacccgggtcgctcttatccttttttttttcacacgagtgcaactgtctctttttttcacacgagtggagttttgccaccgaattggctctccccgatgaacgagatttttcttgtcctacaaagttaaagcttagcttactcttaaaggctagttttttttccaaacatatagccttgctatataagagcaagtctaataatagagctgactatttactccaaaacaaacacatgaacaaaaactattgtttaaatataacttaggaagtgctcgatctatgtactattctttaaagtactattttttcttgtcacaatatattatcactcctgacttgattggcagtgagttgctcatctgcctaggagcacacaaagcgtcgataagagcaaggataatagtgggctataagcaagctatatacttatgtggaagagagagataaaaaaaagtggggagtgttggctctcatgcaagagctaactgcatacaaactccaagaaatatgtattaaattcatggtgagagaaagagagaggatgaagaaaataaagataaccttatagccaatctactatacatgttaggtttaacattgactaacagtaagtagtgagctctactattaaacttgctctaatatagtcgattaggctcgctggtgttttctctcacctctacgtcactgctacagttgatatgaaaagcttatagtcaattattgtacttgctctaagtataggcttgcctgtgattagtaaccaaactggccctatatttttcagttggaagaacacatagttgctcaccggtttcagttgaaaagaaggggagaaaataaaaagctcaccggcggcttctctcctctcgccggtcgacggcgcgatgctgcgcggattccctcaggcccggaggctcctcaggtgatctccatctccccttgttcttcttcttgtcctgcgcaaccgatgggcgggttcttgatgcgccgtcgctctgggtatggggggttttggtttcaggaggatggggttggagaaggaagacgcctacttctggaagcagatgggcaagggcatgctctgcacctacgcgctcttcggcgccgcctggctctggaacgagacctctcccctcggctggtggacgctcaagccgcgccccaaggtaatctcttcttgtagttagggtctagggatgcatatctgaagatatgatttaactggaaccaagcctatacaatcagtttcttggggggttttctttttcagaatttttgaatacagataactctgagcatggaggattaggtattttgcagatgtttctgtaatgttgattgcacaatcgaccagcatattttccttagtgatgtatgatgacagttttatacaaggagggcctgtaaattctcatttggttataatatttactgttgataaaaacagtgagttgcactgaaaaatatgcgacatcattgggagtccaattaattgataacgagaaggaaaaaccctaagcataatgctgatcctgcaatttatctatgaaaactttggcagcctttttgatctgtaaagacgacgtagaagttgaccgtgcagtgttgttaattctgacattcctctcacagtttgttttcctatctcctatacatcttaatagtgttgttgaatctttcatcttatgtttaggaaatttctaaatcttatttactctgttgaaagaagtaccgtaagcacattgagatattagcacattactgttgattagggaagcttatttatttgaatttattatcttaggtagaactcacatagtcgcaccgatatcccctgtctgattcttcttgcataatactagttgggtgtgagaactctgaaatgagattaattaatagcatgtgtatatttttcaaattaaaactgaactctgaaatctgacaaggtggaaacgaactgatgtggcattttgttttattgtaagatatatgtgcagagaaataaattcatcctgtttttatacccaattactgaaacatcttggttaaggaccaccagtagctaatgccaattcatcctgattctgaactctagtcaagtattcatctttcttttaagaagtcactgttgattttggcaaatcaattgatgagaagcatgttctgtattttgatggtatgctattcaatgaattttctggctggctggatgcatgaaacatagcatacggtagcctcctaatcgtccatatgccacattatactttactgaaccaacaattatagatcttcatttgcaattcctaagcacctctgatatgtatcgcctatatccatctcaattcccaaccatgaaatggtaggatgaaacataagtgcataaacattagaatgatatatctttttaaaaaaatgtattatagttgtgtagaaacaaatagtttgccattgagatctcagaaagatataggtatttttgttaccacgtgagctaaagctcttttgaaacattgtggctaacagcctatggccatatatgtgctaagaacctaacacttctttcggcttactcttattcaagttatcctttctgatatgttatcttccatgtttctcaggaagaaagagaaatggcccacctttacgagcgcaggatgtttccatacccaggtgatgaagaggcagttgaggagttcataaaaagtggaggtgctctaggcaccacaattggacccaaaggttttgctgattccaacatggactctgataacatgcagaaacaattgcagtcaaaaaagtttgaccaagaagcacagaagctctggtttcggatgaggaatgaggtcgtacaagaactccaagagaagggattcgatgttgaatgaaattttacttctacataaacagaaatggagtaaagctgaagtatgtgcaaattgtttcagcttgttagccgtctaggaaattaggagcttagaatgcacgcaaaatgttaaaacacctactttgcaatctggagatttttttttttaatttgagaaagcaatctggagaatctagagagtttactattcaacttcaatttggtcttgttgggtcattgcattccatcagttacagattttgtaccttaaagatatggtatcagttaccagtatctcctcgcgtttcagttttgaagatcatattgtctggtttctataaattttatgcctggatgttcatcaaaaatttggtgatgcttaatcccccccctgctgcaatgtgtacaatccaatggcaaagccgcaaaggtggtcttataatcaggtagttacaacaggttcagctggcaactggacttagcaactccttagttcagagcccaagaatatcacttttgtattatagaaaaaaaaaagatggaacccttatgtatgagcaagaattccattcatcagtaactagtctgtatatcaatcactatacattggttaaaatatataacaaaaaaaaaactgttcagatatatctgttctactttactatacacttgtataatggcctatttgggggtatgttccatcaaaatgtgtaactgattcaagagttgcaggcttgcagccagcctactgaaaatgctatttacttccaacagataataccccctttccatgtttgcttcggaacacaagattgccgatgctcattcaatcacagtaccacgagatcacccaaccttcatggttcaaatgttgggacctctgcagaagcaccccaagatgcctggtacactgcacgctgcgctatgcttctgtaaggatcttcctccctcttcctcttcagatatgacattaagctctctacttcggatttgatatgcaaatacacttcgtttgcacttttcctatctctgacgacattatccatacctttcatttcgattggtttgccaaataggtagtagaaccggcctggcactttggggagcaaagcaggtatgtgaacgtcttgatttccatcctctcctttgacgctatccctgaaacaaattatgtgaacacataatgaacaaataaaagtgtgctcttttgcaatcccatcactttgtggcaagattcttgtagtaatattcttacttgcactatcatgaggttaagttgtggcaaactgagtgatgtttttgtcaagctttgaattttgtagtatttagccgaagttctaaagtcatcgtgatatggggcgattacccctgttgagaaagccaaaatacgaagggatgatagaaatcttaccttactctttgggcttctcggttaatcgactcaatccattcccgaaggtagggaatgttcttttgatcattgtagtcggcgaccaactgcagaaacaagaatgtttactcgtcatagaaacaagatggataaccacaaacagaaactgcatcaccaccacacaagatattgagcaatcatgcatgtgtggttatttgatgactctgcttcttgaagaaaaaaaaggaaacagtgctaagatgcatggcatccttgtttttcacacaagaactgatagagtggtattttgcaggaggtcagcaaaaatcacaggcatatttgcaacatttctccttttttagagagagaatcaaaattttcttctgaaaaagaattagtcgcacatctgaaaattttagatatatggtggaggagaaatagatggaagtttacctctaaaacatcatcttctcctacaaaaccaaatggtatgatagtaacaccaaaacgtgctgccattcttacaaattctggttggtctggccaaaacaacttgtatgcttcaccctgcaaagtacaacagaatcattacagtaagggcaaaagatgttttttttttctatgcagaacactgacattttttcatgactgacaagatcagtacatgtgcgatttagttaattctgacttgatatatttatgaccatatatttcatatttgtcgatgcaaattagagatattaaacgcaccttcctgtgaagagcttcccgcacaccgcctggatagagcaaaacaaattgatttctctcaaacaacctatacatattgatcgcagtgactggtaatccaccgtacatagaaattgtatcgaaccgagacagctcctgtcgcgaactctcatgttttcctccaaataaaattgggtgagccataccacggaaacttgttctcttctctctcaagaactcctcgtacaatggactcaactcgatccccatcagtgcatgataacccacaaacaagacaggaccttggtcaggaacaccagtaaggccacgaacaatcttcccattcttcagggtagacagcatgactgggctcaatgcaaggtgaaacaatctgcagaagttttagttcgctaattactgattcatttatatggcaaaattacatgcaaaagtaaaatagaattttgaattctcatagtgcgttaacatacttgtgatcttcatcgaatgttttcttgaactcactcaatgtcgggggaatgtaatccgtcacaggatcccgttgtctgccacggcggtacatatttactccttttatgactgataaaagattaacaccgtcctcctgtccaaaatagttaggtagtgcttgcatgaggagattcctttggtatttttgtagattctgtttcctaaggatctgaagccaattccccaataaaacaggttactataaaattgaagtgtgatgcgtcataccaacagtagtgtatggccattgtctttgaagtaccgaactctgcagtttttcagtgatttgaagagtctatctgcctcttctccacttggcagaagattatcattgccactgaataaaagtatttagtgtttcagcataagaccgaatttataggattaatccagattatagaactacagaatacatgctgtagtgtcatgtatcaggcattcaggctacctagcaagaagtagaacttcagcttgtacagcatgaagacgagagttagcgtaggctgctcctgacttcagcagcttgagtttccagaaaagagtatcccttggtatgatatctgccaattcctgagaaataacaaaaaggaatgaaaaataattagatgaaatgttttctcaaatagtacgaagtattatgtatctccttgagaatgcccaaattgtagctgatttcagctgcactacggctaaaagaaagagctaatttggttttttttttaaaaaaacaaaaagagctaaaagaaatacatgctgccccaacatttcacgatgtgatctgaaaaagcattactttgtaaaagcatttctttcaatacatgtattctgccattggagcaaaagtttcaaattacaaaaaacttagttatttgaaaatgcttatctggatccatagataaaagtggcaacatttagctagtaatgttttaaaatttagtcattacttttaagtttaaaagcataaaaatgtagatattcctcatgcacatgttgttgtttatgtaaaaatgagtaatagatagaaccagatgaggaaatgaaaataaggtatgataataacatactgaaagcaaaggcagcatggaagtgagactatctgacaacttctgcagagtttttggaggagaaaggttgttctcaacgctgaccatagccattttaagaggatcgcctgttcacacaccatctttagatcaattaaaaaagatacaaaaggaagtgttgagtgttaattgtaaatatgctgagatagaatcctggatgaaaatactaagataaatttccaaaaaaaaaatgtaaaagctaatatgcttttatgtaaaaactagtatgcttcatactagagttgttgatcagtgacccggcatgaattttccaagtttaaggctaccttttggaacattggactaccaaagaccgtttcccaatataataagaaataaatgaacagtaagcaataaaaagatgctttggttctcaggctggatcaaaaaagtgtattgcattacaagcatagcaaatcatccgattggccaaaacacacaaaacaacaaagctagaatgaatgtatattaacgaacttacaagctaaaaagaggtatacccatgacaaaactgagaagatatggaactgtgacatgaagttcacttggcattgcttccaacacaggtaatatcggctgcaacggagtctttgcaaaggacgttgctggcaacattgaaggttgtttgttactacaactcaaacaaatttatgagaaggaacgttaccaattaaaatagaactaaagaaaatttcacctgcctggattaatcagtatgagaaccagatcaatttgtggattacgagctgccaccgaaagtgctaggcatcctccaaatgagtccccgatgagatatatgggtcggtttggtgacatagcatgctcatatttgatagaattttccacaatctgcaacaaccctgtatgcattgtattcacacgcattagcagtttgatttaaattcaaggtcataatttcgctttgaattaatttcctaaattctaataagcctttgggctttgttagcccattcccaacccaatgactaaaatagtgtctatagcattaaataagttgccacatatgataaaaatgatgtgtcaagtgaataaataaggaaagaaaaggaaaccatgtcatgagacatgatttctacataacattcaagacatcctgtgagataagtagcattaaatttaaatatgaaatagtgttgtttgcattggaaaattattgtctagtcctagtttcttgatgacgtggagtttatgaactatatctggtgtcttagattgggaatggccttacatcatgctgaaattaccacggtgcacgaaaattcctaaattccatgcagatgaatagtttttcaccgttgtaatttttttttgtcgaccaaaagatggcatgaacgtcggaggagtctccttcctccgagcccaacgcggcggcgctcgctacctctgctcctggtcggcctcgcctactgcggcggcggcggcggcgtggcaccggcacggaggagggttctggctgcacaaggcgcgcgggcagcatctcctcaccaacccgcgcgtcctcgacgccatcgtcgcgcacgccgcgctccgctccgcccggtcgacgccgtcacagccctcgccgccggcctcggcctcgcgcacaagctcacggtccccgcccacgcgttcgacagaatgcctcaaagaaaaatgaagaaaaaaaaaacgctgatcctctcttcttctcccgttgccaggtgaccacgggcgactccatggcgatcgagctccccaagttcgacatctgcgtcgccagcatcccatacgggatctcgtcgccactgaccgcgaagctgctgatcggctcccaccggttcagggcgcggttcgcgcggcggctgatgggcacgccggggcacggggagcgcaacctcctcgccaccaacgcgcgcctggtcgccgacgtgcggctgctcatggacgtgagcaggccggagttctcctccctcgtcgagatccgccccaagcagacccggcccaaggagttcgccgccggcgtcgagctccacgagtggctcgcgttcacgcgcgcgtgcaccggacagcacaagctccagcggcagcatcagccgccgcccaagaagaagaagagcaagaagaagaggaagacactcggcgtcctcttcaagtaggacgagatggtcatcgagctgctaaggctagcccaaggacacgccggcggcggcagtgaagatggcggcgtcgtcgtcgtcggcaacaatgaggatgaccgcgacggcgacgtcggcgtcgcaagtggtttcagcagggaagaggtcgtggcgttcaaggagaggatcgccggagcattgcggtccgccgcgctcgccggcaagacggcgtcgcagctgcccaacgacgagctgctcaggttgcttcggctcttcattcactgggggatacgcttcggtagaggcgtagaaaacatcaaattcttaacgcaaatagggaaataaaataatacaagcttatgcatattctcttttttctttatgagttacagcttttacttaaacatttaattatctatctatctatctatctattatatactaaaagtccattaaacatcctataaacgctattaagccaccacatagcgctcctataatcgctcctacatcgtcacgtggcatttaattatttagcggtcgatttttactaatataccgtggatctattattttctaccattagatttatttatgtaaatagaaagagataaaaagaagtgcccgcatagcattcgcctgttgcgaacgtctccgatccgtcgaatccctgttacctaatgagcaatgctacacgtaataaatttatatcctaattagcgttaattagcactcatcagttaattagtactgtgtaattagcatacgtaggtgttattaagaaatttcagctccatgcatacaaaagtagcaagcccaccatatttagtgtggtattttttttcagtatttaatagcaacacattatattcaataatttatatcctaaattttaaacatgccattcatattaaagccctattcaaaatttttttaaaaaatatctgctcataaactttgtacaaaaataatcctttgtatccataaactttacatggcaaaaaaattctattaggaaactttcttcggtaattaaaaaaaatcaactcatgggattcaaaaaataaaaaaatgtaagattaaaaaaatccattcacaaactttctatggaaaatgtttatattcataaactttaggaaactttctacaacaattaaatatttattaataggactttaaaaattatacgcaaaatgcaccattttattatatgataaaatcactcaataagtagaaattataattatgactacatccgcatgcaaaattattttatataccgaaacatgcatgtatttccagcttgaaagaaagggacatgtatatatcatatttttttcagatcagatagacttgcatgcactcttctagaatgagcccagcccacgtgtccgttcgtgcaaactccttctcgcacacgtccgcgcaacagccatctcggcccgcatgtcccacccctcccatccatacatgtgcttgcgtacgtatgtgcctcccccatatatttcatttatcttctattttcccttttagttagatagaaaaaatatttaatgatttatacaccgccacatactatttctataatcgctcctacactgccacgtggcatttaatcatctagtcgtcaattttcactaatatactgtggacccattattttctaccattagatttatttatccaaatagaaagggataaaaaggacgcgcatatcccacccctcccgtccagtaggtgtgcttgcgtacgtatgtacctcccctatatatttcctttctcttctattttcctttttagttagatggaaaaaaatattttatgatttatacaaatacaaaatgataaaaaagggcccgtataccctccctgcctgtccagtatgcatgtgtacttacctctcccatatattgttttcctcttttagttacatggaaaaaatattttatgataacaaattttaaacaattatattatctaaatcatatagataatttttatttgcgcacactattagattatttactataaaatttaaaattgaaaatctaaattaactatattattaaagaaattcattattttagtcatatatattctacgaactatagcttttgttcactaattcatatatttttaagaaaaaatcataatagattttaaaccttctgattaataacatgggtggacaattttgacaacaagaaacctaaccagttgaactacgctcactttattatgttggacataaaaacaaccataatttttaagctacattttttaaatactcatatgccttttaaaccggtagaaccactatttctaatcattagatctatcttatatatgaaaaagtgtttattcatggtacatgacatttcaaaaatattactgtgcaatgatacttcgttgttatagtattcctactaggttgcgtggagtctctcatccacactacatgaaatgttcatagatagatcgtctctcaaaatatatcaatcatattaggctatataattaaacccatgtatttcgtggagcttcatgtcccacccaatacatcttttaacatattatgataatatattatacaattaaaaaaagaaaacaccttatttttattttacacttattttactttcgttgacatattttctaaagaaaataaatctaccttcttttcaaatgatgaagaagattataaataattgcttatagatattacttatatatgatatatataagggtaataggttaaaatattattaaacaattaattaatgctgacaaaaaacaatttatggagaaatcgtggtagatgttctccggttaatatctcgcttttataaatacctcaaatttagcgtacacgtatgcccgcgcgaatcttcctagttttgttaataatagtgaagaagcctaagtggataataacataatttatttatttattaccttcaaatggcgtacgatcattcactggtatatgcaagcagcgaacctcgaataccctgcagattcgagatggagggggaaacaattaaattgaattgtggtttttttattcagcaaaagactacagctataacttggtgtagaggacgattgagtactggagacaagtgcacttatataaaaatataaacaaaagtagttttttgtactacagtactactactacaacagttactggcacaaactcagaataacctaagcagaaaaaaaaaaggaagtgtttatatcaaaataatttaatggaactttgcagaaaggaaaccaataaagtcggcaaaggaagatcataagctagttaactccaaaagtgtaaatatagctagagaagtcgttgtgtctttatcagaagaaagaagtcaccttcccaaagacttgtggtgcaaaatgagccccattccaacaccatcagttcctgttgtgcagtcaaatctaatcagaaattgttaacacgcaatactctaatttaaccactcaggcgacagcctttttgggagatcttcctttgtttcttccataccaggatcctatgtcttcaaaatcacggtgattttatcgctgacatgtggaccaagttagaacttactgtatttattttccaagagttttgacagtagtattcctctgtttatccgagttagcatatcgaaatatatatatattcatagctgaacactaccccaggaaatgaaaaaaaatatataatggtataatactgatatgaaaaatgaatatgtggattatgatcctgcagggacatggcaattgtctcatcatgtgatttgctgctaagtctggtttttactctgtaatataattgtagccgcgaacaaacagtaattagctgtgaatatttggacggaagcaacgtaattaacgtatacctggcaagaagagcagcagcggcgcgttgtccaccgccggccggccggcgtcgacggggcagaaccaccgcggcgggccgccgtcgtcgctggagacggccctggccgccgcgaagtagtccttcaccgtgacgccgccgaacccgtcgtcgtagagagcctccaccaccctgcccgtcctcacctccgccgcatcctccctcctcttctcctcctcctccacacccacctgccgctgctgctgcgtctccgcattcacggacaccgccaccgacgccgtccccacggagctcgccgcccgtagcgtcgcggagggccgccgccaccgacagccgaggccgccagcggcgacggcggggagcgtgtggagcgcggcggacatggcggcggaatgcgcggcgcggctttggtcggagaagcaggggggaggagaggagaggagatgaggcgggggaatgattgattgatgcgcgcagagctttttgaggggcgcaaaaaaaaaggggggggcttaaagaggtgacgtcacccgcagattgccatgtaggagtactacaggtgtagcgtggccgttggtgcttttcattttttttttggttgatggtgattctgagtcgtggttggcacgggagccactattaaaagtattaaaagagagaggggaaaaaaagaacagcaatgagaattttgtagtggaaacctcaagattcttcagtaaaaagtggtgatctttcaggatggggtgttggcttggcttggcttgtggctggagaagataaactactgtaaagcattttgtgccgttgcacaaatggacagataccaaatggggggtgcacgtgctttgcatagtgtggtgggctggaatcgtcggtaggactgcaaaaaataatactacgcgtgtgtttagtagtttgggtgtaaagtttttaagtatacgaatacacatttgaagtattaaacgtagattgataacaaaacaaattataaattttacctgtaaactgcgagacgaatttattaagcctaattaattcgtcattagcaaatatttattgtaacatcatattatcaaatcatgtcgtaattaggctcaaaaggtccgtctcgcaatttacatgcaaactgtgcaattatttttttttcacatttagtgtcctatgcatgtgtccaaatatttgatgtgatatttttttgccaatttttttggaatataaacaaggcctatgtgtatttgatttacctacactacacaaagcatgtaccggagaggtgttgtagtaattttagtttccaaaaacaattactctctccgtttcatattataagtcattttgattattttcctaaacaaacttatttagatttccaagtttatagaaaaaatagtaacataacgtatatataatcaaaatatatattcaatattacattaaaaaaactaatttggtgtggtagatattataacttttttctacaaacccaatcaaatctaaaatagtttgactagaaaaagacaaaatgactaataatataaaacggagggagtactatctcaaatgaaacatatgtcgtttacttttaaaactttgaccacatatttgaaatatttgttaaagatgatgaggggtagatttatcgtgaaaattactttcctttccttttcttgataatagttaaaaaaatactttcataatctcatagacttgttagattttacaagttaattgtaattaaaattccgtggttaaagacccgtcctataatggcaaaatagaatatacggtatatatttgtgaccagaaaaatgtaggaatgtcttctttttagttagataattggtaggaatacctggttggtaaacggaaatgaaaagaaaagggcgaaattcaacctcgtgtagggtaaggcacggccgtggaggtgacaagaagcgtggcacagcaccagcagcatactagtactgtacttttgtggtgggcaagccacatctcatcacatgccggcccacgaggctgttgcgtcccacatggcccacggggtcatcgtttggcttgtttgcagatgaaaaataattcctgaataaaacttttacatatgtgtctttagcaatctaaaaataaaaactgaaaaataaattaagatgaaaaataaatctcagaatcaactctaaatttagaattaaaaatttaaattttagtttataagtaattataggcaaaaagatgacaggctagtcgcgacgcgcgaccgtttagatttagaatcgatcgtgtcgactcgcgcctcttggtgtcgatcggttgcttagctcacttggattttgtgcccggccaactataccagcgcagatgccatgtcgacgtgtcactgtcggctacgcggctggctccgatcgatcactgatactgatacttggcgcgagcgtgcgggccacccaacagaatggccaccgcctagttcccatgccaatctgccgagaatgatgtttttgaattgatgttataatatatcctattgaagtaaaaattattggcaatgcctatattcaatttggcactaatctagaatatttttctctattatctataccatcaatatttggcatcatattaaagcaatccaagcatatgtaataaatctctaccatatacttatacacataaacagactctcgcgtcgcccctcccccttggacgatacgggaggcgacgaccccgccggcgtgcgtcccccctccttcctcctccgcctcgccgaagcccgagcggccgtcggcaaagccatgcggccgcagtgacggcggcggcggggcttcattttccccttgttgcgctcgggcaggggggctgcgcgggacggaggaaaccgcctagatctgtgctgctcggccggatctggcggcacggcggtggcatcggagtttgggagtgctggcagcggtgggaaagtccgccagatccgcatttggatctggtggggaggcggctggcggcggcgcacgattgtggtggcaacggcggcagcgacgcccgatggtggcggtggcgggtgaggtctggcccacggcggccggatctggccaaacagccgttggcgacgacaatgactgtggctgagcgacggcggcaagcagcgggcaacgacgacggttgacggaggtgctggaggctgaggcaggcgcgacgtgcgcggaggtgcatgaggctgcaacggcggcggaggcgcagaagggccacgatgacggctgagacccgggaggcagcggcagacgcaacggcggcgcacggaggctgtggatggctggcagggattgcggctggcatggccagctcagcgatggctcagccggcaaccagcatgatgagcgcgtggagtgtggccggcggtgccggtgtggcacgccaaagtgcgcagcaggaggtgaagctggttgagatggagaccggtgaggtggcagcacggggagactggccagcggggggcgctggtgcagtgaagcccatgcgccggcaaaggtgttgatggcggtggagcaatggtgcatttgtagaagatcggcaggtgatggacagcgggtgaaaacccagcctggccttggccggatcgacaacaatgacgttcgagtgccattcccctccttagagcgttgtcatgccatctcacccctcaagggtggctgccaggtgaaagctcagtctcggttctctttgagaccttgacggacggcggtggcggtttcccgtcgcttctctccctagagacatcgtcgaggcatccccttgccgaagcccctcaagcaattggtgcaaccccgctctagattctagtccttttgtggtggcgttctagtttctacaagttggccgcgtaggagggcctagggggagaggagttacattcttctctctcaccctcaatccctaaatcgtgaagacttggatagagtggagcgttgtgttgattgtaagggttgggttttgggtgatctcgactgtcttcctttgttggcctagcggcggtcggtcacgcttagcagcggccggtccgtgctaaccttctcctagatatgtgtgttggcgttgtcggtgtgtaggtggtggtatactttttccattttcctggttatgaccatctagggttgtaatctcgtaattttttcctgttctatcaatagaacttcgcaccgtcttagtgcgagtcgttcaaaaaaaataaatctctaccataccaaagatttggtagtgttaaaatatgccaaaaatttggtactaccaatgatatcattggtaaggtagagaaccaaacggccatatagtacttcctttatccaaaaatcttaaatcttaaaccaatgttcttttctcctggagataaaagataaagatgaaaattaagtgttttacgaaaaataaggtggtattaacatatgattaattaagttttaattattacaaactagaaaaatagattaatctaatattttagagcaactttcatatagaaaattttcacacaagacacactgtttaacagtttgaaaagcgtgccataaatattcaatattttatccactctttgtagtggaaacgaacatgatagtctttatacatctataagtggaggagttgtccttttgttttacaatgctaaattaaattgttaactggaactcgcaggccaggttctcagcgagcagctccggtgccacactcctgaggttggcaacgcttaccgtattcaccaggccgttgattctcttcctcagggtgtcctagctgagacgctggtactcggcggcagaggcagcgctgtcgttggcctccctcgtcgccatccgtgccgtcatgtggaagggcgggatgtagatccctttggccattcgctaaccggggatcatctccggcagaagtggtggtggtgggggcagcattggagttgtcggctaggaataggattcagctccttcctattaggggttcacccgcgagtaggggtgggcaaagaagaccgaaccgaaatgaccgagaccgagaccgaaaccgaactaaccgagaccgaaaaattcgaatcagcactttctacaaaccgaatttagttcggtcaaattcagttttagggctcggttaaccgaattgaccgaaaaaaccgaaatatatcactggattaggcccaatacctcttcctccaaaaaccagaaaaaaacttatcctcacccacgaccccccagtagtccacccccaccaacctcctcctctcggcctctccatccacccccttcccatccccatcccctcctccccagtgcagccatgctggtgaccgacggtggagctcccggatagcctcccgcaggctgttcctctacctcccgtgggccatagcctccgcgccgccgcttccgacgccagcgctacctgctactgctgctcggtcagctggtgactggtgagcggcgtcaggaggaggatgaggaggaggaggaggggggggggggagagcgccgacgagggtaggctcgcgccggcagagagttcgaacgacggcgttgagaggaacagcatggccggcgcggcggcggcagggtgggccctgcctgggattcctctgctttggtggctcgcgtcatcgtcgtatccgcaccccggtggatgggatctggagcttctggtagtcggtagaatggtggagatcgacgggacccaagtcatggcaagatcgatttgatttgatttgcttcttttttttttctgaatcatatgcggcatcatattgtagttcttcatccgacttacttcgattcattgatcttgtatggagtacttatttttgtgtgattaatttttttttgttgttcatatgctgttatggttagttcagtctatgaccgagaccgaaccgaactaaccgaagaccgaagtgctcgaagtgctcggtcttaagttttcttgaaaaccgatcagtcttgtgattctgaagaccgaattttccaaaagaccgaagaacctaaccgaatttatcggttagaccgaatgcctacccttacccgcgagagagtatgcggcgcagcggcggtggcggccggggaggtgggagacagcggggtggcgaatagccgcgacctacgaggacaccacgtcacgacttacgagtgaaaagtcgaaaacttgtactacatacctttttttattgaaacttctggccctaattttttagggtgaaaagctttgacgtattacgttggatatacggacacacatttgtagtattaaacgtagactaataacaaaacaaattacatattccacctataaactgtgagctgaatttattaagcataattaattcgtcattagcaaatgttcactgtagcaccacattgtcaaatcatagagcaactaggtttaaaagattcgtctcgcaatttacacgtaatttctttgcatgcttgcaagcgaccaaggagggccgcggggggatgacttcagtgcgagcaccattaaagagcatgatggcccaacaagtgtcggaggggttggaaaaattcggtgttcgtggccgccttcacgtacggaatccggactcccacctaggggtgcaagtggggcgggctttttttatggcccgcagtcccgccccacaaaaaagcccgtaaatttgcgagcgggccatcccgtatggaccttgcaaaattgtttggcccatcccgcatagcccgttgggcgccaccacattagggcacgagactgggtctctgggagacacgagacaccgccgcagccgagacaggagacggcggcggtgagacgacgccgcggcggtgctactctcgtcttcctcgtcgcccatccatcttcctcggcgagacgacgccgcagcagccatccccaacccccacgtgtgttcggggcgagcctgctacgctacccgtgctgctgcctccaactctctacccatcactggctccatcggcctgggagactgggagcaggtaacttcgagctgccatggaagagggctgcagttccaattggccggccacaccttgtgccgcagcgacgacggccggtcaattgtttttcctccttcaagatttgtttgttcttcaagcagcaggggatttgtttgatgagaagtgatttctactcatttggattattgaataagaacttcagattaaataataagcatttgggtgagatttggttttggatcaagtcgctaagaatggttagcaggccaggactggcttggactatacttgttatgtcattgaaaaatgaagtgttgaacacatgttaatactaacatccttatgtaccagtttgatgttgttaatcacttgtcaggtcatttagcattattagtgtttgtggctctgctgaatctgtgagttctcttgcatgttcttgagctagtacctctgctgaatttgtgagttctctgacatgtttcttgagctagtagctctgaatctgtttcctgttcactgtcctcttgatgttgcaattttatattttcttccctctcttggtaggtttaatctgcaattttatagctttattccttctcttgctaggattaatcctagctaaatttgggacagggagtagttctgtgcttgtgtgaatattttcacgtgaaaatagtacagttttgtttgctgattgatgaatattatgccaatgtgggctgtccagtggtgcccgtcgggctgaaaaatctgccaagccgtgcggggcgggctgccgtttgcccgcatagggagtttgcggctggtgtggggcggggcgggacggcccacaacccatcccacttgcaatcctacaagtcccacccgtcgccgccatcacctgcaagctaaactgggtgctgtgtgtcggctgccgccgacacgtgagcacagcgtcgccagagatgctgcgggagatgggctgcgtgttggaaatatggtcataattcgatatattttaattcaaaatattaagacaataaacatgacacatatagggtatgaactagtgcaattgataaagtgaatcatcatgagcatgcttaatataaaataagcatcaacatagacataaaaacgcaataacattgcgactaacagtagaacttgaggaaataacgtgagtaggttatacactgaggatggccctccactggagtttgaggcagtattgcctccgttggtgttgacgggaacctccttctcattgtctccaatgttgctgtcgtctccggtgttcgacatgttggcaaagacgatgtagaggaagacgaacaggagcaattgcgcatagcgctcccaaaaacttgatcgtccgcctatccgtgcaagtacgcaagcggacggagttctggaggcacctgctcgtcccgtgcacctgtgcacgcaggtgaacaggactggggaaggatcatgctgggcaggaaaagagagagaaaccggcaagaggaatagaggaagaacaaaagaaccatgcactattgaaatcattccctttggcggagtatgtatatgcgtgcgcaagactaacgttcgggaccatcaaccgagtgtttaattcagtaaccgatgcgctcgttaatatgaccaatacagaatcaattaccgtgtttattaccgttcgagaccatcaaccgcgtgcttaattcaataaccaacgcgctcgtgaatattatcgtccgttataaaacgagagagatcattccctttggcggagtatatgcgtgcacaagagtaacgttcggaaccatcaactgcaagagtaacgttcgggaccattaaccgcgtgcttaattcggtagccgatgcgctcgattactgtgtttattaccgttcaggaccatcaaccgcgtgctcgttaatattatcgtccgttacaaaacgagagagaattcccatcattaaaacagaatcaattaccatgtttattactgttcgggaccatcaaccgcagagagaattcccaataaccaatatgctcattaaaacagaatcaattactgtgtttattaccgtttgggaccatcaaccgcgcgtgcttaattcagtaagcgatgcgcaagagtaacattcgggaccatcaaccgtgtgcttaattcagtaagcgacgtgctcgttaatattaccgatacagaatcagttaccgtattttctcaaccggtcaacaaagtctatccactagcttcatatttaagttgagacctctttacttttaaggtggtattattactcatagcacttcatgcgagtcaataaaatttagcccattaatgtaacactgcgttagcgccgtcgggaaagctctctgctgcgtgggcactgggcagccgaatccgacccagtcggagcttgagtcgttcagtacttgagtagcctatccgattgacggtcccagagttcatatggtcactataatctctttttttttaatctaaaatatacccgtacgttacaatgggtgaaggctattttacgtcgtattgtcttaaattacatatgtaactttagtgtatttacaatataagttttaaaattacatatgtaagtttttaaattacatatatatatatatatatatataaatatatataaaagtagtgtataatttaagtgtaagtactatatagtatactatatatatatatgtgtgtgtctatatatatatatatatatatatatatatatatatatatatatatatatatatatatatatatatatatatatatatgggcacttcatatggggcaccatggtatctaatgcacaaaattactcaaatttttcaaaattttcaaattgtgagtatatacctagttataataatttgattcatacctatacttatcaacaaaaaaactcaaatttaactttatttcacaatccatgattacatacctaactaattatatgtatggatgctatatacctagaatcaaaatctaacaaaaacaagttcaaattcagttcaaacttgctttaaactagttagtaaagtagttaatgttaatacctaagtaattgaaaaagtttcatactcatttgaattgggtatatactcaatttcaacaatggtgcccgggcaccatggagcaccaaacaaatttactatatatatatatatatatatatatatatatatatatatatatatatatatatatatatatatatatataggagtaactcttttctttgcctaacacgatgggtaattaaatggtcatacatgtcgctgtttgcctaaataaatatgatgaattcatgttgatgggtaattaaatggtgatacatgttgctgtttgcctaaacaaatatgatgaatgtatgttgtgcaatgttcaatgggcatggcgcatttccccgcaaaaaaaaaaaagggcatggcgcataggagaactacgttagcggcaccagaattatgtcacctggtgataatcgactgtaatctggtgataattatgtcaccagaattatagcaaatcctttttcaaagagatttcttatacgactcctcctgtatttccaaaagcgaactaatttaaaacccgacttaaatagggacctgtatttccaaaagcggacgaacttaaataccgactcatatacggatgacgtaccaaagtatcggtaaaaacatcttcaatttttataatagtagagaagagatgcgctgccacatcggtccttctcctccgtttcatattaagtcaaaattttgactaatttataaaaaaaatagcaacatctacaataaattagtttcattaaatttaatattgaatatattttgataatatatttattttgtattaaaaatgttattatttttaacaaacttgatcaaatttaaggacttttaactagaaaaatgtcaaacaacttataatatgaaatggagcgagtatgttttttaagacttacatgtggatccatctttttaaattctaatttttattttcttattgtgatgccaggtgagtgccatgtcgaaataaaaaccaagttaacctgccacatatgcaaccacatgagccaaaactgatctcaaaactattgaagaggttgatttacactggttttaccagttggaagagatacgaaatacctggtcaagggacgtaaaatgatccatagatgagggacgtaaaatgaacttattccgcatataattgatgctccggcccatttagtaagttaattaaattccaaaagatggtggttggccgttaaatatttgctcgtcttgcaaagttgcaagatggggatgatggcctccgttcgtaccgccgcgatacgcgaggctgcttatcccgtacgtaaaatcatgtcgtccaccggtcgatcgcatccatacacctcggtaactaggattcaatgaaacatatactccgatttttgattaagatatgtctcatcaaatttcaggtaattactccctcccaaaatataagtgtgtccagattcgtagcactaggaagtgt

SEQ ID NO: 6174 - DNA, 6346 bp, Oryza sativa
tgccgccggccgcctcgacgccgacgtcatcacgacatgacgccgcggcacgacgccgcggcggcccgatacgacgagacgccacgacgccgccgtggcacggcatcggcgccgcgccgccaagccgccacgccgccgccgcgcaacgccggcgccgtgccgtgcgcttcgccaccgccgcacaacgtcgccaccgggccgcgcgccacgtcgccaccgtgccgcgcgccgcacggcgccgccgccgcgccacgccgatgccgcgcgtgccgccacgcggccgctgcaccgtcccgccgccgtccgctgctgccacaccgccgtcccgctgccgccacaccgccgctccgctgccgccacggcatcgaacaaaataacgtgaactaacgtgaacgagcgaacgaacgtgaacaagaacgagcgaacgaacgtgaacgagaacatgaacgagcgaacgaatgtgaacgagaattgaacgtgaaagaatgaacgaacgtgaatgaacgagcatgaacgaacgtcaacgaacgtgaacgtgaactaacgaacatgaacgaacgttaacgaatgtgaacgtgaatgaacgtgaacgtgaaatgcaatataggcaggtgaatgaatgtgaacgaacgaacgtacgtgaatgaaacgtgaccttaacgagaacgcgaacgtgaacgatcgtgaacgaaacgtgaacgtaaaatgcaatatatgttacttcgcgtttatcctaatacatctttttgtatcttgcagaaaagacgttgttggagtcgtccctcaagccggagtggtagctagccctcgaaggaattcgcgcagacaagtgacgtaattatatatatgattgttatatttgtaatgcaattaagactattagatttaatatacgacacttagacttagttttaatataagattattatagtttgtaattagactttagtatataatttattgactagctagggtcctataatatacgtcacctagacttagcatatatcactatttgagttttaatataagattattagatttgtaattagacttagcatataagattgtgtagggttctaatatacgacagttacacttagcatacatgactatttgagttttagtataagattatttacgttttaatataagattattatagtttgtaattatactttagtatataatttattgactagctagggtcctataatatacgtctcctagacttagcatatatcactatgtgagttttagtataagattattagatttgtaattagacttagcatataaggttgtgtagggttctaatatacgacagttacacttagcatatatgactatttgagttttagtataagattatttgagttttaatataagattattagatttgtaattagacttagcatataagattgtgtagggttctaatatacgatagttacacttagcatacatgactatttgagttttagtataagattatttacgttttaatataagattattatatttgtaattagacttagtatataactattgactagctagggtcctataatatacgtcacctagacttagcatttatcactatttgagttttagtataagattatttaagttttaatataagattattagatttgtaattagacttactatataatttattgactagctagggtcctgtaatatacgtcacctagacttagcatatgattgttagcatataagattgttaaaacataaatgtctcatgacttagcagctgtttcatgtatgaacagatggctgatcgcgatgaggaacagatattgtatgatacaatcgcggagggaagcagccagtactggaacgaagaagaggggaacgaggatccaaaccagtatttgaacgaggaagtgcagagggatgcagaggggaaccaagaggggcacgttgaaagggatgtggaggggaaccaggaggaggaggatagtgcaagtcaaccctccgctggacagaagagggcacgcgggcaacgaggtgccgcgaagaagcttgagggtcggcacaacataacggaagtggacgaagacggccgacctagtgccccggcagaagccgccaagaactatgtacgtcatagcggttgggttgtgcgggataacgtgcctgtcagtacggtatactggcgcagaacaagggcacgcggagatcatgagagctttgtcccagattcgaagaaagagatgctgtggaccacaatgctcgagacattcacccttcccgcgggtacagaggacaaagtgaaaaggtggattctgaagaaaatggcagaacagtttcagagcttcaagggagatctgtaccagaaatatatcctgaaggggcagacaccgaacttcgacacattcccaaagctaagggatcactgggacgagttcgttgcatataagacatgtgaacaagggcaggcgatgatggaaagaaacaaagaaaatgccaccaagaagaagtaccatcaccacttggggtcaggcggctatagcgtcgcgatgccgaagtgggaggagatggaggctagcttgcttgagtggggtatcgaaccggccaccgctaattggccggaccgatcgaagttctggtactatgctcatggtggaacgctcaacctagctgatggctccctggtcttcggcgatcagatacgcgaggctgcgcatcgactaacagaagcagtggaagcctcttctcagggcacgttccgaccggacagagagaaggacgagctgtcactcgccctgcaaactctagagcatccaggacgaacacgagggaaatgggtgattccttggaagattgggttcaaggaggacatccacacgtacaggagtcggatgaggagcaagagagataccgaggcgaagattgcagatctagagttcagggtatcgagctacgagctcagcatgcaacaggaggtggcaaggaaggttgatgaacgcatggccgcacatcggtcccatgatccctagccgaccattcctcctgcaatggtgagcccgtcaggaaaccgtagcagctgcgcctcaacgaggcaggtaggatcacagagcatggacgccatgcaaacccagcacgaaaccacctgccccgttgatgacatcactcagcggacaccatgtgagctgcatattcccttcaagaacttatcaataaaggtaagctcgtagtttatagattttagatttggccattccgctagttgctgcttatatatgttgtttactaataaataacctctcaccacatgaaggtggcgtcgggcatggccatcccaacggacccttcaggtacttaccactgcaggccgattccagcaggatactccaaggtcgaagttgagttggtcgaaggcgcgtacgaggacctcgaggtggattaccctggaggagatggtgagacgcatctacgcgacacaagccacgccattatactatggcgcaagcgctacatcatcctccctgggcaacaagcggcgtctcatgcaccatcccctccggctcctgcaccgtctcctcctcaggctcctgcaccgtctcctcctcatcagtctcctgtaccgtctcctcctcaggctcctacaccgtctcctccttatcagtctcctgtaccgactcctcctcaggatcctgcacagactcctcctcctgcacagactcctcctcaggctcctgcgtcgtgtcctccagcaccttccaagtcaagaactcaccaagcaccaccgcctgcccgcacaagggcaacgaagaaggcgaaagttgacgccgccgagaacaaggagccaccgtacgattgcacgcaacaggagcttgacgcttacgtggaagcagaagtgaagagacaattgaagcctcggggtccagaaaagaagattcctatagacccgagtgccaagaagttcttcaggagtatgtcggcaccagccaaggaggccataaagctaacggattatgagcgaacacttaagaaagcatcttctggaaagtccaaaccagtccctcagcttggagagcaaccaaaccaggagatcgagccgttggtgaccggcgaatattttggaatacaagaatttattaatgacaccgggctaactacggatcaattgctaggagacgcaccaatcaaaaaggcggaagtgaaatacatgtacgaactcggtaaatcgcttgtcaagcctgagctgctgcagtccctacccacacaaatgtacaagttccatcagctgtacatggagatgagcgcaaccggtagagagatgatcggagtgaggattagggacacggacttcttgcaaggagatgacattctctggatcaatttcaggggaatctacgaactataccagctggacgcccttgatgtctctattatgagttgctggattttgtaagtatatcgttcagttagatttcttactacgtctcctttaattaattaggtccttgtatataagtagactatatataatatataatcccttttatcgttgtagaatggagattcaaaggggcccgacggcggggggttttcgatactggattcatcgaccctcggaaagtaaacgtcgcaatgctcgaccaatacccgcaagccacagaggacaatctcgtccatctcttgaaggcgcagcattacaagacgttcatactgttgttgtacaacacagagttagtttaattttactgtcttcctataccaaatttcattctcgtacgaacattctaagtgtttcatatgtaatgcatcccacgcatattgcagattccactgggtgcttttactcttcgacctggaggcctacaccgtcaacatatatgactcaatggataaaaaagagtctacgttcgacaaggttttcgaacttatagacaggtactgtcataagttcctatgtgttaattaagaatcttgttatagttaattgctactacgaatcatagctttaaactccatgtagggcttggtatcggttccgtcatttggtccgcggcaaatggatagaaagacttaggcggaagttcaattttcctgtgagtacacatgctctacatttatatttctccgattcaaatacatacaagtgtatattaattagatctctcgtcgtttgtcatttatttatagtgcgcaaagcaaaagaagggaactaacttgtgcggctactacgtgtgcgagtattgccactgccttgcaaaccaaatcatcaccacaagagagctcgacgtacgtacaaataaattcaaattttcattacgtatcgatttgttgtttaattactaatcaatttcatacattcatatagtttattcgcatgagggataacctgatcacacacaaggaattcatcgcggcggttcaagaacaactcatgggattcatcaacgaacaaatccttgatcccaagggtgaattctactacgacggaaacacaattcataggtccttagcttctgagctagcgactactactacgtcgaaatcgtagctagctaggacatataatggattgtaattaatacatgactacatatgtttctatatgcatgtgtacacattttctataatgtaaatatatatatatatacacacacacacacatattatatatattatatatatatatatattatgcatgtacatatgtattgaaacatatatatgcatggtttatatatatatatatatatatatatatatatatatatatatatatatatataaaccatgcagcaacagggccatgaaaaaaaaggtcagctcgatctttagtcccggttggtaacaccaaccgggagtaaagatgactcagttgatgttaccaaccgggactaaagatcgatctttagcctcggttatttcacccgggattaaagatagcgatctttagtcccgaattggtagtcccggtttggaaaccgggactaaaggggggttacgaaccgggactacaaatgctttctccaccagtgggtgaatttagtctcacgtttgtaattttaaaattttgtatataagctgttagaattagtaaaattaaaacaaaatattttttatttcttgctaccgattgctttaccttttgttaaaagattgtttaacattttctataatataggatattaacatggttaagttacatgtttccagttttaaccaatcacacttagcactaagggcgtgaataatggtacgatcaccatgtaggagagaatgccacacaatatatttttttgttgtggaagtgagtgagatgagagagaatgcttttgtctataaataggcagacatatat

SEQ ID NO: 6175 - DNA, 8623 bp, Oryza sativa
cgacgggggaggcggcggcggtggcgagagcggagcggaagcgcaggcggacgcggcggcatgaggcgagcataggatggggggcagttcctaccagctgcgatgtgatgttcgattcatgaggaggacggtgatgccggaggcggaggtggtggtggtggttgggcggcgccgccgacgcgcgggctgtggaggagcggtggcggcgccgacggtggcggagggaggcaggaagcggcgtgtggaggaggaggcggcggcgccgcgtcgcgcgtcggcgtgtgggcgtggaggaggcggactggcggttgctgggctggatggttaggtttttcggttaattgtctaattgatgggctgaatgggccagtatagtgtgtcttatggccgaataaaatggaataagttcatcataggtcccttaaccgaatccgattttcgtccttcaactggaaaaccagatcgggtccctcaactatcacacccggtgcagatgaggtccctcagcgttttagatggcggttttggcagacgtgacgcttagtggctagtttgtctctgtcttcatctgacgtgacgcttacgtggcaattcgaaccggaaaagtaataaaactcgtgggacccacggatcagtttcacacataaactaataaaaaatagtgagccccacatgtcatcctcactcccttcttccctctatcccctctctctcttcttccctacaatgtggactggggcggcgggcggacgagcgcaaccgcggccgaagcagcagcgcacgaagccgacggggcggtggcaatcctccgccgacgccgatatccacagcagaggtgcgcgtcctcctcctccttaaacccgtcaccatcggtggccgtcccccctgggcctccgcccgcggctcctctccttccgtcggccggcaagcaagatacacaaacaattagcagaaaggccgaccctatcggcatcggcaagcattccccgatccaagctagcttctaccaaacatcgactcagtggatctcaaggatgtgtccgaccagccagattttacttaggcctccatccaaacagtctctaaaaccaccttctacctatggcctgtttggcacagctccagctccacccctcctggagctagagctcagccaaacagttttagctccaccaaaactgagagtggagctaggtggagctctctcacaaaatgaactagagttgttgagctgggtttaggcagctccacaactttactccagacccaacttctagagctaaatttaggagttggagctaaattgagggcttgttaaatttgtttggtttaaataattaaaaatgtcaaatgtctggtcgtgtaattcggatcaggagcgaatccagaaaatgaatggtaggagggcttgtctcattcctcctctaagggcatctccaacagcttccccaaatcgaactctccaaacactcatatagccaactctccatctgatttagctagtcaaattagatactcactccaacagactctctattaatcctctccaaaataaaaatagaccctcagcctctaccatcttctttctctctctccccccaccttccttctctttccttctttttccccttttccttccttcccgtcgaccacgttgatgccgacggtggctgacacatgacgcgcggtggtgcagcaacgcggggaggcggaaggcggtgcggggaggcggcgctcgctgaggtgctctccctctccctttgcggcgacgaggcgacggcggcggagctcggagcgggatggcgatggcggcggcggagctcggggtggggatggcaaaggcggcggctctccacaacgacgacttggcgaggcgacgacgacggcgaggaagatgcagccacgacagcacatgggcagggatggcactggaggcacatggcggccacggcgacggagtcgagggagaggcgcgggaagccgcaaggggtggccctctgctcctcgccggccttgcctggtcctccgccgccttgtcgccgtggctccgctggttccgggaggcaggggcgagagagaggagggagggagtgaggtggagcgcggggactcggttccaggcgatggtggaagggggacggcaggggaggcagggcaaaagaggcgctcgcgcctccggtccatttcggcggagggcggcgatggaagcagccgaggcagcgttgaagagtttggggacagagagaatgcgagatgtgggaagaaaaatatggttgtgggtcccacaatcccacagttggagagccagttttggctggccaagtttagccacctagggagcccctttggccaaccaaatagcttcgagagtaggatagccagtatgttggagctcgttttttttttcaaaatttctaaattttagtttggggagtgaaatagctatgctgttagagatgctctaagcccctactctttttctccctcttcttcctcctcccatatctccctttctcttaatggtcattcagcggggtagggggcttgagctcctagcacctacgctggatccacctctattcagaccgttacaatctctacggcaatagttaaggggcataatttagactttttctatatttttatcctagttctaggttagaacttagaaccaagcaagccctaaccatgcacgttattattcacgggtaaatcgtaatcgtactctcagctaccaaaacagttaacgtgcagggcaatacaggttcaagaatcaagagagagaagactaggaaatatccgcacaaattttttaacgcgagcgatgcggagttaggccaagtaatccacgatctccacgaaacagattgagcataaatatgggttattatttgcgaccgcgttcgttgaaaccctacaacgatcttaattaggagtggtacgtaggagtagcgcgctaacctcttctcatcccatgcagcacgccgacgacgacatgccaacccaccggcggtgggccgacctccacgccggcctcgtctcgcgcgtcgccgacctctgcgcgctccggggctacgcctcctgccgcgccgtctgcgcctcgtggcgcgcggcgctcccgccgccgacctcgcggccgctcgcccccgtcgccgacacggcgagccgccacgggccactgtcgctggccgtctgctccgtccacgcgcagcgctggtcccgcctcctcggcctccgccagccgtcggggctagccaacgccaccggcgccagccgctgcgtcggcgcgcgcgacgggtgggtcgtcctcgccgccgccaacgcgaagggcgccgccgccgccgccgcgagcgtcgtcctgctgttcaacccggtcaccggagtggagatcccgctgcacgcgtcgctgtacgatcccaactgcgagcgcgcgccggcggcgtcgacgtcgccggcgccgaaggtcgtgttctcgccgtgccccacagcgcgtgacctcgccgcggtgagcatctgccggccgaacaggctcgccgtccagaggacaaccgacgggcactcctccgccctcgtcctggacaccgccgcgctcatggacagcgacgacctcgccgacgtcgccttcgacggcaacggcagggtggcgtactgcctgacgaggcacggcgccgtgcacgtgctccgcctcaaccgccgccgccaccgcggcaggctgcgacccatcgagatcgagccactcgtggccggcgccgtcttcccctcgccgtacgacaccatcgcccggttcacggacgccaagaacctggtgctctgcggcggcgcgctgtaccaggtgtggaggcggccgagcggcgcgggctccgccgtcgcgccggccgggatctgcgaccagcagctgctcctcatcccggagggcgccgtcttcgtcctgaggtacgagccgccggcgtcggcggcggcgggggggagccgccggccgccgtgctggtcggagtcgaaggatctcggcggccacgcggtgttcctcggggcgaacgacgccgcggcggcggcgcgctgcggcgacggcgcggcggagctgatgagaggcgactgcttgtactactgggccagccgcgcagagggggactacgaggccttcgtgtacagcatggcggacaggatgtccacgcggttgccgccggcgaccggtggcgtgtcgagcccgctttggtacttcttgccggccggcgcggcgaacgtgcaagcaacgacgacgaccgctatggaagctgcatcagaggaagtgagcgtcgcagttattacagtataatttcatggttcatatcacaccggtctctctatataggagtatgtgctagtactagctactatcttagcttagtagcttgttaggatgggtggtttgatcattaattagccaagagttctttgttttttttggtgcgaactatgctagtatatatactatttatattaagcttcatgttgtcattttgggttcgatttactgtatgcttgctcaaaagtatgcgtgagcacgggaagagtttatcccgtacgtcctcgagggaactttctcgtgtttttctatgtcgcccaaaaaatcgtcaaaaaaaattaaaatgatttagtaagatagattagtatagtgtgtatggcttcataaacattcaagtcatatttaacatatacaagtagacaaaaatatgacaaatttgaccctaaatataacacataattcatggttaaatttattattttgcttgatcaaccttatcattttttttcaaattcttttgatattcttttagatagcatgcataaaatagggagcgtcctctcgagggacaaaaatcaatctccacacgagcatattaattgtcatgttgttagtttcgaggtcgattaatatattcttttcttatataaaaaggcatactattagttcacatgggatacccttacaagcatcgcatagatggcgtgatgctgagcgtagtgctacaaccaaaggcatatcactttcgatggtaatactgaaagcaacttaggtgttccaaaaaagggaacgggaacatcgtcttctcgctattgttctttgtgttcctaaaagggaacataaagcaatgcctctctttacgggcttaaggtaatgaggagtgtgcgaaggtagacaccaaaggcagttaagagtgctaaagtgtttaggagtgttgttagtggcacacaattctcgatatatagaatcaattattctctatccacctttgaaactaataaaaattcactgaccattattggtgggaatatctttacaattttgatgactatgatttgaactttacttgtagatccagtgagttgggcttctctagttgaggcatggattagggcatgttggttgcagccctggtggttttgtctgacctgatatgcaagcctgaggtccgcctatagcttgtttggttgacctcctggtgcactcgctcagttgtctaacttgacaaccggtccatgttgattagcctggctcaggccaccaaattgcaacgcctcactcatgcaactaaggaggcaagggagataaaggtgatttggtagctatgggtccaattataattgctttcttactgatctcctcgagcatatgtcttgaaccaaacaatctcaggcaacaagtcagggatctatcttcaatttctcctgctagcttcaggcgttggttttcgttaggcatttctcttaggtcagcaaccaaacatgccattagttttgaacccgtgatacctctttttttttaaaaaaaaaaaaactctggttttggtcttcactagttgaagtcggtcatggcatcaacctaatcaatattttcttcttgaaggcatcacacatgagaattggtaggtaaaaaacttgattttaactctattgattggatcgggcagtgacgatgcaaattatatacttttaaaatgcatttcatgaaaccgagacttcaaatacctctttgttgcgatcttactttccgcttacacttggtgttgagattatagacatataatgatttaatctattccataaataaatcatgacattacagatgaaaactagcatgaacacatcattagatctatacatgtaaactacacagtataacatgaacagatcaaatatgcacaacatattgaacacgtaccgaggtgacggaaagaccggttgcttggtcgaaacttttcgccggtgtctacgaagacacgaaacacgcaagcgaagaggaaggcgagccgtcgcgaacaaacagggagcagtcgcgcgaagcgctttccaaataccttattgccgccttctcccggtgcaggacgtcgaaggcagaggttccggagacctgctctcccgatcgccggtgcacgccggcgagcgggatggagtagtctacgagcgacggcgcagtacagagtaggaggcaaaccctagattgatttcgcttatgttgcgtgaagacggcaggtcggtttatatagagaagggtcgcttgatcagggcgcccgcacgatctctactgcgcgtaaccgaaccggataagtcgcgcgtaactatccggactccacgccgtttgcacgcaccggatttttcggaacgtttccaaaacaaaaacgaatccgaatttgcagcaaaacaaaactgcaaaaggaggctgcatctgcgcaagggtgaggagccaatttttcggaccattcgacgcgtacgtcgtgcacgcgcgccgcctgccctgccaggcgaggcgagcgagcgcgcgcgtatgtttcccctcttctctccaccacacatgcttcaagtggctaggagggcatcctcccttttaaggaggtccccctctcctagaataagtaaggtggtactaaactccacatgcatgccatcccatgaggtgggcttttgtgattttccaaagaattaatctttgagtgggctaaggcccattcattaattccaacacttggtttcctattggttgcgatggctgatgacaaggctatatattttctttcttttcaagaccggccataactttcggtgttagtgtttatagttagtaatggtgtaacctgtaatgcatgtgtatttgtacttgatgaaccctttttttattttttttatgatgttggttagttttttttagataatagaatataatatcccggtctttacttaaaaagagttacagtcaattattataaagtagcactctagaaaagagtgtagttcaaataaaatagaacgcacaaaacacacaaaagagtgaatcaaaccaaaataagaagaacacatttattctagcctatttgtgaatcaccatctatagttggtaaaaggttgcataacagtcgtctccatcttgcgacatgcaacttttagaaactcccaatcattatcacacctttgtaactgtgcccacaaccggagccagtgtgttgccctgaaaattacctgcatataggtgatagatgttgatttgtcaaaaaccatatcatttctactcaaccatagagcccaacaaattgcagaagctccaacaagtatcagttttttcttttccttgtcaacacccaaaagccaccctaaaaaatataagatatacttgtaggaagattaaaaccaaaagaaaactgaactgctctccatatgaactttgcataatgacaataaaaaaagagatgttgagtagagatatacttgtaggaagattaaaaccaaaaaaaaaaccgaactgctcttcatatgaactttgcataatgacaatccaaaaagagatgctgaatagactcatttttcataaaaaaaacaacacctcaagctgccattccgattccgtctcaccaaattatctttagttaacacaactcctttaagtaactatcacacaaagattttaatcaatggtaaatattttgaatgggagggatcggagtagatgacgagtttataactcccttatatagaaaacaagtttctttgaggtcaatttctgtaacttgcaaaagtatttgatatgcgtacgtgtttcttgtttttatgtacataaccttgctctgacgagttagcttcagctcagtctgcttagataagcatatcgttgctacgacagctgcaattgcagccacaaacagctggaataatattttaagatgcgttgctaaaataacctcttatatatatgcttatcttgcttctaaccaagaaaataagttatgaagaacaaataccaagtcggtttgacttacattagccaaattgtaagaaagtttaacccaaatcaaacaagcaacttttctattagtattttgcaaataaatgtcactcttacatgacaggaaaaaaaaaactatcttataaccgacgttgtcaatatgactttgattttttttcaccttaattaaaagttactactcacttatagactaaatactcctgaagcatttcttattactccttaagggcctgttcacttttggcatgttcactttgataccatttttaagcttaccaaattttggtaaagttgctaaaaaagtggctacatttagtttgctgctaaattttgataactatataagaaatc

SEQ ID NO: 6176 - DNA, 23017 bp, Oryza sativa
atatgttaatgagtctagatatatatatatatatatatatatatgaatgtgggcaatgctagaaagtcttataatatgaaacggaggaagtatttgtgtttatactgtgatcgtctaaaaggtatatcctttcttcatgtaatcatgtttcagataaaaagcaggggaagatgtttatttctaccacatatcaagtaagggcagctgttgctacgtccataggtgtagctgctgcccgtgctaaaatgcttgcagaccaggaagaacgggaaatggagctcctaatggcgtccataatagaaactcaggttaaatctcttgacctattcttatttacatctgcgggtatagtttaagttcgtagttctaacactgtttattcatctgaaagttacatatctgacacatcatgtacattcctgcaaaccatttcagttcatgacttcactacctgaacactaccataattcaatctcctagctgtttttatgttctaaaaaacatgatattgtttagagagggatgatatcgcaaacatcgtgcttaaacggttggggaataaatatgcagcatgttcttctacatcaaatggcagagcggagggacataactctttttttagttctgttgtgcgagccatttcctttctatctgtgtgacatattgtaatgtggctaaagggaagaggtccgtctagttaagtctgttcacctagatatcatttttaacttcgttctggatcctgcaaaacctgatgaatcatgattcaagttatgggtttgatttctgctgctagctgaactcctaccatggtggcacagcacatgccccttcctttcacagggctcaaagaaatgaaattcttattgctacaaattcacaaccttattcttacactattactgctgtcttgatgattgtctgactgttttgtttcgaaacgaaataaactctgacagaccttatctatactttctgaatgtatttccttaatgaccgactgctgtctactttatgttgaccagctaaaaaagatccaatacaagatcaaacactttgaggagctagagttgatcatggatcaggaatacgctactctacagcaaatgaagtcttcccttgtcgatgaatggcaaaaggtcctcaagcgagcatttgagactggagtaccaatatcgagggatgaagtgcttataaagttgttccaaaacaagccaaatctgtagagaaattgaccaaagtcggttagatctccatgagggagcattggaggttgggatatctgtactgagggatgtgctgttcgagtaacatccctattccttagagaagttgactggagtcgattatccctcctctgatctgcctctccatagagcagtcatctagcagtttaacattgtggtgtcagagcgtggctgtaaatgtgctgattgagctttgggttgatctcaaaattttgcgtttgagatcacatcgatcctctgtagtttgtatcatcctatgcgattgcacgtgattgctccgttatactatccaactaggttagacaagtagtgttgctaatagcttcctgtacctgtctacatttcgttgatttcatttgttgggatgtgcaaatcttcctccagctgggagtttctgtatgttctatcacattgtctgattggttactttgataaattgatagccattgtatctagagtaaatttcatgtaacctaaggtgttgagtttgtcacacaaaatcatgtgttttaacatctgatatattactctcggttgtacccagactttaacaaaaccacactatgaaacaattattctttgacccacaataattatgagttctaaaatcgaatcttaattttttgacattattgatctattctataaaaagttttatccaagttaacctttttcttaaaaaaatctctacctatataaccataataagcggggtactgggttgtggttttagttttattttgaaagttcataacacccatacccaggttttataaaatttactccatgacagttctgcacctctaaactgtgaaagtttaataaaggagaattctttctttatctgcgcagcaaagccagcaattcggtgtttggagaattggagccatcctgaaccgtttagggtttgatcggacggctggtatggaatctcacagaagggcaccaccatttttccccaacgcggagcggcggaggcggcagccaaaaacccctccctcctcccctcctggactctcggtttcccctaacctcgcgcgccacctctcctctcctcgtcctccgcctccggacgcgcagttcacgggcgccctaatggcgaaaaagggcaaggcggcggcggcggaggccgcggcgcccgacgcgggggtatcgagcccgcagggcggcggcggggagaaggagggcagcttcctgctgggctcgccgacctgggaggacgccgggggcgggcggtggcggtgcaaggagacggggcacgagctgccggagcgggagaaggaggcgtacgggcggtcccgcgcgtgcaggctcgcgctcatcgaccaagccgtcgcgcgcaagaagccgccgctcaacgccttcaagcctcaccccgagcacaagtgcgtactagtaccggaatccgcccccatcttgtgccgcgctacccatctattattgcctttgctctcgcgttacgcaccaaggcgtatcccacgtatcgtgctcggaatttgtttatgcttaatcttggtttaattggttattttgctgtttaatacgagggttctaaattctagtgtccaacgtttgatcgtattttgtgaaataaagttggaaaaaaatctatgttctttttaggatgcagtcgagatgttgaatcgagtatgttatgttgtaggtcgaagcttatatgcaatattactggggacattataaacaagtcggaggaacacatctggaagcacatcaatgggaagaggttcctcaacaaactaggtaaataatcctgtagcgttatcttatatgcaatgccatgtgtgccaacggcctattgaactttgaactgagctctgcctttttatatatcgaactactaatttaagaacccatgaggttgactatttccatgcggctatcattttcttcatgctgtattcttctataggcatgtgatttatcatctactagtatgaattttcatcaacaatgattctgagagagaaaaatagtgattgacattggatgagtagttggtacattttctcagaacaattatgaacggatttcatcgttaatgcttattcaagtggatgatgtgccttgctttgcaatggttatttgaactttcttatatttgttttccattgttctggaaataatatcttccaaagcaatttgcatggaattcttttttcccacacagatagcctttccattgcattggaatgtttggttgctcctatatttaacatgtctattactcctatttaatagaaaaactagaagaaaagatggcatcaggtgaaatggccgaaggtgaagctgaacagtcaaatgaaggggaaaataaaaccaagtcaaggaagaagaaggacaagaagaaagctgctgttgttaacccttctttgccacgagaacctaaaccagagattgatgattcagataattctgatgatccagatttctgggtgcctcctgttggaagtcgttgggatgatgatgatggaaaagaccgatggacctcctctccagtgaaggataaggatgatgcagcagaggatgaaggtgaacttggcaagctttgcttttgttttatttaactgctttaacctaacaagccttaaagccatgatcataactcttagcacatgcgggagatattgttgctgctttgcttgagatagtattggtctaatactttgtatttatatatactgagttctttagaatatgagaaacagattcgtatgcagttgtatgaatgcatgcgaggttcgagagtggttacatttgatctgctcaatactttcagtggaaatcttccgcttctgaattttgtgattagcttattatagtcttttgctattatagatattgaaatttgaactatatgatctggtatgttccatgtctaatttggaatatgatagatggtgatgacgatggtgatgacatggctgacaaggatgacaaggagacaagagaaattgcttcaaggtactctcgaacatttctttcaatatttcaatagtgcatacaacatagttaagagatattttttaatatagcaggacaaagcgactgtcagtagaagcagttggcccaagtagcttcgcttcaaggaagaaaaaaaccaaaaaggagcagtaaaggttggtccacagcttatcatcgagttcaatgaagaacttatttgatctttctgtgtggacgaacaaagtccatctttgattcctcttggctggctagtcaggtgcgggttttgtattaattggtttgcttttagttagtgcttctctgtgtagccctatcgctgcacctttcagtggtatactattgcatgacaattctctatacttgcattagttaattcctgtgattttgatgtgagaatgaactgtgctacttgtcctatatttattcttgctatataacttcatatgtttcttttgtattacttgtgcatttgagtacgtttgatggtaacataaaatcgtttagactcctcgtaactattggctttgtttaaatttataaggcatgcctggttaaaataaaacgatatcgacaggatgggcacctgacattaagcctgctaatggattggatggaaatggattaattgggttggatttttatttggttagctttggattggagggaaatgggctcgtgcggtaaatggattggtgcgggttgggtgcacatactgttgggatacgcgtaggctacgatagcataaatcaaaattttctatcccgtaaatcaggaaccatgcaagtattagatcatagatcgttaccactcgacgtgctgcgcagcagaagaagacgctgagaagtcgaaggaactctcgcgaagtagcgcgcgtcgatgtagaggaagtagtcgatcgcaccggctcgaccttctcctcgtgcgttctcctcaccgtacttccacgccgatcagcaccgcaaaccagcggcgcctctaccggtatccacacgcatagggacggaacgccacgcgtagatgtgctagcatgcacgcgcggctagggttttgctcgggaagggaagtgacggctagggtttctcacgtgatgcaatgcctccgccggtcacacccctcacgaatatataggatccatcactcgggcctctaaggcccgtaggactcctattcggatccctatccgaattaagctcatattgggtctctatccaatccccttattccggcccattaagcttgcgaccctgtaggttcatatatactcggttgtaacctaaaaactcattttcggtccacgcgtcaacagcggcccctagcagaacgtattgacccaccgggtatacataaagatcatatcggctgaacctctagtgtatacttgtatgaacccctttgcctcacgatatcgattgagctcaaggctaaatatgtgacattctctaatagctcaatcattcactcgaacttgttgatagattatataacttgtgattgactcctcaatcacctttggcatggccatgcacttccataatctacaacatcgaggagcccagagatatctctccataagaggggcaaatcccatcttgattattcatatcccactacatgtttcatagcatacccgaaaactacttttataactacccaattacggagtagcgtttagcagtccctaagtaagctactacatatgttgagaaccatgataatctcaggtctaaggattcaacaccaacactcaatgagatcactgataacacaacacatatggctcttgcagtgtctcatgttgggtctatccaacaacatgttcaccaacatgtgtccacattattaatttggtatctctataccatgatccatgagacatgatcatcaattaatacatgtgctgttcatataaacatatttattctacatataatatttgatcagggatcctttagaaatagtaacaaacaacataaagagtcttatgaaagaatcacatattcattaaccaataaggagttatctatttcaaggaacaatgtcggataaatatgtaaacatagtatataatataatcatctctatgattgtctctagggtatatcactaacacataccaattggtttggagtggtttggttttggatgtaaaatattggggcaaaaatgggttgcgtccatgggttcaaatggattctaggcaatagcttcgatccaaatcagttcagaacacacgggcagtctccaccttcctctctcctgttcgtcctcatgcaaccatccatacctccatgctgcatcaagcacttgagtatctgcagcctgacgaggatgaaatcgtagccgacggcgagacggcgccgaatagcaggttgacgacgacgacgacgccgccgccaccgcccatcatcatgaggcgcgccgcctcggcaacggtggccgggtggcggcctgctcgcccgtacgtcgtcgtcactgtcaccgccgcgtgctctggcggctgtgccctgcgctgcacgcctactggccgacccgtccacgtgccgccgccgcagctgctggtacaccatctgctgctactgcatcgccgccgccgcagccgcggggtggtagccgtggcggcggcggcggtggtcttctcactctcgcctcgccatcttgctcctccagtttcacggcacaacggcgacgacgagatcgtggcggtggagggggatagcgccagcacgggggatgtggggctaggcgcgccgcgcgagttagcacggggcactgcagccatggtctccgccacctccacggcttgatacgaagtggcgaagcctgcaagtcttgcaccgcacacgacgcacacgatttgggttgagtccatggattggaaatgggttgagaccatttgacaataatggattgggttggtttggtcctacatcttgcgcgggttggattggtttggattttagatgtgatgaagtagactgaactggtttggtgaactgtgtataatggagatggggtgggttggatttggattggatttctgcccattagcaggctgtgacaagtcgattgactggacgaggaatagtaaccctgcacattgtgaagttcagatgatgttgcgagggtccattttcagcttataggtttatgttagcagaccagaccatgtcgcactgaattgccatttggcttacaaaaagtgggcaatgattaattatctattagtaatgtgttaaccaggatagaatctcattatggtgttggctttatatctttggtcgaaaaaaaaggggatataatctcatatttttctttttcataccatattgagttttgcaagggttttgtgcaccgaggattagtttagattaccagaaatcaaattaatgagaggataatttagaactccatagaattcatctgaaaatcatgcaaatttcatgtaaaacttgtgttccaaattgaccttgagccccgctcacacacgccctgccgtgcacgtcgtgatacctgtttttacctgtcaaaccattcactttcctgtcatttcggcctatatcggcctctatggtttccaaattccaagtctcctgccataaccaaatagcccccgattggccaatcatttagtgatcgtctatgttggttgacttgactcggtacaaggtaagctggaaacacatgaacagtagtgcaaggtaggagcacgaaacacccagcctcgcggttgcggtctccggcgagtctagtattcgggagtctagttttggggtgaattcaattgaggttgctacagtttaatttgtttattttatcaattgacgtgttcatgcaatccacaattgataaaacaaacaattgacatgtagggattgcatgaacacgccattgccggcttccgccatcaccagacaccagcttgcagcctggcactcgcacgcacacctttcttcttctacatggagagattacatacgagccgtaaccacgtctatggcttcatcatcatcctcctcctcctcgtacaagctacggccgcggccacctcgcggtgcccggcgcaacaggccgccgcgctgctccggctcaaacgatccttccaccaccaccaccagccgctcctcctgccgtcgtggcgcgccgccacggactgctgcctctgggagggcgtgtcgtgcgacgcggcctccggcgtcgtcgtcaccgcgctcgacctcggtggccacggggtacatagccccggcggcctggacggcgccgccctcttccagctcacgtcgctccggcggctcagcctcgcggggaacgacttcggcggcgcggggctcccggcgtccgggctcgaggggctcgccgagctcacccacctcaacctctccaacgccggcttcgccggccagatacccatcggcgtcggcagcctgagggagctcgtgtccctcgacctctcctccatgccactctccttcaagcaaccgagcttcagagctgtaatggccaacctgacgaagctgagggagctccggctggacggggtggacatgtcggcggcggcggcggcggcggccggagactggtgcgacgtgctcgcggaatccgcccccaagctccagctcctcaccttgcagtcctgcaagctctccggcgccatacgctcctccttctcgcgcctcgggtccctcgccgtcatcgacctgtcatacaaccagggcttctccgacgcgtccggcgagcccttcgccttgtcgggtgagatccccggcttcttcgccgagctcagctcactggcgattctcaacctctccaacaatggcttcaacggctcgtttcctcaaggagtgttccacctggagaggctcagggtgctagacgtgtcgtcgaacaccaacctctccggcagcttgccggagttcccggccgccggggaagcctccctggaggtgctggacctgagcgagaccaatttttccggccaaattccgggctccatcggaaacctgaagcgtctgaagatgctggacatcagtggcagcaacggccgcttctctggtgctcttcctgattcgatcagtgagcttacatccttgagcttcttggacctgagcagcagcgggttccaactcggggaattgcctgcttccatcggcaggatgcggtcactgtccacgcttcggctgagtgagtgtgccatctccggcgagataccgtcgtccgttgggaatctcacacgcttgagagagttggatctctcacagaacaatctcacaggtcagtttcaactttcttgtcgtacacaaagcacacaaaactgctatcttggaactcctttttagatagtttttgggttatgttatttgcagggccaataacctccatcaacaggaaaggggcattcctgaacctagagatattgcagctatgttgtaactccctgtcagggccagttccagccttcttattctcacttccacgattggagttcatatcgctcatgtcaaacaatctagcaggtcccctccaagaattcgacaatccttctccgtccctaacatctgtttacctgaattacaaccagttgaatggatcaatacccaggtctttctttcagctcatgggcttacagacactagatctctctaggaacggcttgagtggggaagtacaacttagttacatttggagactcacaaatctaagtaacctatgcctgtcagcaaacagactgacagtgatagctgatgatgaacacatctacaacagctcttcctctgcatcactccttcaacttaactccctggggttagcatgctgcaacatgaccaagatccctgccatactaaggtcagttgtggtgaatgaccttgatctctcgtgcaaccaacttgatgggcctatacccgattggatatgggcaaatcagaacgagaacatagatgtcttcaagttcaatctttcgcgcaatagatttactaacatggagctccctctggctaatgccagcgtatactatcttgatcttagtttcaactatcttcaagggcctctacctgtcccctcatctccacagttcttggattactccaacaacctattctcatcaatcccggagaacttgatgtcaaggttgagcagttctttctttctgaacttggccaacaattcactgcaggggggcatcccacctatcatttgcaatgcaagtgacctcaaattccttgacctgtcttacaaccatttcagtggtcgtgttccaccttgtctactagatggacatctgaccatattgaagctgagacaaaacaaatttgaggggaccttgcctgatgacaccaaaggaggatgtgtttctcagacaatagacctgaatggaaatcaattgggggggaagctacctagatcactcactaactgcaatgacctagaaatccttgatgtgggcaacaacaatttcgtggactccttcccaagctggacaggggagctaccaaagcttagggttcttgttctacgatccaacaaattcttcggcgcagtggggggaattcctgtcgacaacggtgatcgaaacagaacacaattctctagtttgcagatcatcgatcttgcctcaaacaacttctctggcagtttgcagccgcaatggttcgatagcctcaaagcaatgatggttacaagagagggtgacgtgcgaaaggccctggagaacaacctctcggggaaattctaccgtgacacagtcgtggtcacgtacaagggcgcggccacgacattcatcagggtcctgatcgccttcacgatgatcgacttctccgacaacgcgttcaccggcaacattcctgaatccattggaaggctcacctcgctaagaggtctcaacctgtcgcataatgccttcaccggaacaatcccttctcagctcagtggattggcgcagcttgaatcgctcgatctctctttgaaccagcttagtggggagatcccagaggtgttggtgtctttaacttctgtcggctggttgaacttgtcctacaatcgtttggagggtgctattccgcagggaggtcaatttcagacgtttggaagtagctcatttgaagggaatgccgccctatgcggcaaaccgctgtctattcggtgcaatggttcgaatgcagggcccccttcgttggagcacagtgagagctgggaggcccggacagagaccattgtactgtatatttccgttggatcagggttcggtttgggatttgcaatggccttcttgttccaagtgttccgcggaaagtgaaaaatgaagcttggtggtcaataataaatagagggaaacaacaatatgacatgccttaccttttagtatacacccatgataagtaatgtacatataagcctattctttctatatttttaaagaactgtcgagataaacttgctacacttccgttttaactgagttactctaaatagttagactaccatgaataaaagttctaattttatggttgatgcaatacaatttgataacatggcatccacatatttaagtatttctaatttttcaagaaagaccgagaggtcaaaacttgaggatgaatagctgcaatgtcagttttttttttaaaaaaaaagagataggagtacagtgttttattctctatcactaagttaaagttcatgaaaccttgtacaatttatttggcatgcatataaccccatcggtaacgacctatacttgtcggtaccaatctcagagatactcggtggcaccaagccttatgccgatcggtgcaagatcgatacccaaataacaagcttagcacctacaagatcaggggcatcccggccaaattagtcctcgtgcgaaatgttaaaatggggccctagtagccctagtgcccctgctcggtggtgtcctggtgaactgtgaagtttttttggcagccaattttctctggaagcttcaccttctctgtattgctatccttatttacatatacatgactagatgggccctctagcagatgggccagcacataaaacacacacatactgttgtatttacagcccaacactccccctcaagatgggtgatagatatctatcatacccatcttgtcacatgaactattacactctttaacacctaaaccctttgtgaaacaatcagcaacttgtccaccagacattacaaattctaattccaaaactccctcatccagtttttccttgataaagaaacgatccaactccacatgctttgttcgatcatgttgaactgggttgttagcaatgctgattgctgacttgttgtcacaccacaatttcattggagtatccaccggcaacatcaactcagaaagaagattccttagccataacaactcactcaaactcactgacattgcccgatattctgcctcagcggttgagcgagacaccaccggttgcttcttgctcctccaagatactagattgccaccaacaaacacacaatagcctgaagttgatcttctatcatcaggacaacttgcccaatctgcatcacaatagccttcaacctccaagtgtccatttttcttaaaccataggcctttacctgggcttcctttcaaatatctcaagatcctatagacagcatccatatgcccactccttggatcatgcatatatcgactcaccatactgacagcataagttatgtcaggtcgtgtatgacataaatatatcagtctcccaaccagcctttggtatctttccttattcactggatttccagactctgcacataacttatgattttgatcaactggtgtagaggctgggcgacatccaagcatacctgtgtcactgagcaagtccaatgcatatttccgctgtgaaagaactatccctctaggagatcttgcaatttcaatacccagaaaatatttcaactggcctaggtccttaacttcaaattctttgcttagattttgtttcagcctagttatctccgagcaatcatttccagtgataatcatatcatcaacataaacagcaagaatggttatatgatctccactatgatgatagaaaactgtgtgatctccattacattgtttatagcccatagcacacattgcacgcctaaatcgatcaaaccatgctcttggcgactgtttgagaccatataaggatttcttcagtctcaatactttacctttagtttgcaaagtagcaaatccaggtggaatttccatatatacctcctcttgaagatcgccatgtagaaaagcattcttgacatccaattgatgtaatggccaatcaaagttaactgcacaagatattatagttcttaccgtactcatttttgcaaccggtgcaaacgtttcatcataatcaattccatatgtctggctatatcccttagccacaagtcttgctttgtacctctccacttttccatccggattttgtttcactgcatatacccacttacagtttaccactttctttccattgggataggatacaagatcccatgttttgttcttctcaagagcttctagttcatctagcattgcttgatgccaccttgggtcttgctttgcctctttccaatccttaggaattatagctgaatttagagatgccacaaaggccttgtatgtcgatgacaaggaagtgtaagatacataattggctatatcattctcatcaccactttcatctccaatttcaaaaccatatctttgtggaggtttgcctgcattgcttctcatcccctttcttatggcaattggcaagtttgattcttcttctctaatttctatttgttctccccctgactccgaagacacttgcacatgagtaagatcatctgatacttgatcatcaacttcaacttgttgagttgttggaagtctcattctccttgtgtaaacttgaagattttcctcttcatgtggctttctccattcttgttcttgtacaggatcacctatagcacatggaatttcaccaaccacaatctttccctttgattgttcattctccttgagacccaagatttcaccttccttttgttgatcatggtcacctctagttaaatcatcaagatcaacaaataaagagcttatatctgttttctcaccatagaatggacagattccctaaacgtaacatccatacttacaaatgtccgccgttctgatggactccaacacttataccccttctggctggatgaatagcctataaagatgcatttaacagctcgaggatcaagtttcccaatagatggtctatgatctctaacaaaacaagtgcagccaaacaccctcggtggaaccacaaattcattcttcccaaatatcatctcatatggtgtcttcattccaagtattcttgatggtgtgcggttgatgagataagctgccgtcattactgcctcactccatagaaatttaggtacattcatagtatacattagtgaccgagctatctccaaaagatggcgattttttctttcagccactccattctgtggaggagtatcaggacaagaagtctgatgtaatattccttccaaagaaagaaagtgaccgaattcactattcatatactcccctccattatcagttctaataaattgaacccgagcattaaaatgatttttaatatatgcataaaagttttggaagcatttaagcacttcatccttatgtctcatgagatataaccatgtcatgcgggaatagcaatcaataaaggtgacaaaatatttcattccactcatagaaaccacaggcgacgtccacacatctgagtggattagcataaagggcaaaatactgcgaagtcctctactcacatatgatgttctagtatgcttcccatactcacatgcatcacatatcagcatatgtttatccactttactaaactctaccgggaacattttactcataatttcaaaagatatatgtcctagtcgacaatgcaaaagtaatacctcagtcacttctttacttgttgaagccattagtgcacacacatcctcatttgtccctcttctgtccaagtaccaaagtccatcacgcatgataccaatcccaagtttcttccctgttcttctctcctgaattaaacaattctcacgatcaaggaaaacccgacaatccatattatcaacaagagaacttattgaaattaaattcactggaaaagaagggacatataacactgatgacaaagtaatggatggagtacattgcactatgccctcccccttaacctgacatgatgtgccatcagcagtttgaatggtctctttgtgtgcaaatgaatatggtttatatgatgtaaattctccactcatgccagtgacatgcctggatgcacctgagtctaatatccaacttgaatgagaagtgttcatagacataaatgcttgattaaaactacctggagtagaatgagcaaagttggcaacattgtcaggtgtagtcccggaagaaccctcttctagagtaactgcattagccttgtaatcacctctatatccataacctcttcctctattgctcctaccagcatagcctcttccacctcttgttccacctctatcaacacctcttcctctcccataagtaggcttgcgtggagcatgacaatcacgcataaggtgtcccatttcaccacaattgaagcactctctagtctctttaccttgtacaattgcataggtgggacttggtgaacatggtgcggcactaggcaatactttcttcttaagctcctcctgtgccatagctgcaatggcctcatctaaggtaggaagagtggtttggtgaaacattgcatctcttcttccttcgaactctggatttagacccttcaagaactcaataacccttctacgctcaacccatttcttcatttttgctatgcaatcagagtgctctaatccaagaggatcataatgatctaaatcggaccacaaactcttcaactctgcgacatattctgccacagagcgctccccctgtctcaaagcacttatcttctcttgtgcctccaccattagcatcacattaccttctcctgagtatagtttagtaagagttttccacatctcactcgcactagagatagtctcaacagttgtagcaatagctgggattaatgaagtcaacaaccatgccaccactaaagagttggtagtgctccaagtcttccattctacacttgatgtgttctcaggctccttcacttctcctgtgacatatccttctaacccctttgtttttagtattagtaatgccctccttgaccaactcaaataatttttgacacccaacttgatttcgttttgcattaactcaatcttcagtattgattcagtatgagggataattgcattgcttgtagttgaggcctcactaaattttttcgctagcatgtccaccaatttacccatcacttgttctattccttgattttctgccataatgcaaattctgaaactgcaaaccagtagaaacccaactagcagatctgagccccctgttctacctttcccttcctatagattgctcaaatagtcaatatcacaaaagcagtagctgtgcttttacctcggtttccttgccaatcacacacccacaagagatgcaaagtcttcactgtgctgtgaccccgccactacagagcaagagccacttcttcctgaggagcaccaacaccagctgtttaccagcactttctttcttgcctcagcccaaagcagctctgcacctgcgagctcagccccaagcagcagcagcagctccgcacctgcagctgctcgggttcttcctctcgacgcgccgcgctagccccgctcttccgcgccgctgctgatgcgcactctctaccctgctcaagcctccacgcctacggccaggtagggtttagccgtcgcctgccgccggacggtcggctctgataccatgaagtttttttggcagccaattttctctggaagcttcaccttctctgtattgctatccttatttacatatacatgactagatgggccctctagcagatgggccagcacataaaacacacacatactgttgtatttacagcccaacaaactggcatgtgaagcagcgcggaggctggaggggactgaggagaggagacttcggagacgcggatggctgtacaatggaaattggaagatggatcgtttaccttctgcattattttgggccttagttttactactatttaggctgcaaattaacaaaattaaagcctctaatatctattatattattaaaggaatagaaaaaggagcctccacgttcgctctcatggcctagaaattctcacattaatcggagaaaaagaaaaaacagagtccatatagaaatacaatttagaaatagttgaaattcggaattaaaaataaggaatattagaagtagagtatagagtccatatagaaatacaattaggatataactgaaattcggaattaaaaataaggaatattaaaagtagagtatatagtacatatagaaatacaattaggaaataactaaaattcagaattaaaaaataaggaatattagaagaggagactagagtccatatagaaatacaattagaaaataactgaaattcagaattaaaaataaggaatattagaagtaaagtatggagtatatatagaaatacaattagaaaataactgaaattcgaaattaaagataaggaaaattagaagtagagtatagagtccatatagaaatacaattaggaaataatagaaatttggaattaaaaataaggaatattagaagtagagtgtagagtccatatagaaatacaattaagaaaaaaaaatagaaattcggaattaaaaataaggaatattagaagtagagtatagagtctatatagaaatgcaattatgaaataatagaaattcagaattaaaaataagaaatattcgaagtagagtatagaatccatatagaaatacaattaggaaataataggaatttaaaactaactaaaatttggaataaacgtaataaaattaaaagtagagtttagagtccgtataaaaatacaatttataaataactaaaattcgaaattaagaaaaacatgggaagaagagtttaaagtcaatatagaaatacaatttagaagtaactaaaatttgaaattaaaaattaaagaatattaaaagatgagtttagagtccttatagaaatacaaccagaaataataaaaattcagaaataaaaataaataatattggaagaagagcatagagtctatatagaaatacaatttacagaaaattcggaattaaatataattaataactgacacgtatataaaatacaatatgaatattacatatttgtattttcgtaaagctattgcaaaatttaaaattatgatgtaattttaatatttttgaataatataatgagaaaacatatatgctattatataaaagaaaatataatgatgctagccgcgcaatctgcacgggccaccatgctagttattatatattgggtatacttaataggggcccttaagatttggggccctgtttagtcgcacagtccgcactggtacaagacgccctgacaagatacaatgcctctaatcctcatcctctttcaccttcacattaccaattcatgcacttctctcaccaccaaagacgcacgtactcattttttttcctactcctccaaggaaaaaaacaaaaaaagaataaagatagtgattgaattgatgaatatgtggacggacgacaataccgccatgatggagacctttgcctctgcagacctttacgtggaggtagcttccatgccgccgcagcagcagcaggtggtgccaacagcgctcgcacccacggtgacgttcaaccaggacatgctattacaactcctccaattcatcatcaaggtcctattaagaatatacgtaaaacatttttttaaaattttctatgataattgtatacacgtaaaagacttatgtgtataggatacattcccgtgcaacccatggcaattatcaaccgaaccaattaaccattcgattattttgagggcgacccatgcattcgcgccccgtggccggcctgcgttgtctgatctcgatcgcgatggcccgtgacgcgaggcttccgtgacccggtttgtccaagtttactccgtacgtagtagtatatttgttgccgttgccaatggaacggtactcaggcgggggcggccggctagttccacacgctgccaccgctttgccgaacccgcgcgtcgatcgttcgtgcacgcgtctcgcatgcatcctccacaaactccggccgtattctgcacgttgatgttggcctctggcggtccaacaacagcgctgccccaagccatccagatacggccatacgggaaaaccaatggcgatcggcgaccgggacgaccatccgtttatctgtaccttgaaggtgacccgtgcgcacgacgctcgccgccgcttcctgtactgtctttacccaatcctgcaccggaaacaggagagagagagagagagagagagagagagagagctagtaggaaccggattaacttcacgacggcttccatatgctccccgttctagctggccctctctgtaatgtactaccagtagtactgtcatttctcaccaggacggctacacagctactgcgtttatctgagctggaagtaggaaattcgggaacccaccgagcttaaatttttacagtatcacttttgataactagatatatactccatagtaatgatactccgtaagttacatgcctgcatcgtcaatgagcatctctgttactcttgctcttggtggcgatgagcacgagagggttcttcttgcgcaccgccagcccgttctcctcctccacgtccacctcgcgccccggcagcgcgcgccagtcgaagcagaagagaaggttggccagcagcagctccgccgccgccgccgcgaagtgcacgccggggcagctcctccgcccgatcccgaacggcaccagcgcgaacccgtcgtgctcgtgctgctgctcgccgtcggcgtcgtgggcgcggtggcgctcgggcaagaaccgctccgcgttagggccccagacgccggggtccgtgtgtatcgccatcgcgttgatgacgacgcgcgtcctggccggtatctcgacgccgtgcgccgtgcggaacggctccgtcgtctcccgttgcaccagcggcgacgccgggtggagccggagtgtctccttgatgaccagccgcaggtagtggagctccgggaggtcggcttcccgcaccatggcgccgtccttgtcgccgccgccgccgccggcgatgacgcggcgcacctcgtgctgcgccttggcgagcacgtccgggttcctgacgagctccgtcatcgcccactgcaccgtcaccgccgacgtgtcgctcccggcaatgaacatatcctgcaagaccacacaattcggtttcgatcgatcaacatgtccaggaaaactgggaagcaccagcggcgtggtgttggagtcctgggtgcatgactccagttcatccactcaagttcaaatcctaatgctcacacgaattttacacagacgtagaggggaaattgttttaaacactcgggtagacgtccacccgtttcttgtatggcatttaaatggttatgaaaaattttcaaaagaaatgacatgataggttaatatgtaatatatcatctcataaatatgcaagttcaaatttggcgtctacaaattataataaaaataacaaatttaactgtgaatatacgtatactagttagagtttaatttgttgtttttgttacaactcgtagtagtcgaatttgaacttacatgtttgtgagatgatatattacatgttaacctatcttataattttttttcgaattttttcataattatttaggcggcatgcaagaaacgggtggacgtccacccgagagaatagggcagtcccaacccatagtgtctataagtagtgtctatgatgtcatgtcaataagacatcacaatagaaactatactctacaacccatggttttttaaagtgggacattaataaatacatcatctttcttctctactaatcatatttactcttcatctattatgaagacactattctctcccaatgcaaaacttgatagtgtctattgcatagattctcgtgttgaagctgtgtcttgcatgagacccagtttcttcctctcttcactctctctcttaattaatatagtgtcacataagcaacaagttttacatggtaatgtagttaatgctatagacaccataggtttcgataaaaatttaatgagatgtgaaatgtgtagctagtttccgtctacgagttaggagacatatccgcgcggtgtgaaagtggtgcgcgcgcgcatatcgcgtcttccctatgtccaggaaaacgtatatcacagcgtgctatgctcttgtccaggtacgtaatatgtacacgtaccgtgagaatgcctttgatgtgggtgcggctgccgaacatgctccggtgagccggatcgccgtggaggcggaggagcacgtcgaccaagtcgtcttcctcgtcggatgcatgcttgcgcttgttgatgtggtcgtcgatgacgcgctcgtagaatgcgtcgagctggcggaaccgccgctccagccgccacctcttgccgctgagggtgtccacccaccggagccacggcacgtagtcggcgacccagagaccaccaagaagagactgggtctcgtcgaggacagccttgacgtccatgctctcgtcgccgtcgccgtcgccgaaggcgacgcgccgcacgatcctgctgctggtggcagcgaccatgtcgctcaggttgacgggggaggcgccggcggccgccacggccgcgatgagcgcggcggcctcacgctccctggcgtcgcggagctcgcacacccgcggcgccccgaggagcgccgacatgcacgcgcggcgcgcggcgcgccagtacgcgccgtcgggcgcgaaggagatgttcttctggccgtaggagagcctggtggccgcgtacagcgccgggcgccccgacagcgcgcggtcgttgtcccggaacagcgcccgcgccgcgtcggcggtggagacgacgagcgtcggcacggagccgaggcggagcagcatgagcggcgccgcatgcctggcggcgagcgcggcgagggagcggtgcgggagcgcgccgacctggtggaggttgccgatgagagggaggcccttcgggcgtggcagcgacggtgaggcggcgcgcttcttggacgacggcgcgagaagctgcttgaagaggagaatggtggcgaggaggaggaggcatgacgcaaggaactcaggagcttggagagacgccatggacattgctgtcttggttgttctctagcttgtctctagggcggctgagtttatctatctatatatatgtcatgtcaggaggagatatcttagggcatcaacaatgtatccttaccaagtagtaagtaagtaaggttggaccaaccaaaagcagcaagcaggtaattgttattcaaggtgggtcccacatgtatataaatataaatataaagacgtagtgacgacgacgacgccgtcaccagcagcagtcgccgctgcccacggccgtgctggcccgcgtcccccttgaggaagggaccgacttctccgctgccgtcgcacgcaagggct

SEQ ID NO: 6177 - DNA, 3166 bp, Oryza sativa
gatcaaatagttagaggaggcagtgtggcaatcaaagtgaatgacgaaatcagaaatttctttcaaacaaaaaaaggactaaggcagggggacacgttatcaccaattctctttaatttggtggctggcatgttggcaattttgattaaaagggcaaatgaacaaggtagctttcatggggtagttccacacctaatagataatggtctatctatcctccaatatgcggatgatacgatcctttttatggaacatgatatagaagaggccaagaatctcaaacttgtactaagtacattcgagagattatcgggtctaaagatcaactttcataaaagggaattgttttgttatggtaaggctaaggaggtggagaaagattatatcttaatgtttgggtgtaattccggtaagtatccttttaggtacttaggaattccaatgcaccacaaaaaactgtcaaacaaagattggttctcaattgaggaaaggtttcaaaagaagctgaatagttggaaagggaagcatctctcggtaggtggtaggcttgtgttgataaattcagtgctcagcagcttggctatgtttatgctctccttttttgaggtacctaaaggtattcttgaaaagctagactattataggtctagattcttttggcaaagtgaagagcataaaaagaagtacaggttggccaaatggagcattttgtgcaaaccaaaggaatgcgggggtctcgggattcaaaatcttgaattacaaaataaatgtctgttaagcaaatggttatataagcttatgaatgaggaaggagtgtggcaaaatctcttgagaaacaaatacctatgaaagaaaactctgactcatgtcgaaaaaaaaccaggggattctcactttttgtccggtctaatgacagttaaaaataccttcctttcatgtggatctttaagggtctacaacgggactcaggttagattttgggaagaccgatggagtgggattagtccttttgctacacgttttcctgagttgtatagcatagtgaggaacaagaatgagtcagtagcaggtgttatgagtacaagacctttaaatgtttcctttcggagggctatagtgggaaagtatctaaaagattggttaaaggtagttgcagaggttattttagtaagtttaacaaatcagaacgatagcttcgtgtgggaggcacaaaaaatgggctcttttctgttaactcgatgtataaatctatcatgtacagctcatgtacagggacgtcattccaaaaaatgacatgatctggaaactcaaggtaccgctgaaaattaatttttttttgtggtacttaagaagtagagtaatcctaacaaaagacaatttggtcaagagaaaatggaaagggaagggtaaatgcctgttttgggaatcctaaggatccattccaccttcttgcttttgttggccctctgcacgatttatgtggaatgttgtcttcatttcttttggaattcatccgcctaggaatgttgctagcttattgggtaattggctaagggggggttcaacctaagctaaaaactcaagtctttgtaggggtcgcagcgttgtgctgggcggtatggttgtgcagaaatgatgtagtctttaatggctccaatactaatttcttgttgcaggtgatttttagggggactttttgggcaaaacaatggtcttcgctgcttaaggaggaagatggccaaagagtaaaagatggttggatgatattggagaagagagtttctagtttctttgcaatgagagggtggaacttaagaagaagattggaagtttaatgctctcttttctttgcaccatggtgttttgttgtcttaagtactattttggctaatctctgtcattgtctaagtgtccgtttatggtcactcgaatttacgttaaaccttttgtaagggtgtgagtctaagtgctcgtgtaagagacttttaggctgtgtacatcctttaggtgtagaggccggtttaatccactatctaaaaaaaatgaatcctcacgaaatgtaaaaacaggtgactacttacgacatcattgaaatcattgattggtgaccctgtttgattatttttcttttattgattattatggagctgtagaaaagaggttttgcagtactaacattgtataggatataataccagggccaaacatttgggtggtttgtattagtgctcttctttttctagccattcacttcattcagtttgacaatatgtatatcattttttgtccttaacattcgaatgataatgctttaatgcagccatcttttttacaaaatattctaagcataatttcaccaagattgccttaattaatgaaatgtgactgtcagacatagatgcatgtgcctttttcttgcgttatgaaatgtcagataaatttatttcaagttactacttgcaaagtcgtcaaatcttagttgagcaaaagtcagcagtacacaatctgcacatatacgtatcccactgtccctcaagtatacaggcaccacacgcacatacattatattaggccttcacacagtttgtctcttgaacgagagacgttgaattagtcaaactcttgttggcaactttttgtgacaagttgacaagcacgatcgcagcacctcaagccttgcagtgatcctagagtcgccaaccacctcgatctagcaaggagctaaatgtagatgggttttgataactaaaccggctagcggagccgatttctagataactacccgtctcgtgggcaaaacggaaggttttcgggacaaacctacaaagagatgtcgcactctcgcagcggcggcggacggtttacggcgcaaaccgacaaagatggacaaactaagagaaaactaaaagtaatatgaaaagaacaattcgattgattgatagtagattgatttttacaatgaaccggccttgtcccttatataggggttggtcttgccctctacaggcccttctccatgtccaacttgggatagaaaccaaaggaaacctgaaacatgccttcccgagcaaggaaacctcgaaacccgacgcaacagaatcggactcgagcctgccggtcagactggctgtggccggtctgaccggcctccaaccggcggtctgac

SEQ ID NO: 6178 - DNA, 33926 bp, Oryza sativa
acatgccagccaccaaattaaagagaattggtgataacgtgtccccctgccttagtcctttttttgtttgaaagaaatttctgatttcgtcattcactttgattgccacactgcctcctctaactatttgatcaatccaacgataccgtaaaggagagaagcctttcatcctcaaagtttgttgtaagaacctccaatccactttatcctaagctttttcaaagtcaagcttaataaccaccccattcttcttcttcccgtgcatctcgtgaattgtttcgtgcaaaataacaacaccttccattatgtttctcttgggtaaaaaggccgtctatgaaggtctaatgatcttttgagctactagagctactctatttgctagtaccttcatgaaaattttgaagcttacattcaataagcagataggccggtattgttgaatttgtttggcctccttatgtttgggtagaagagttatgataccaaaattcaggctgggtagtggcaattcttctttatgaaagttattgaacatggccattaggtcctttttaatgacttcccaaaacacctgaaagaactctgcaggaaatccatcaggacctggagccttgtgtgttacaattggaagatagcctgctttacttcctcctctgagaattcctttgttaggatgtcattttcttcatttgagacttgaggaatgtcctctattctagactccctcatagaaaaattattttcctctggggtccaaagaggtttttgtaatattttgtaatgtactttctcagctatacgtcacccttgaatacaccctcctcttgttccaactgaaaaattcgagccttccggtgctttccgttagctatcaaatgatagtattttgtatttctatcaccatccacaattctttttgttttcgcccgttggtaccattttatctcctcttcccttagcaaaagtgctaatctattttttagatagttcttgaggtttaactcttgttttgatagacattgcttctcagccttcttgccttctctttcttgtatgctccacttgtatttttcgcccatcccctcaaaaattgacgcacccgacgtatcctattttgccatctttccaactcagtccccccattaacttcctgtctccatacatccgctaccatgtcatagaagccatctcttcacaaccatccaagctcaaacctgaatattggttgtttaggagtattaacacccgtgtccaacaatagtggtgtatggtcggaacgttccgtactcaaagctcgattcgaagctagaggatacttatgttcccattcggtactcatcaaaattctatctagcttctcaaacgttggttttgacaaggagttagcccaagtgaatttacacctagaaagttccaactctcttaagtccaagctatcaatgaccgcgttaaagaggaaaggccacttctcattgaaattatcattgttcttttcagaaggatttctaataatgttgaaatctccaccaaacaaaacaggtagtgactccttactgcaagaattaaccaactcaacaaggaaagcttctttgtattcctcttgggccgccccatagattgccatgaggatccattgaaagccatcatccttatttttaatgtggaacttaatataaaactcaccttcatcaacgcttgaaatgtcaaagaccgcctcattaattcctaacaaaatacctcctgatcttcccctaggtcttgtccaatgccaaaagaaatcttggcctccacaaaaactcttaagactagcgttggagaaatcatttttacatgtctataaaagggcaataaagtctagcttttgctcttttgaggtatccgaaagaaatctgaatttagccaagtctcccagacctctgctatttcataaaattcccctcatgatgccctctttttgcgaatagcgactctaaccttcctctttcccctccttatctcagcatttttcctattagatttattggagaatttttgaacaccacaacttaggtggtctttctcctcatccatgacttcttctactaaatcaccacataagtgaccaagaacaaggttatctaactcttcttctccttctgaactaaatcccttattgttaacctcattacacaaacaattcgacaagggtaaactcttagaaattctatcttcttctacttctctaaggctcaaaatagaatctgaaattttactgcatgaacccccaagatctaaccctatgttgagcaagtctgaaacgatagaagcatttgaaaaagaaagaaacgaattactcgcattattacgtgattcaaggtttttccacgcctttcttttcccagccttctccacggcgtgtgcctcatccatgccggccaatctggagctagcccacgtcggagtagtcacaacctcgctaacatttgcagccatcaagatttgctcctcctcctttgctttctctcctctttcaattgcagcagaaaggttgttctcttccatacccactccctgtccaacgacttcttcttccatcacctcatcataaaccttattaagcacattttccattgccgcctcaacaacctcctctgctgccatctcagctctgtccttctctaaagtgcagttgccgagatcatcatttgctgccactcccgttcctttccctgcaacatccccttccttcccatcctcttgcatatcatccccttagctctcttggtttccctcgaaatttctttatcaacaccgtgttcctcctccttctcagcctcctcatctcgatccccatcctcctcctgttctatctccacctcgtcaccattctcgtcaacccccaatttctccacttcaaatttcaactcaaaataatgatctccaatcactacgtccagatttttcggaataatccttggatttaaaacagcaataaacacccttccaaactcacttttccttgttgttttcatatcaactgtttgggtggcccctaataaggatcccacagcccaaagaggaagaaactctctcatcttctttcgtagccaaacaccctaacccacactttcggtaaaagaaagccttcctctttctccgaccactcctcaaaaagtaaacggatgccatttgatattccactttctttcacatcagccctaccaaaagcaatggctctcttcaaatcagctctcgatggaaagggaactaagtaagagctgatatcatgctcaaccagttcccacttccactttgccggaaaaagcttacacaactgcgccgccatctgttcctttgtaagctgcccccctgtgcaagcaaccaaagccatctttgattctttcttccccttaagtaacggaggatgagggatatgatagaaacctaggccctccaaagcgtacccgacagcatgtgccactggtcttggttgcttaagcacgtggtcatgtgaatcacaaatatcacaatatatttctattgaacatccttagccaatgtgacctttttgataacatcttgaacaaaacttggccttggactgagttttgtgacgcctgcctccctcattataaacttcttcctcctcgaggtcaccatccatagacattttctcctcttccagcccgagaacaattccttcgagctccttcttctctacttgatcagccaacacctccctatctcctatctttacttgcttgctgcctccaatcgaactcgcccccattgcctcctttgctttccggatggttgttgctttctctttggaaatcccctgctgccaccttccctcattaccttcttgcatcggtcggtttgcaggacgctgctgccacggtctttggatgccccaggctggtccctctctacccggccgccctgcatagccgccccattgcgacccgaagcttcgcggtcctctcggtctaaagccgctccgctgccactccctcctatggcctccttgctgaccgtagccatacccgggctgaaaacccatctggccgacctcaaggcttccgctaaagaaagcctcatcttcatcgcgaaacacctcctccctgctagtaccccctccaccttgcctgctgcgatcattcctccacgccatgcctccctcctcttctcctactcctttgtgtgcggataacccctcgccgccggccaggaagccaacagtcgcactgctctcgctttcccttctcttttctgtaaaaagcgaacacagctgcacggtgtggcattcccttgcctgttcgacttgtaccggcgtcggttcccctcctgtggcccttttaccacggcccaagtttgcaagcagccggcccaaaccactagtaaacttgaatttaaaccttctctctttaatccccacccagacaaaaacctcttccttttcttttcctctcacaccgattgacaacaaatcgaccacgtgatctgtctcctcggttctcgtcaccccctgtcccctcgcatttgaaccttgaacagtgaaggacgtgcacctttctgtgcgacacttcttgaatcggccatagtaccccgggaagataaattagaattcatatgaatttgaaaattctatgcagggttgcaaagctatctttctgaattattagatcaggcactgaagaatgaatagacaaaaaggaaatgaaatcaaacaagatggctgcagtctattcaatatatagttgcaactgtactttacaggtcacttccttgccatgaaggaacaatctgtaaatacaaactattaatgtgtcagtaattcaatttgtagtaatccgttgtgagcatataaaagagagaaatttaatcttgaataaagctaaaacagtaagggtaccaggaatcctaaaatctaaaaataaaagaggaaacatcttgagcagaaatcgagtaatcattaagatacatagccatagggcctcttgattccgcagctgtctgtaggaggctaggagcaaacacacaagaaaataaaaagaaagggaaaacagtggtgctaccttggagatggaggttgggagagattggcctagaggaagccagacctgtgttgtcagtgagcgggagaagacttaatcagcatcttcagtccatgggaacggtaagtgctgctagcttaatggatcaccaaaaaaacagctttattaaccatcagaaaggtttaaaacaaaatctttttactccatctaccaaaagcagaagatggtggaaacaacaaaatctttttacaccatctagctttgatggctaaatctcgcacttgagtgcaacaagtgatttgttgtaataaccaggagaatacatactatattggttaataaaatccaaaatggagtctgtttggcaatggaaaacaagcagagatgtttacaacacttccattttctcataatattttttaaaggaaattttctgataatttagaaacatataaggattgatgacattttctgataatctagaaacattttctgataatcccaaattgggcaatctaaaagatcaacacagacagtatatagagaagaagaattgcagatcatcaaccatatcctgtatttgtatttgtatttgtagttctagatacaacatactgaaacactggataagtacaaacttcttcctttcttagcctgaagggaatcaaagcaaaaaaaaaaaaaatccagaacctgaatccctaaccatcataagacaaatcaattattccataccccagaatcataggtgatgtagcagaggcagacatcgacaggaccaagatcataggtgatgtatcagaggcagccatcgacgggaccaatgggagagcctctccaggcgtcgacgccgtgtgggacggctgatcgcgaaggagacaggcaagaagcgatggcggaggtggccaaggcgcttctatgaccggcagcgtggaggcatccatccatccgttcggggggcgaccgggcaaaaggtggggagacgtgcatcaaggtgcgccgatgggagggagtggtgtgtgggaaggggagggggttccaggaggggatctgcggtggaggtggagcgacgacgagggatcgacagtgggcggcggaggatggacgcctggggttgtggtggcgtcgcaggacggaggtcgtggcacttggcgtggcgatgccggtgtggcatgcgttggtcgtgatggaggcgcaagagggcgaggggattggggatggaggcgaggagggattggccgacgtctgatcccgatggtgaggagacgcgacgatgacggtggcggcgacggcaatgcaagacagcaagagggaaagggaggagaggagatagggtgacgagagggatgtgggttgtgggggtgcggtgctgcactgctgcgtgatgcggagcaacgcgggctgacggaggagcgttggatgtgtcggaggatcctgaaaaagacgtgagccgttggattgcgcaggactctccaccaccactactgattttctaagtagtagagatagagattggtccacctagtcagatttccgtctatatatatcttttatttttgtccctaataaaaaaaactgatctgatttttctccttcaatttgccttcaaaactatcggaagaggttgtgattctccgctccaaaacccatctacaaaaccatctcattgactatttccctgtacacaacgattctgcccaaaatctctcgagtctctacagcacctccaccttggatggcggccgccagcggcagcactattccctacagccctggccgcacgtcgccggtactgtggtgcccaggccccagaaccccagatctagtccggccgtgcggcgggcgtgcatccttgatcgggtggttcactggttctggggccgttccccgggttgcctccccggcatgtgcttgccgcactgcagcagcagccgcatcaccatgatgtattcacttgctgaatttgaaggcaatcaacagcaggttagcataacagttacttcctccgtttcacaatgtaagtcattctagtattttctatattcatattgatgttaatgaatctagataacatttatattgatgttaatgaatctagatagatatatatgtttagattcattaacatcaatatgaatgtcgaaaatgctagaatgacttacattgtgaaacggagggagcatgtaagatcgcacaagatcaaacaaacctatcagagtgaatggagcatgtaggatcgcacaagatgaaacaaacctatcagagtgaatggtagggaaaacaaaaaacccaaaaatcttttgcggaattaaagattaacctcgaacggagtcgatgacaaagctctatcgccgttggtcgaaccgccttcctaccgtcggtcagtccgccgaagcctcaccggtcagaccgcccaaagaccagcggtcaaaccgccactatcccaccggttagaccacgcgcatacctgcagttagaccgtcgggacacagagacaccagtaggtgacaaactcaaatatgtagattataactttcgacattattgcatcaactagtgtttacaaagtgcaccaacagcactcctcaccaaaatctcgaactaaactcgaaaccctaactttgtctcaattcaagtctctctaaaaccgataccgggaggcctcaccctccctctctatttatacatgaggtaggttgtgcaaagcccacgaatctaacacgatttagaactcctaactcacgtaagaaaccctctcttgcaagtatcgaactcatctctttccttatttcaatcaatcttaccgaattcggactcccttccaaattcaactcctctttccatacatacacaatccctcttgtataccatatgaatttcttcatcatgacgtgtgttgtcctctagcctttagtatcccacatgatctcttgatccctggacatcaacttctcccaagttgactccgatctatcaccggcaatactctcccgaagcctcaagcaatacctgcacatgcaacaaccaagaaaccatattccgagcacaagttcgtcccaacttgactcacattagtataataacagtatcaatacttatagaaaccatctagaagccaaatccccgaaggaaacatccaaattcaacaaaacaacccgaaatcgaacacgattaggatcatgcctgtcagaccgtcaggtcggccagtctgaccgccgcaacacttgcggtccgaccagtggcactcagccggtctgaccgccagggtcaaccgaaaactaccacttcacaaaaacaaccgtcttaaaaaaactccaaaataacattagcaaaccaccaatattttcatcacaaaatctaaatcaactctaggattttacaatctccccttgatgaaaatcattggaaaacaacaactggtttgtggtgttttgtgaagcaaatccaaaaagcatctcaatgccaaaaagtttcaaagaaaaatctctcacttttgaaaaaaaaagaaattccttctacttatgacaattatgcacaatttgttaccttgttctcccccttttgacaatgagttaatgaacatttctttttttcgaaaagctttgctataacaaaagtatttcaagaacatgtgttgcaataacaaggtagatagcatgacaatctagttaacaagcatgcatagaagtgtaaacatgaatctaagatattgtcaataagatcaaatcaacactaaagattcatgacttcaaatgatttataatgcaatatattcacaagcacataggttgaaaaataaacactatacatatatacctattgcatttatcactctttcccaaattagcttcagcacaaaacaatcaagagaaatttttaacttttatttgagcctttttgctcattttttctctgaattatgtcgggtacgtccttgtcattaagactgtttccaaggattcgacacccattatttttgttcgcatcaaatacatccttgttgtcaagactgatttcaagaattcggaattctttttttctcttatagatattttttattctcttgcacaatgagcaatttaaagctatttaaggaatagcaattcaataaagcatacacataagcattaacaaatcaaaccatatgctagcatcaatattgcatatttcgttaattcaagtgaaagattatgtatcatgtatcatatcacttaaaaacaatatcaaaagctcatataaaaactaacatgcatacaagctagtctagtcatcatattatctaacatgtactgatagcatgctcaagtatataccaaaagtacaaacaaagctcttcttctttttcaattttgtattttttttatattttccatttttatcacaccatgcatgaattaaaacatgaatgcaaaaagaaaaataaaaagaagaaaagaaaacatgaatgcaacagagagccaaaactcccccttaattgatgccaaaaggacgaacaatccccaactcgcctcgaaaaaaagcaaatcaagaagaatccaacgatttcgtgaaaatatccgccaattgcaattgagtatcaacaaaagccaattaaacatctcccttctcaacatcatccctcaaaaagtgatagcgaatgtcaatgtgttcagtgtgtgagtgttgtacagggttcttagcaatattaatagcactagtattatcacaaaagaaaggaactttctcaaaagtaagaccataatctctcaaagttgaaataagccaaagaatctaagaacaacaactagcagcaataacatattcagactcagcagttgattgaacaacattagattgtttcctagaagaccaagcaatcaaagaagtaccaagagaataacatgttccacttgtacttttcctataaattctacacccactacaatccgcatccgaataaccactcaagcatatagaagatgatgtagaataccatattccaaatacctcatgatgcgtttaacaacttgacgatgtgaagcacgtggagaagcttgaaaacgagcacataaatacatagcaaattgaatgtccagtctcaaaacagtgagatagagcaaagatccaatcatgttcctacactcctttgatccacaacttcaccatcttcatcgagatccaacacaacagttgatcccattggtgtagagattggcttgcaatccacactacaagagatctaatgatagatgacactccatttatgtcacaaacattgaatttttcatcacgtttcgtaatctatgacgctcacgtgacgaaaattcatttgtcacctatcatgcgtctctaatggtgttctatgacgaaaccctattttttcgttattaatctagtgacgatccttctgccgtcctaacattgtgacgctcatattcattattatctagctaaaaaacgtcataaaatatcatgtggcctgttaaggcccatgtagtgagcaacctatctttgggctaggccttgttaaggcccatgtactgagaaacctatttatgggctaggcctatttgaagtccaattagattttaataaattcagcccaattatactatatccatctatattgaattaaatattgagtgggctctacatattcaaaagacctaatatgcccaagcattacaatgaaattgcatctgggtcatgcatacttgagaagcccatatatcaaacagatttagccagttaaaatccaatacaaaacccaattaacatccacacatctgacatctgcagtactatgaattaacacgtggccaacccagccacttgtccaaatacaaccacaatcgctgaccaaattaaaatacattataggctcattatctaaacaagttcaattatatgacagcttcactgaccaaaaattatttcacatgtgcagttacatcaggtcctgaatagcaaaataaacaggtttggcacattactatcctaatcgagtcacaactcaatcaccgtccaaaacaaagtcatatgtccaaataatcattcaaattaactgacctgaacaagtcacatgtcaaagtcgcaccaactaaaacactacaaccatctcatcatgaatcagcatattactaagactggccaaaagaagaattattaaggccaatcaactgacgaagaagggtattggtctcctcaaatttccaatctcttccaactgttgctttcttgttgcttttgattcatctatcttttccttcaaggaatccaacttatcctgccacaaccatacaaaatattacttatattgccttttgctctctgtcatgaacacactagtatatgagaggtaacacatgtagcatatttctatcacacgtagcaaggcaacatgaagccaacaaaacgcaagcatgtaatatcttttattttgccaaccatacacaacatgtagctgaaagcattcatctcttatgaaaaaaaaaatccaagataccatagatcaagaataaagttacaccacagaattactaaaattacatcaatgcattctatagtaagtttcttttatagttggattttaattatcagaactagtacttgggagcaaagaaagcaatatggaagaaaaacatatagcacctaagatttagctataggtgttcaacttctccatttaaaattcagattataacttaatagaagcaacatatatgtacatacaaatgaagtgaagtaaaattaatcatgccacaagtaacaattcctataaactaagacctaattcatgtcatgcagatgtagttactctcataaaacaacccatgaacatatagtactacaacaaacaattaaaaattaagacagttgcactattagggaagaagacttgatctaatgacaatatgtgcatactaaatgaagtgaagtgaagtgaaggatatatgagatgtagtgcgtggggctagagagtttacatctagtatttgcaatagaggggttccagcagtgcattgggttgctttgtacttttgccagttgcagctgagactcttctcgcgcgcaagaagctaaactagctggcaaagaggacatcttcttggatgagtcatcatgcaagccaaatctctgtccaacaataaaaacatgaatgaatgttattgggcaagataccaaaacactacacatgtcatctctaactagtaaagctgtaattaggtgcacaggactcttcaatttgtggtgcgccatcgatggttccctgaataatgtgcaagtaatttctgaggaataggcatcatgtaatgaaatcgtgtaactgcatatataagggtgggtgtcaattgcaaacagttttacatgacagacaaaaatgcagttcaattacctgatttatcagtgcaagcgtgcagtaaggtggtgggaagtagagtgagaaatttgtactactagtaatgaaaacaaatctgaaattgcaggaacttactcctattaattggaccttgcactatctataagtttatgcagtgacattctgcggcataacattttttttgcaactgctaccagattagataagggcgacctgcgagaactgcacgattactggggagggaggacggcgatggaggcaatgtcataggccttgttcattcaaacaacatacaaataaggcgccgtgctccttttccacatccatcggccatcccaattgtaaaatcaaaggtgttttctttattattattctgtgatgaacaattgacaatggagattattggttttcatatttggaatttattcacgaagtggttttggagatgattggatttcacaggtgatcgcaggatttgtcattttatgtgaccggtcatacctggctctggtagccggttagaccggcgtgtatcgcgcggtcagaccggccgacattgtgtcggtttcggttttgggttgtttgtttggatatccgtgattatttcatgattatggcttctaaatggatactatacgtatgtaatactgttgtttactactaatgagtcaagttggagatagcttggtctcggaatatggttttctttgttcatttcatgtgtaggtgactcgatgcctcgggagagtatttgcggtgatggaccgagagtcggcttggggataagacgacgtccgtggtggacagagattatgcgggatacttaggctagagttgatgcacgtggttgatggagattccatatggcatatgatggaggtattgtgtgcgtatgggatgcggagtcgaatttggaaggagtccaaatttggtacgattgttatgtaaagtttctttcttgtactagagggtttcctaaggtgtttaggactcttagtatgagtttggttcgtggctttaggctgcctacctcgggtataaatagagggggagcgtgaggcttcccggtatcgcttttgagagtaattgagttgagtttagagttacggtttcgagtttagtcgaaattttgaaggagtgctgttgttgcactttgtaaacacagagagaatcaataaagtcgtcatccactttaagagttcttcgatttgtgtttcaccgggtttcggcggtctaaccagcaactcaccggcggtcagaccggcggcaagcggcggtcagactggcgacatacgggcggtccgaccggcagcggcaacaggcacggcaggcatctcagcggttcgaccgatcgatctacatcggtcagaccgacgttcatcaggcggtcagaccggcgcatatacttcggtcagaccgcgatccgtcgatttcgagggtaacttttatttccgctaaaagttttcggtttttggtataccaaccattcacccccctggttggcttatttattgtgtttcgatcctacaatgatttgggatgcaagttctagaacatggatataaattaatatgtattgaactacatgatatatatgcaatttatcaaaccaaaatcagtctgatagcatcaatttgggataactagctagcttcaccaataacttgactgaggttagtgaggttatatctttaccatccctaaatctctactaattactacaatatagccatgcatatattaactgaagttgcaactgcaaatcttacctcatagtccaatttttaagacttattcgaatcaagctataacaacctgtttgtgccactgccatatttcgccttaattagagttagtttattttgggcaggccaaattatttagtgtcgccttcatttcctggatatttgtgtttagccatttaatctgacagatgtaccatgcagtctcaacagctaactactatacttgctcactgatgatcatgaaagcttagacatcaatgaacatatcacgatactgtgatggtgtatggaaatatcacggtataccattaaccaagatggcatgaaattatccttcgttttttaataattaaccaagaaacaggaatatcccgggaagcactgttaacatgcttgtatatctaataacaaggcaactttaattttcttgttttctttctgaaagtaaccttcaacaatgaaccgtaccccacacaagtttgttttaattaattatcgtttataattaactaacagaatgagttgattcactgatacatatttcagacacatctcatagttcaaaatgtaggatcgaaacacaagaactaagccaaccagagaggggcgaatagttggtatatccaaaaacccaaactttttgtggaattaaaagttaccctcaaattcgatgtagatcggtctgaccgaggttgatccgccggtctgatcgcgcctataccgttggtctgaccaaagttgttagcccggtccaaccgcctgaagatcgcttctgcctcctgtcgccgtcgctggtctgactgcaggtaagccgttggtctgaccaccgcaaagccgccggtatgtcgccggttagacctccgaacccgggcaaacacaaatcgaagaactttcaaagtagatgacaactttattgcttctctccgcatttacaaagtgcaacaacaacactccttacaaaaatctcgactaaactcgaacacctaactaaaatatcaactcaatgctctcaaaagtgataccgggaagcctcacgctccctctcaatttatacatgaggtaggaagcctaaagccacgaaccaaactcatactagaagtcctaatccacataggaaaccttcttgtgcaagaaacaaactttacaaattaactccaatcataccaaatttggcctccttccaaattcgactccgcatcccatacgcacacaatacctctatcgtatgccatatgaaatctttaccaaccacgtgcattgaactctagcctaagtatcccgcatgatatcagaccatcacggacatcgtcttatccccaagccgactcccaatccatcaccagcaatactctcccaagccatcaagacatctacacatgaaacaaacaaagaaaccatattccgagaccaagcactctctaacttgacttattagtagcaaacaacagtattatatacgtatagtatccatccagaagccataattatgaaacaatcacggaattccaaacaaacaacccgaaaccgaaaccgacacagagtcgcccggtcagaccgtgggctggccggtctgaccggcagcacatgcccggtcagaccggacccaacaaaacaacagcacctgtagatcacttgtaaaatccaatcatctccaaaaccaattcgaaaataaattccaaatatcaaaaccaataatctccaatgccaattattattatagaataacaatcaaaaacactttgattttacacaaaatatatttttgggtaaaagaacataagttttcactgatacatttaagacaaatctcataaacaaaatcccgtatttattttattttgtgttctagtaaaacatttaatatgttcttcaaagatttgagattgcgagcaataaatagaagtttgcccaagcctccatccttcttggtattagtagtttcttttgttaaaaaaattggtaatttgctttagctgtgtgtgaaagaaagcctagaacaggagcaaagtcttgtacaagaaaggactacagagaactactaacaaagaaacagaagctaccatggttttccagcaccagttcagagcttagaaacattccgaacaaaaagataagcggcgtacttcattccataaccttttttctttttttgcccaaactaaaactgcacatgaaccgccgcaccctgaccgacatagacatggttgatgtgctctgcaattccgagcaccattccgtgatccatggccttctgactttgcagagagagattttctggcttaccgggcaaacaaggaagagaatcgtacgtctttgttcccgaatgcatcctaaccctaacgcacaatggtgatcgggttgatttgtgcctgaagttagatgattatcattgcacttagaaactgaattagctgaatatgagacgaactggtggcaaggcgttgtgcgtgtggatggataaatggacgcagtggccttttatacgcttcagcactccatcatctaatatgctaaatagcattgtttgcttttctgagacaatatcagttgtggtagggtacgtactcggtatatgctagcagagtcagaacaacatgttgcaattaagtcactgctgcagagaggggttaactccaagcttccgataagtatattttctttggataaatgtgtggtatcttttcaaagggataaggatggcaaaattggtcaaaataacggagaaattgtgaaatggaaggaagtagtatgtttaaggtgaagccaattctgttgttgtaaggtgaatccaaaaatatcggtggtatagagctaaacatccagtattttctacggtattaattgaaccgtattttttgaataccaatgaactaacatgacttgcaagcaaaaaccattaacttttgaggttttcttccatatttgaagaggtatatacctactcacaatttcagatttaaacaattaaactggttaaattgattagataaaaaattaatgtctaattagtcgttgcgaggtatagagaggtatatataactctccatgtcaatccaggggtatatactgtaaaatcaaaggtgtttttggttattattctgtgatgaacaattgggcattggagattattggttctgttatttggatttatttacgaagtggttttggagatgactggatttcacaggtgaatcacaggttcattatttcatgtgaccggtcagaccgggcaggtgctgccggtcagactggcggtgatcaaacggtcggaccggccagcccacggtctgaccggccgacactatgtcggtttcagtttcgggttgtttatttggatatccgagtttatttcatgattataacttctagatggatactatacatatgtaatactattgtttgctgctaatgagtcaagttggagatagcttggtctcggaatatggtttctttgtttgttccatgtgtaggtgactcgatgtctcgggagagtatttgcggtgatagaccgggagtcggcttggggataagacgacgtccgtggtggtcagagatcatgcgggatacttaggctagagttgatgcacgtggttgatggaaattccatatggcattcgatggagttattgtgtgcgtatgggatgcggagtcgaatttggaaggaatccaaatttggtacgattggttatgtaaagtttctttcttgtactagtgggtttcctaagatgtttaggactcctagtatgagtttggttcgtggctttaggctgcctatctcatgtataaatagagggggagcgtgaggcttcccggtatcgctttagagagcaattgagttgagttttgagttagggtttcgagtttagtcgaaatttttataaggaatgttgttggtgcactttgtaaacacagagagaatcaataaagttgtgatctactttgatagttcttcgatttgtgtttcaccgggtttcggcggtctaaccggcggcgcaccggcggtcagaccagcagcatcgcggcggttcgactggcaggcacacggcggtcagaccggcggcgacaggagtcggcggcagacgttcttggcggttcgaccaatcgatctacatcggtcagaccgacgttaatcaggcggtgagaccggcgcaactactttggtcagaccgcaatccatcgatttcgatggtaacttttatttccgctaaaagttttaggtttttgggtataccaaccattcaccccctctggttggcttagttcttgtgtttcgatcctacatatacctctagaatgtaggtacatacgttataattggcacaaatatgtatacctctagaaaatataagaaaatttcacaagtatttataaagataactttccaattatattctaacttgtacgattaattttgattccccattttatggagggtaaaaggagatgtacatatatatcatgtatggagagctatatacctctcaaagtttgagagaaaatcacttaacctttttaccttttcaacacttattttactactcgatatcatatcagtcccctacactccagccatttcattcagactactgcaatacgtccacgtatcaaccgatccaatatataaaggccattcccaacccaagaaactagacatagtttccataaactctacatcatcaagaaactagtactagacactactctttcaatgcaaacactactattccatacttaaatttaatgctacttatctcacatgatgtcttcgatgttgtgtagaaactatgtttcatgcaagacatggtttccttctctttcttcatttatacatttgccacattattttttatcctaggtggcaacttatttaatgctatggacaccatcttagttattaggttgggaatggcctaagccagaaagcaacacatccatcggaccttccgaattctgtttttcactttttttttcgaaagctacaaaactctacaatgtgtggtgagctcaatctgtgtcacaagtgcgagccacagaaaaagaaatgtacttttcagataaaagatcatcacaatatcctgcagctttaacttataacaaagcttgcaagaaaaacatgataattcattgaatttgtcacaagtgatcggtcgaatttgtcttgacgtccttcctcttgcttcaaatacgttgcaatatcaagtcatcacgaacaaaattaatcttaattagctaaccaaagctcatcaagtcaactagtgatcacattagcattagacaagcttgtcttctcggcaatcatgctgttcgatcgaactcgccgccgtgatggtggctaaggcgacgtcggcgagtagtgccgcgtggggaaggccgtgttctggtcggcgccgtccctactgttgacgtaaatcgaatataatttcagtagttgatttaaatggcttaaaacttctaaaacttcgtaactaatttatatgaactctaaatttagccaatctggaggactgcgaccgcaaggaaaaagcatatggaagctagattaattgaagaagcaaggtgagtcacacgttccctgcttgaatatgtttaacctactttatgaaatggttgccatttagaaataatatatatatatatatatattgctaattacgtgggatacgggattactaaatccacttgcttaacgccaatttacttggtatccactccttatcaatccttgggtataataattttatcagcttgggttaattatgttgaccaagctatgcttagccatacttagttcatctaatgggataatcactttactcataatttgtatattgacgagcttaattcaagctcgagatattgtaccattatttgttggtcctaatttgtccaactaaaatatgtcttaatgatagactatggatgcatggttttaatttttcgcacccatgataatgatggacctttttgcgggaatctctgaaagacttaccgtacttaccacaaaccaataggtgtaattgctaaccttttagtatagctctcccctttcataggtatacaagcgagtgtggccgtgaaggagtttggttgaacaggatggtctaagcagcttccagattaaccgtggcataatgaaggggttgtccatcctgattttagggatggtggcgaaacatgcagtgtggggtgtcaatggttagggaagggttatgaggaggtggttggttgggcttgttcaatgtgttgtaccgttgttaagtggagactaatcttttcttaattaatcaaatattttactatttttaactacaaatatttacaattgtctttatccaaaagagtagatcatgatacaaaagactactatctttgtttccccttgcacaattacatcattggtgttgcttgctgagtacagtggttggtacttagccttgcctaattttctattctcaaatttttagtgcctctgtgatgaagacggagttaaaatatcaagcgttgtaccctagttgagtactcctgtggactgaagctaaacacccactaggatagtccttttccgccgttgcattcttttcggtatgaggactaattgtcacttttgtaaatatttatgctttatttatgtttggatatgtacaataacatgtcatttgatgtaccttgtgttgattcctaaacaaggatttaatacacaaattggtctgaaaaaaggaaaaatttctgggtgtgaatcaccacacggcacaacagctcccactcaaaaaatgacacggcaacatagagcctacaccgcttctccaaccacatgaaaccatgctgccatagcataagtaggtggttattgttgctgagcttgccacctagttaggcagttgtgactctgcccatgcgaatgctccgcaactcggtggaaacatccagcactgccacctacatgcacggatcctcttctgctgcaagcaccaagaaagtattttcaatgccgaaggtcgcccatgctatgccgagaagacaccaaattggccaaactaccaagaacatgtgaatcccattgtttttttgtctagtgctctagtcttctagcaaagaccttatcaaaggtgtttgaagagtcaagggggataaagagaagtttgctcctatggcaacaaacggatcaatcagctatacataccgcctccatctctttcaataggaagtaccgcagggcttcaagaatcatgaccgacctcttacattggctacatactctgacactgatggtttgtgtttcgtgcaacggctctggctatatcctcatctccacctccttgtgatgttgcaagcgaagtttatcttgattaatgcgcaaacactggacgaacatctatgttcgtttccgatgcatcctaaccctaacacgtaatggtgaggtagttgtccatcaacataacttagattagcctatcgtgcagaagctgaatcagatgagcatgagacgaagaggcaaggtcttttgggggactattatacaattgtggtaggatatatatataattcgtatgctagcagagcaggggtattacgatgcaattcagttcctaagagaagggtgaaataggacaaaacaatggagaaattgaaggcagtggtatgttcttgaaccatggagaaattcaactgtaataaagtgaggagtgaagccaaaaatgttgggtggtataaactaaacttcctgtattttgatggtattaattgaacgattcttttttcctttcaatgaactaactaacctgacttgaagcaacaaccactttgtaccttttcggaactttttttttctaacacgatatcaaatgagtctctacgatcataaatgtgaaagtatcaaattatcctatgtgtaaaccagaagcaaaaacatccatcggcttttccaaattctgtttcttcaaagctcacaaaactccacaatatccagtgagctcgatctgtgtcaccagtgcgagccagagaaaaagaaatgtaacttttagataaaagatcatcacaatccacctttaatctatcagaatgcttgcaagaaaaccaaggtaatcaataaaaatggtacaagtgatcgatcgagagtttgtcttcacgtcctttctcatacttcaaatacgttgcactcccaatcccaagtgatcaagaacaaaattaaattttctaaattacaagcaaatcaaagctcatcgaagtatagctatggcattggcatcagacaagttcgtcctctccgccatcgtgctcgccgtcctcaccgtcgcggcagcggcggcgggctacggcggctacggcgacgtcggcgagtactgccgcgtggggaaggcggtgtcccggaacccggtcccatcgtgccggaactacatcgcgcggtggtgcgccgtcgccgggggccgcctggactccggcaagcagccgccgcggcagctcctggagccgtgctgccgggagctcgccgcagtgccgatgcagtgccggtgcgacgcgttgagcgtgctggtgcgtggcgtggtcacggaggagggcgaccgcgtcgccgggatgatctcgcagcacgcggcgcccgggtgcgacgccgcgacgatcgccgggatggcgagcgcgctgacggactacggccggtgcaacctgcagcacactggtttctttggctgccccatgtttgggggtggcatggattaacttccttagtaattaattaattaggcctttgcttaattaattatttaattagttatccgggttactggataattaattatcgatatttgctagtagcatctatcatgtttggatgctgctttctccgtgaatgtgatgataataataatcagaagaaataaataagaagagttggattcatcagctttccagtatcatcctcacaagcctcatggtcaagactatggaacctatacctgtcctgatggtgaagagagtgccactctgatgcatgcggtgcatatgcttagtgctatggatgcagtaagtgtggagcgagccaaagcagctcatgacagggaaaactggaatcgaggcaagatttgcaagttggagagcaaggtgtaccgtctacagaaggaattagctgaacttaaaggagaaacgccgccgccaacacccaagcttcgcctcactgcaagaaagagaacctgtccgccacctcgtctccagttagcttcgaagattcgcgtgatgggtgaagctgtgcccgatcgtgctgaacctgtcatcgacatcataagtgatgaggaagaggaggaagaccctgaagaaagagagccagctactccagaggaagaagatccatcgcttcgttccgacgcaaggcgggattagtcgcttagttagatcgttgccgtagttcactgtgattagattgtttgtttaagtttgcttgtgagtgtgtgggttttacttgttgcttacatcattggtgggatgtaacagcatgagtctagttcttttgcttgtcagagtgtaagatagttggtgagacagtgttaatgcaacttaaatgtaatcatacacagttaagagcaatatagaatttaaattaattaaataactccgttctaagggtgtctctctgtcgttctttcctgttgtctctgcttatcgtcagatggtgaacacgcgcactggaagtggaagtggaagtggaagtggagctactaacaatggaggagatcccacgctagctcagattctggcccaacaaacacagctgatcaatctgttagtgcagcaggcacagaatcagcaggcaaacaatcagaaccagaatccacccccacctccccaaaacaagctggcagatttcttacgtgtgagaccccctaccttttcaagcactaccaatccagtagaagcaggagattggctgcatgcggtggagaagaagttggacttgatccagtgtactgagcaggagaaagtttcttttgcttcgcatcaactgcatggacctgctgctgaatggtgggatcattttcgccaaggcagggctgaaggagagcctattacgtggcaagaattcacggccgctttcaaaaagacacatataccaacgggtgttgtagcttctaaagaagagagaatttagagcactcaaccaaggatctcgttcggtcaccgagtacctccatgatttcaaccgtttagctcgttatgctccggaagatgttcgcaccgatgaagagcgtcaggagaagttcttggagggactgaatgatgagttgtcttatgccttgatgtctacggatttccgggatttccagcagttggtggacaaggcgattcgtcaggaagacaagtataaccggatggagcagaagaagcgcagggctgcccaattcaaggcacaacagggcagtaaccagaggccgcgtctcgttacgggacctcaagctccatcgtaccctcaaggaggatcttcatcagttgtccgcccccaacgccagttctacaacaacaatactggtaatcgtggtaatgacaaccgcaacatggttgctcgtcctgcagcaactccagctcagaaccagcccgtcaggaaggaacagggaagcaagccaggggtgtgcttcaattgtggtgatccaggacattatgctgataagtgtcctaagcctcggcgcgtgaagaacgctccagccccgaataactccaatgctccagcaccaaaggcacgtgttaatcatgttgcagcagcagaagctcagaatgcaccagatgtggttttgggtacgtttcctgttaactctatacccgcatctgtgctttttgattccggtgctacgcattcttttttgtctaaaagttttgcgagcaatcatgggatggaagttattagtcttgggagacctttactagttaataccccaggcaatcaagtattttcgacacagtattgtccttccgctactatagaaatagaagaagttcctttcccatcctcgcttatcttgctagaatccaaagatctagatgttatcttagggatggactggttatctcgtcacagaggagttatagattgtgccaaccgtaaggtgactttaaccaatagcaatggggaaacagtttctttctttgtgtcctctcctaaatctcatggtgtgatcttaaaccaagttgctctacaagagatccccatagtacaagactacccagacgtgtttcccgaggatttgccaggtatgccacctaagagagacatagagtttcggatagacttggtacctggaaccaaccctatccataagagaccgtacagaatggcagctaatgagttagctgaggtgaagagacaggtggatgatttgcttcagaaaggatacatcagacccagtacttcgccatggggagcaccagtcatctttgtggagaagaaagatcatacttagagaatgtgcgtggattatcgagcgttgaatgaggttactatcaagaataagtatcctctacccagaattgatgacctgtttgatcaactggaaggtgctacagttttctccaagatagatctccgttctggatattattaacttcgaatccgtgaggaagatataccaaagaccgccttcacaactcggtatggtttgttcgaatgtaccgttatgtcatttggactcactaatgccccagcctttttcatgaatctgatgaacaaggtgtttatggaatatctggataagtttgtcgtggtgtttattgatgacattcttatttactccaagacaaaggaagaacatgaagagcatcttcgtctagctttagagaaactacgtgagcatcagctttatgccaagttcagtaaatgtgaattttggttgtccgaagtgaagtttcttggtcatgtcatctcgtctggtggagtgcagtagatccaagcaatgtggagtcagtgttaagttggaagcaacccaagacggtttccgaaattcgtagtttccttggacttgcagggtattaccgcaggtttattgagaacttttcaaagatcgccagaccaatgactcgtctgcttcagaaggaagtgaagtacaagtggacagaggattgtgaacaaagtttccaagaattgaagaaaaggctagtgactgcgcctgtattaattttgcctgattcgaggaaaggtttccaagtgtattgtgatgcatcccgactcggtttgggttgtgtgttgatgcaagaaggaaaggtggttgcctatgcatctaggcaattacgtcctcatgagaataactacccaacgcatgacctagaattggcagctgtggtgcatgcattgaagatttggctttcgaagaaggagattatgtataccttcgggttacgccgttacgaggtgttcatcgtttccagaccaaagggaaattggcaccgcgttttgtgggaccttttaagattgtgagtcgaaaaggtgaagtagcttatcagttagagttgcctctgtcaatggcgggaatacatgacgtattccacgtgtctcagttgaagaaatgtttacgtgtacctacggaggaagcagatcctgatcgtatagagcttcaagaagatttaacttatgttgagaagccagtcagaattttggaagtaagtgagaggaataccaggaatcacgttatacggttctgcaaggttcagtggagcaatcattcagaagaggaagccacttgggagcgagaagatgaatcgaagtcaactcatcctcatctgttcgccagttcttctgaatctcgaggacgagattccgtttaaggggggtaggtttgtcacgccctaaaaatcgcctaatgtaaaaatacattgtttaaatcatttttagaaattattttaaaagcctacaaactaaaccctaattatctaggaaaattttcaacataaaaatgagctagataaaattttattaaatactatacttgctcctctattttctagatttttctggaaattatttgagcaagggaagtatttttaataattgaaacaacatttcacaaattattttaattttaaaagttccaaaacccctccctaaagccgttgggccgtttttggcccaacatctttcctctctcccgcgggcaagccggcccaagccggcccagcgctgcccgagtcggctcaagccgagccgcccacccctccctcacgtgggacaccgacatgtggggcccacatgtcgggcccttctcctacctccggccggccgccgcttgccaagcccgaccgagccgccttccgcctccaaatccgctccaatccgaccccgattcttccgggtttttgaggggtttttatccccactttctcctctatctttacccccaagattcggagcaaatcgttgagtattctctccgaatcgagttcgtttcgaatttatccccaaaaaccgagtttagattttcccgagtcgatttcttgcgggaggagtccgatctcttcaatccaaggctataaataggaccacctcgtcgccctctttcgttttccccatctcccgagctctctcgtgctccgtagtgtcgccgccgcgcgtgtctagctcgccgccgccgccggtcatcttcggcgccgccgcgccgccgcttgcgtcgtcgccgccgcttgccgccgccgccgttaggtgcgccgtggtgaggggaacctcggccgcccgtcccctttcgccgccggccgccgtagctcgccgccgccggtcaaccgagccgccgccgtcgcccttctcgttgccggccgtcgtcgttcgtcgtttgtcgttgtggtgagtaccgttgggttcgtctcgtcgtcctctacgtgtacatgccctccaaatccgcggccgaccaccctagctccggcgaggtcgccaaccctagccggcctccgtaggtgacgtcatgctgacgtcatcagttttcctttttcccgattttctaatagattaaaacttcggaaaatcataactaaataaccgtagatccgtttcaggtggttcaagttgctaaatttttctaaaatcaagatctacatgttaaaaatatccacatgtactgtttatgcttgtttttgtactgttttgttgattttgtttaattgctttagtttctgacgttccggaggagagcgtttccgttgaggaaggttccgaagcgtttgcggaagcccaaggcaagtcacacagatcccaaacaaccctttgagcatgttgaacccgtttaaagctattattttatttcaactatgcattgttttcgaatgtcatcgggtggtgaacctttcccaattaaataatggccgaagatgactttattttcctatgggtcataatttgattagcatgaaccttatatattggattggttcagctaaatgttatatgtaggtttgcttagccatgcttagaaacattagctaattaaaggggattaaatataaattatattatattattcttattattatggttatatttaatggtcgctcacgatggttaatcgtgtgatgttaattaattgataattaaagcctggttaaggtgggttgtgagcatatggttttgatggttgtgctcatgacaattaaggaccggttcgcgagctactgttgtgaaacatttatcgtgccaatcacaagccagcgtgggcaacggctttatcttttgtatagcgtgattcattatagtgcgccagactgagaagtggcgagaagtccacgggggtcgctggggagtccatgccttgtttataagggggtgattatgatccaggaaaggtgcgctgtaatgggttatgttgtgcaaggggtattgtcacaactcctttccgaggtaccgtggtggtattgaggcacatggtgacatgatgtggggttgtgtcttgtgggtacagtggtacacctctgatcagagtttaaactattcgaatagccgtacccgcggttatgggtgagttgagcaatgtttttcgtgattagtctcacactactcatcaatgttaataatgtgataattaatttggctcctggtttggaatggataattcctggtttggaggtttaatttgttcaactggggttggttgttcaaatgtggttgggcctatgcaacatgggtgtgttgtatggtgttatttaatattgattaattattcaactgtttttactattctcttaaatatttattaaatgctgtttctgcaaatgagctatattatgccatcctttgttatcctgtgcacttgcatatttgctgtgtgacttgttgagtatgtcatatgctcattcttgtaatattcattcatcagaagacgagtatctcagtgaaggtgatgatctggaggattaggcttgttcttggttaagatgcctgtggagtggagtcgccatagctgttccgtagtttgttatagttttatctttccgctgcgtaaaatgttattctttgagaggaactatctacctctgtaatcttttattatttgcgaatattaaatagttatttatttgtactctattatcaatttgtcattgtgtgcctcggttgattcctggacgagagtttaacacacatgtaagcgtttggaattttggatagaaattccgggcgtgacagctgctacggttctgcttccccgcttctgatcgcttgcgagcatgagagattgaaacaaggagggcctccggaaccacagcttcgcctgaaatctgcaccgagtaggcgggtgatcaggtttttgaggagtgcttccgcatgactgctcctcgtcttctgttcgtcgtcgtcgtctgctacaccatgtctggtgcctccgcagctgccgcgcctagagatggaggcgcactaggagccggagccgctgcgaacgaaaacatcaacggaggcagttctgcctcacaatccagcggagggacattcacagggtataacctttgcttactgttaattcaatttttgatacctctgttagtcgcaattctattgcgttcattgtatgatcatgatgcttattatattttaagcatgctcctagttatgttagattttatcactagatcaccccacattgttcatgccatggttattgtcttaatattttggattaaaatatgccgatatatgaccatatttccaacaaaaatgtagtttaaaatttacggaacttgatcgcttaaatatcaggcaaactctaattaattttctggttgcttcaatcataagaagatggtccaaaaataattagacatacaagcattactataaaatttactttcatagtcccgagtaataattcttttacgtaggttaataaaaggtgcaccctgctgtgacgagcccagggtggcctcagccctgaaggtacatttattctccacatgtaaaaaatatttttcacagatgattccttaagaaaaccgctagtgacatagtctgaactatccatggataagtcggttccaatggccattatttttgtattattgtatagtagtgaaggctgcatacttaatcggtacttaattatccattacaaaacacagaagttgcaaccatgaatcttaaggttgatccataacatagtaatttgtacctatcaatttctagtttcaataaattacaattttactccaacctgttcactaaagaatatcgattggagacttttccaagagatcaatatataagaatataactttgagcacttaatttcaaaaacatcaaaaaggagttattaataatgtgaaagcttttattcaaaccagctatgctatgttgaattgatatgccgaaaacctatattctaaagaataattgtagctaaagatttaacttatcactacttaaaaaaacacgtagagatcaaaattataggtgccggaaaagctaaaaccaacacctcctatagtgcttttctctccccatgagctgaaaacatataaaaccggcacccttaagcgactataggtgctggttctaaagaaaaaaaatgcacctatactacatatatgtgcttttttttctaaaacaagataactttaatatattataagtgtcggttagttaaaaaccgacatgatcttttaaaaaatcgtcacctataccaaaccgagccgagcacgggccttatccacttcgcgcgcatctgcggccctatctcttctctccctctctctccctctttctctctctctctcgcctctctttgtccctctctctctcgcttctctgtcgcggcggcagtccggtggaggcagcggtggcggcggccacgacctcccctccaccaaatctggccacaggggaggcggcgagatgggaggcagcgatggcgcctgcgtcctcccctccgccagatccggtggtgttttcccaatcggggctcattagttgggaactttgacgtattctcataggtgccggtttaggagccgacaccttgaggttccagaacctaaagataaaaaagcggctcaatgtattaactcgattcgagccgatccattgagcagatccagttcatccccacaggaatcaaagaacacatacaaggtcaaagaacacgtgaacacgtgaacttcagggacataaaaaacattaacatctagaacatcaaaaacacgatggcagctggcgtccttctccacccctgccgccgtcgctgcatagagaggaggggtggtcatggggatatgtaatttgatcctatatatgtgagttcaatcagatttccatcacttccgaatgtgtgtatgtttggtttctagtgcctcctaatcctatgtacgctcactgaaacagtctgccctcccactatggttgctgttccatttacttgcactctgatagtctgatgtaagttagctcatatgggaattgtccatgtttgggatggttcggtctggctagccctttattatcagtcaaagatcaactcctatagtatgtactaatcctccacttatctatgctttgtataaagttaaagcctattaaatctaaaactcaacatgcaaccgtgccacatcatcacccactagcaataattacataatctcatgcaagcatagaacatgatgtacaatttatttaatgatacaaatcaaaatgcaagcatatctaataatcacccgtcatatcatttcactaccacagaatagggattcggtgccggttgggaaactcctttcgatgccggttttcccaaccgggaccacgaaggcggcacaaatcacaggagattaaaggtgccggttttaaaaccggcacctttgaggcgcacacgagccaaaaaaaatcggcttgagtcgatgcaagccgtcaagccgatcccaaatattgcatcaaaaccatgaacacatgaactaaattgcctcaaatccataaacacatttagatcacattgaacaaatcacgaagaggaaataatacaaaacacaaagagggagggacaagaagggaggggaagagatcgatccgcggcctccagccgcctccctcctgccactcgctgcctttgcatcccccctcccttcccttctgccgccccctcccttccgccgccgcatgacgcctcctccgctgggccccctagctagggttaccaaaaaagctcggagctcgcaaactgctcgacctcgattcacattgggctcaattcgagctcgtctcgaactctaaatgagtcgagcccgagcttgtatccaggcttgcaagcctcaccgagcgagctcgaatagctcgacgagctcagccactcacatttgctctaaaaatcctcgatgttctctgacattggctggttctggccaagctgtcatgccctctaccttgtttgcatcagacgttttcgagtagctcgaatagctcgaatagctgggacttttccacttgctagctctcaataacttcaggcagcaagcatacagaccaaagcacacataccaacaaagggtgtgtttagttcatgctaaaattggaagtttggttgaaattggaacgatgtgacggaaaagttggaagtttatgtgtgtagaaaagttttgatgtgatggaaaagttgaaagtttgaagaaaaagtttggaactaaactcggccaaaggctgcatgcatggcatagagtgcatcgccatcaatggagtgcactcatttcccgtaacagctgcatatgtaaactgtaatgtatggttgctagcatgtactatagcatattctagtagtactactgcttcaaatattggctttctaacagcgtgggacaaggattgacttcccactatataacacactcgaagctcggcaaaagctcgaagctcgaacgagccgagctcaagcctgtcttgaggctcgaagtctgacgaggctcggcttgagctcggtttgactatttatcaagctcatgccaagactggtaagctcgctcgagctcggctcgttgacagccctagggccacccctccgcgggatctggcagaggaagcaaagggcaggggaggtcgcggccgcctccgcctccgctggccagacgcccgccgcctccccttccactggatctggcggaggggagggcgcagccaccggccatgggagagaagggagggaaggagaggggatgcgagtcgagtaaaagattgacgatgggagtgagaagaacaggagacgcgagttgaaccttatcttcttctcgtgctggtggggcccaccggctcatcgatttgccagctcggctcaattagtaggtaatggttttttataaaaaaccggcacc

SEQ ID NO: 6179 - DNA, 39831 bp, Oryza sativa
ttgggagcaaagaaagcaatatggaagaaaaacatatagcacctaagatttagctataggtgttcaacttctccatttaaaattcagattataacttaatagaagcaacatatatgtacatacaaatgaagtgaagtaaaattaatcatgccacaagtaacaattcctataaactaagacctaattcatgtcatgcagatgtagttactctcataaaacaacccatgaacatatagtactacaacaaacaattaaaaattaagacagttgcactattagggaagaagacttgatctaatgacaatatgtgcatactaaatgaagtgaagtgaagtgaaggatatatgagatgtagtgcgtggggctagagagtttacatctagtatttgcaatagaggggttccagcagtgcattgggttgctttgtacttttgccagttgcagctgagactcttctcgcgcgcaagaagctaaactagctggcaaagaggacatcttcttggatgagtcatcatgcaagccaaatctctgtccaacaataaaaacatgaatgaatgttattgggcaagataccaaaacactacacatgtcatctctaactagtaaagctgtaattaggtgcacaggactcttcaatttgtggtgcgccatcgatggttccctgaataatgtgcaagtaatttctgaggaataggcatcatgtaatgaaatcgtgtaactgcatatataagggtgggtgtcaattgcaaacagttttacatgacagacaaaaatgcagttcaattacctgatttatcagtgcaagcgtgcagtaaggtggtgggaagtagagtgagaaatttgtactactagtaatgaaaacaaatctgaaattgcaggaacttactcctattaattggaccttgcactatctataagtttatgcagtgacattctgcggcataacattttttttgcaactgctaccagattagataagggcgacctgcgagaactgcacgattactggggagggaggacggcgatggaggcaatgtcataggccttgttcattcaaacaacatacaaataaggcgccgtgctccttttccacatccatcggccatcccaattgtaaaatcaaaggtgttttctttattattattctgtgatgaacaattgacaatggagattattggttttcatatttggaatttattcacgaagtggttttggagatgattggatttcacaggtgatcgcaggatttgtcattttatgtgaccggtcatacctggctctggtagccggttagaccggcgtgtatcgcgcggtcagaccggccgacattgtgtcggtttcggttttgggttgtttgtttggatatccgtgattatttcatgattatggcttctaaatggatactatacgtatgtaatactgttgtttactactaatgagtcaagttggagatagcttggtctcggaatatggttttctttgttcatttcatgtgtaggtgactcgatgcctcgggagagtatttgcggtgatggaccgagagtcggcttggggataagacgacgtccgtggtggacagagattatgcgggatacttaggctagagttgatgcacgtggttgatggagattccatatggcatatgatggaggtattgtgtgcgtatgggatgcggagtcgaatttggaaggagtccaaatttggtacgattggttatgtaaagtttctttcttgtactagagggtttcctaaggtgtttaggactcttagtatgagtttggttcgtggctttaggctgcctacctcgggtataaatagagggggagcgtgaggcttcccggtatcgcttttgagagtaattgagttgagtttagagttacggtttcgagtttagtcgaaattttgaaggagtgctgttgttgcactttgtaaacacagagagaatcaataaagtcgtcatccactttaagagttcttcgatttgtgtttcaccgggtttcggcggtctaaccagcaactcaccggcggtcagaccggcggcaagcggcggtcagactggcgacatacgggcggtccgaccggcagcggcaacaggcacggcaggcatctcagcggttcgaccgatcgatctacatcggtcagaccgacgttcatcaggcggtcagaccggcgcatatacttcggtcagaccgcgatccgtcgatttcgagggtaacttttatttccgctaaaagttttcggtttttggtataccaaccattcacccccctggttggcttatttattgtgtttcgatcctacaatgatttgggatgcaagttctagaacatggatataaattaatatgtattgaactacatgatatatatgcaatttatcaaaccaaaatcagtctgatagcatcaatttgtgataactagctagcttcaccaataacttgactgaggttagtgaggttatatctttaccatccctaaatctctactaattactacaatatagccatgcatatattaactgaagttgcaactgcaaatcttacctcatagtccaatttttaagacttattcgaatcaagctataacaacctgtttgtgccactgccatatttcgccttaattagagttagtttattttgggcaggccaaattatttagtgtcgccttcatttcctggatatttgtgtttagccatttaatctgacagatgtaccatgcagtctcaacagctaactactatacttgctcactgatgatcatgaaagcttagacatcaatgaacatatcacgatactgtgatggtgtatggaaatatcacggtataccattaaccaagatggcatgaaattatccttcgttttttaataattaaccaagaaacaggaatatcccgggaagcactgttaacatgcttgtatatctaataacaaggcaactttaattttcttgttttctttctgaaagtaaccttcaacaatgaaccgtaccccacacaagtttgttttaattaattatcgtttataattaactaacagaatgagttgattcactgatacatatttcagacacatctcatagttcaaaatgtaggatcgaaacacaagaactaagccaaccagagaggggcgaatagttggtatatccaaaaacccaaactttttgtggaattaaaagttaccctcaaattcgatgtagatcggtctgaccgaggttgatccgccggtctgatcgcgcctataccgttggtctgaccaaagttgttagcccggtccaaccgcctgaagatcgcttctgcctcctgtcgccgtcgctggtctgactgcaggtaagccgttggtctgaccaccgcaaagccgccggtatgtcgccggttagacctccgaacccgggcaaacacaaatcgaagaactttcaaagtagatgacaactttattgcctctcttcgcatttacaaagtgcaacaacaacactctttataaaaatctcgactaaactcgaacacctaactaaaatatcaactcaatgctctcaaaagtgataccgggaagcctcacgctccctctcaatttatacatgaggtaggaagcctaaagccacgaaccaaactcatactagaagtcctaatccacataggaaaccttctcatgcaagaactaagccaaccagagaggggtgaatagttggtatacctaaaatcccaaactttttgcggaattaaaagttaccctcaaattcgatgtagatcggtctgaccgaggttgatccgccggtctgatcgcgcctataccgtcggtctgaccgaagttgttagcccggtccaccgcctgaagatcgcttctgcctcctgtcgccgtcgctggtctgaccgcaggtatgccgttggtctgaccaccgcaaagccgccgatatgtcgccggttagacctccgaacctaggcaaacacaaatcgatgaactttcaaagtagatgacaactttattgcttctctccgcatttacaaagtgcaacaacagcactccttacaaaaatctcgactaaactcgaacccctaactaaaatatcaactcaatgctctcaaaagtgataccgggaagcctcacgctccctctcaatttatacatgaggtaggaagcctaaagccacgaaccaaactcatactagaagtcctaatccacataggaaaccttcttgtgcaagaaacaaactttacaaattaactccaatcataccaaatttggcctccttccaaattcgactccgcatcccatacgcacacaatacctctatcgtatgccatatgaaatctttaccaaccacgtgcattgaactctagcctaagtatcccgcatgatatcagaccatcacggacatcgtcttatccccaagccgactcccaatccatcaccagcaatactctcccaagccatcaagacatctacacatgaaacaaacaaagaaaccatattccgagaccaagcactctctaacttgacttattagtagcaaacaacagtattatatacgtatagtatccatccagaagccataattatgaaacaatcacggaattccaaacaaacaacccgaaaccgaaaccgacacagagtcgcccggtcagaccgtgggctggccggtctgaccggcagcacatgcccggtcagaccggacccaacaaaacaacagcacctgtagatcacttgtaaaatccaatcatctccaaaaccaattcgaaaataaattccaaatatcaaaaccaataatctccaatgccaattattattatagaataacaatcaaaaacactttgattttacacaaaatatatttttgggtaaaagaacataagttttcactgatacatttaagacaaatctcataaacaaaatcccgtatttattttattttgtgttctagtaaaacatttaatatgttcttcaaagatttgagattgcgagcaataaatagaagtttgcccaagcctccatccttcttggtattagtagtttcttttgttaaaaaaattggtaatttgctttagctgtgtgtgaaagaaagcctagaacaggagcaaagtcttgtacaagaaaggactacagagaactactaacaaagaaacagaagctaccatggttttccagcaccagttcagagcttagaaacattccgaacaaaaagataagcggcgtacttcattccataaccttttttctttttttgcccaaactaaaactgcacatgaaccgccgcaccctgaccgacatagacatggttgatgtgctctgcaattccgagcaccattccgtgatccatggccttctgactttgcagagagagattttctggcttaccgggcaaacaaggaagagaatcgtacgtctttgttcccgaatgcatcctaaccctaacgcacaatggtgatcgggttgatttgtgcctgaagttagatgattatcattgcacttagaaactgaattagctgaatatgagacgaactggtggcaaggcgttgtgcgtgtggatggataaatggacgcagtggccttttatacgcttcagcactccatcatctaatatgctaaatagcattgtttgcttttctgagacaatatcagttgtggtagggtacgtactcggtatatgctagcagagtcagaacaacatgttgcaattaagtcactgctgcagagaggggttaactccaagcttccgataagtatattttctttggataaatgtgtggtatcttttcaaagggataaggatggcaaaattggtcaaaataacggagaaattgtgaaatggaaggaagtagtatgtttaaggtgaagccaattctgttgttgtaaggtgaatccaaaaatatcggtggtatagagctaaacatccagtattttctacggtattaattgaaccgtattttttgaataccaatgaactaacatgacttgcaagcaaaaaccattaacttttgaggttttcttccatatttgaagaggtatatacctactcacaatttcagatttaaacaattaaactggttaaattgattagataaaaaattaatgtctaattagtcgttgcgaggtatagagaggtatatataactctccatgtcaatccaggggtatatactgtaaaatcaaaggtgtttttggttattattctgtgatgaacaattgggcattggagattattggttctgttatttggatttatttacgaagtggttttggagatgactggatttcacaggtgaatcacaggttcattatttcatgtgaccggtcagaccgggcaggtgctgccggtcagactggcggtgatcaaacggtcggaccggccagcccacggtctgaccggccgacactatgtcggtttcagtttcgggttgtttatttggatatccgagtttatttcatgattataacttctagatggatactatacatatgtaatactattgtttgctgctaatgagtcaagttggagatagcttggtctcggaatatggtttctttgtttgttccatgtgtaggtgactcgatgtctcgggagagtatttgcggtgatagaccgggagtcggcttggggataagacgacgtccgtggtggtcagagatcatgcgggatacttaggctagagttgatgcacgtggttgatggaaattccatatggcattcgatggagttattgtgtgcgtatgggatgcggagtcgaatttggaaggaatccaaatttggtacgattggttatgtaaagtttctttcttgtactagtgggtttcctaagatgtttaggactcctagtatgagtttggttcgtggctttaggctgcctatctcatgtataaatagagggggagcgtgaggcttcccggtatcgctttagagagcaattgagttgagttttgagttagggtttcgagtttagtcgaaatttttataaggaatgttgttggtgcactttgtaaacacagagagaatcaataaagttgtgatctactttgatagttcttcgatttgtgtttcaccgggtttcggcggtctaaccggcggcgcaccggcggtcagaccagcagcatcgcggcggttcgactggcaggcacacggcggtcagaccggcggcgacaggagtcggcggcagacgttcttggcggttcgaccaatcgatctacatcggtcagaccgacgttaatcaggcggtgagaccggcgcaactactttggtcagaccgcaatccatcgatttcgatggtaacttttatttccgctaaaagttttaggtttttgggtataccaaccattcaccccctctggttggcttagttcttgtgtttcgatcctacatatacctctagaatgtaggtacatacgttataattggcacaaatatgtatacctctagaaaatataagaaaatttcacaagtatttataaagataactttccaattatattctaacttgtacgattaattttgattccccattttatggagggtaaaaggagatgtacatatatatcatgtatggagagctatatacctctcaaagtttgagagaaaatcacttaacctttttaccttttcaacacttattttactactcgatatcatatcagtcccctacactccagccatttcattcagactactgcaatacgtccacgtatcaaccgatccaatatataaaggccattcccaacccaagaaactagacatagtttccataaactctacatcatcaagaaactagtactagacactactctttcaatgcaaacactactattccatacttaaatttaatgctacttatctcacatgatgtcttcgatgttgtgtagaaactatgtttcatgcaagacatggtttccttctctttcttcatttatacatttgccacattattttttatcctaggtggcaacttatttaatgctatggacaccatcttagttattaggttgggaatggcctaagccagaaagcaacacatccatcggaccttccgaattctgtttttcactttttttttcgaaagctacaaaactctacaatgtgtggtgagctcaatctgtgtcacaagtgcgagccacagaaaaagaaatgtacttttcagataaaagatcatcacaatatcctgcagctttaacttataacaaagcttgcaagaaaaacatgataattcattgaatttgtcacaagtgatcggtcgaatttgtcttgacgtccttcctcttgcttcaaatacgttgcaatatcaagtcatcacgaacaaaattaatcttaattagctaaccaaagctcatcaagtcaactagtgatcacattagcattagacaagcttgtcttctcggcaatcatgctgttcgatcgaactcgccgccgtgatggtggctaaggcgacgtcggcgagtagtgccgcgtggggaaggccgtgttctggtcggcgccgtccctactgttgacgtaaatcgaatataatttcagtagttgatttaaatggcttaaaacttctaaaacttcgtaactaatttatatgaactctaaatttagccaatctggaggactgcgaccgcaaggaaaaagcatatggaagctagattaattgaagaagcaaggtgagtcacacgttccctgcttgaatatgtttaacctactttatgaaatggttgccatttagaaataatatatatatatatatatattgctaattacgtgggatacgggattactaaatccacttgcttaacgccaatttacttggtatccactccttatcaatccttgggtataataattttatcagcttgggttaattatgttgaccaagctatgcttagccatacttagttcatctaatgggataatcactttactcataatttgtatattgacgagcttaattcaagctcgagatattgtaccattatttgttggtcctaatttgtccaactaaaatatgtcttaatgatagactatggatgcatggttttaatttttcgcacccatgataatgatggacctttttgcgggaatctctgaaagacttaccgtacttaccacaaaccaataggtgtaattgctaaccttttagtatagctctcccctttcataggtatacaagcgagtgtggccgtgaaggagtttggttgaacaggatggtctaagcagcttccagattaaccgtggcataatgaaggggttgtccatcctgattttagggatggtggcgaaacatgcagtgtggggtgtcaatggttagggaagggttatgaggaggtggttggttgggcttgttcaatgtgttgtaccgttgttaagtggagactaatcttttcttaattaatcaaatattttactatttttaactacaaatatttacaattgtctttatccaaaagagtagatcatgatacaaaagactactatctttgtttccccttgcacaattacatcattggtgttgcttgctgagtacagtggttggtacttagccttgcctaattttctattctcaaatttttagtgcctctgtgatgaagacggagttaaaatatcaagcgttgtaccctagttgagtactcctgtggactgaagctaaacacccactaggatagtccttttccgccgttgcattcttttcggtatgaggactaattgtcacttttgtaaatatttatgctttatttatgtttggatatgtacaataacatgtcatttgatgtaccttgtgttgattcctaaacaaggatttaatacacaaattggtctgaaaaaaggaaaaatttctgggtgtgaatcaccacacggcacaacagctcccactcaaaaaatgacacggcaacatagagcctacaccgcttctccaaccacatgaaaccatgctgccatagcataagtaggtggttattgttgctgagcttgccacctagttaggcagttgtgactctgcccatgcgaatgctccgcaactcggtggaaacatccagcactgccacctacatgcacggatcctcttctgctgcaagcaccaagaaagtattttcaatgccgaaggtcgcccatgctatgccgagaagacaccaaattggccaaactaccaagaacatgtgaatcccattgtttttttgtctagtgctctagtcttctagcaaagaccttatcaaaggtgtttgaagagtcaagggggataaagagaagtttgctcctatggcaacaaacggatcaatcagctatacataccgcctccatctctttcaataggaagtaccgcagggcttcaagaatcatgaccgacctcttacattggctacatactctgacactgatggtttgtgtttcgtgcaacggctctggctatatcctcatctccacctccttgtgatgttgcaagcgaagtttatcttgattaatgcgcaaacactggacgaacatctatgttcgtttccgatgcatcctaaccctaacacgtaatggtgaggtagttgtccatcaacataacttagattagcctatcgtgcagaagctgaatcagatgagcatgagacgaagaggcaaggtcttttgggggactattatacaattgtggtaggatatatatataattcgtatgctagcagagcaggggtattacgatgcaattcagttcctaagagaagggtgaaataggacaaaacaatggagaaattgaaggcagtggtatgttcttgaaccatggagaaattcgacggtaataaagtgaggagtgaagccaaaaatgttgggtggtataaactaaacttcctgtattttgatggtattaattgaacgattcttttttcctttccaatgaactaactaacctgacttgcaagcaacaaccactttgtaccttttcggaactttttttttctaacacgatatcaaatgagtctctacaatcataaatgtgaaagtatcaaattatcctatgtgtaaaccagaagcaaaaacatccatcggcttttccaaattctgtttcttcaaagctcacaaaactccacaatatccagtgagctcgatctgtgtcaccagtgcgagccagagaaaaagaaatgtaacttttagataaaagatcatcacaatccacctttaatctatcagaatgcttgcaagaaaaccaaggtaatcaataaaaatggtacaagtgatcgatcgagagtttgtcttcacgtcctttctcatacttcaaatacgttgcactcccaatcccaagtgatcaagaacaaaattaaattttctaaattacaagcaaatcaaagctcatcgaagtatagctatggcattggcatcagacaagttcgtcctctccgccatcgtgctcgccgtcctcaccgtcgcggcagcggcggcgggctacggcggctacggcgacgtcggcgagtactgccgcgtggggaaggcggtgtcccggaacccggtcccatcgtgccggaactacatcgcgcggtggtgcgccgtcgccgggggccgcctggactccggcaagcagccgccgcggcagctcctggagccgtgctgccgggagctcgccgcagtgccgatgcagtgccggtgcgacgcgttgagcgtgctggtgcgtggcgtggtcacggaggagggcgaccgcgtcgccgggatgatctcgcagcacgcggcgcccgggtgcgacgccgcgacgatcgccgggatggcgagcgcgctgacggactacggccggtgcaacctgcagcacactggtttctttggctgccccatgtttgggggtggcatggattaacttccttagtaattaattaattaggcctttgcttaattaattatttaattagttatccgggttactggataattaattatcgatatttgctagtagcatctatcatgtttggatgctgctttctccgtgaatgtgatgataataataatcagaagaaataaataagaagagttggattcatcagctttccagtatcatcctcacaagcctcatggtcaagactatggaacctatacctgtcctgatggtgaagagagtgccactctgatgcatgcggtgcatatgcttagtgctatggatgcagtaagtgtggagcgagccaaagcagctcatgacagggaaaactggaatcgaggcaagatttgcaagttggagagcaaggtgtaccgtctacagaaggaattagctgaacttaaaggagaaacgccgccgccaacacccaagcttcgcctcactgcaagaaagagaacctgtccgccacctcgtctccagttagcttcgaagattcgcgtgatgggtgaagctgtgcccgatcgtgctgaacctgtcatcgacatcataagtgatgaggaagaggaggaagaccctgaagaaagagagccagctactccagaggaagaagatccatcgcttcgttccgacgcaaggcgggattagtcgcttagttagatcgttgccgtagttcactgtgattagattgtttgtttaagtttgcttgtgagtgtgtgggttttacttgttgcttacatcattggtgggatgtaacagcatgagtctagttcttttgcttgtcagagtgtaagatagttggtgagacagtgttaatgcaacttaaatgtaatcatacacagttaagagcaatatagaatttaaattaattaaataactccgttctaagggtgtctctctgtcgttctttcctgttgtctctgcttatcgtcagatggtgaacacgcgcactggaagtggaagtggaagtggaagtggagctactaacaatggaggagatcccacgctagctcagattctggcccaacaaacacagctgatcaatctgttagtgcagcaggcacagaatcagcaggcaaacaatcagaaccagaatccacccccacctccccaaaacaagctggcagatttcttacgtgtgagaccccctaccttttcaagcactaccaatccagtagaagcaggagattggctgcatgcggtggagaagaagttggacttgatccagtgtactgagcaggagaaagtttcttttgcttcgcatcaactgcatggacctgctgctgaatggtgggatcattttcgccaaggcagggctgaaggagagcctattacgtggcaggaattcacggccgctttcaaaaagacacatataccaacgggtgttgtagctctaaagaagagagaatttagagcactcaaccaaggatctcgttcggtcaccgagtacctccatgatttcaaccgtttagctcgttatgctccggaagatgttcgcaccgatgaagagcgtcaggagaagttcttggagggactgaatgatgagttgtcttatgccttgatgtctacggatttccgggatttccagcagttggtggacaaggcgattcgtcaggaagacaagtataaccggatggagcagaagaagcgcagggctgcccaattcaaggcacaacagggcagtaaccagaggccgcgtctcgttacgggacctcaagctccatcgtaccctcaaggaggatcttcatcagttgtccgcccccaacgccagttctacaacaacaatactggtaatcgtggtaatgacaaccgcaacatggttgctcgtcctgcagcaactccagctcagaaccagcccgtcaggaaggaacagggaagcaagccaggggtgtgcttcaattgtggtgatccaggacattatgctgataagtgtcctaagcctcggcgcgtgaagaacgctccagccccgaataactccaatgctccagcaccaaaggcacgtgttaatcatgttgcagcagcagaagctcagaatgcaccagatgtggttttgggtacgtttcctgttaactctatacccgcatctgtgctttttgattccggtgctacgcattcttttttgtctaaaagttttgcgagcaatcatgggatggaagttattagtcttgggagacctttactagttaataccccaggcaatcaagtattttcgacacagtattgtccttccgctactatagaaatagaagaagttcctttcccatcctcgcttatcttgctagaatccaaagatctagatgttatcttagggatggactggttatctcgtcacagaggagttatagattgtgccaaccgtaaggtgactttaaccaatagcaatggggaaacagtttctttctttgtgtcctctcctaaatctcatggtgtgatcttaaaccaagttgctctacaagagatccccatagtacaagactacccagacgtgtttcccgaggatttgccaggtatgccacctaagagagacatagagtttcggatagacttggtacctggaaccaaccctatccataagagaccgtacagaatggcagctaatgagttagctgaggtgaagagacaggtggatgatttgcttcagaaaggatacatcagacccagtacttcgccatggggagcaccagtcatctttgtggagaagaaagatcatacttagagaatgtgcgtggattatcgagcgttgaatgaggttactatcaagaataagtatcctctacccagaattgatgacctgtttgatcaactggaaggtgctacagttttctccaagatagatctccgttctggatattattaacttcgaatccgtgaggaagatataccaaagaccgccttcacaactcggtatggtttgttcgaatgtaccgttatgtcatttggactcactaatgccccagcctttttcatgaatctgatgaacaaggtgtttatggaatatctggataagtttgtcgtggtgtttattgatgacattcttatttactccaagacaaaggaagaacatgaagagcatcttcgtctagctttagagaaactacgtgagcatcagctttatgccaagttcagtaaatgtgaattttggttgtccgaagtgaagtttcttggtcatgtcatctcgtctggtggagtggcagtagatccaagcaatgtggagtcagtgttaagttggaagcaacccaagacggtttccgaaattcgtagtttccttggacttgcagggtattaccgcaggtttattgagaacttttcaaagatcgccagaccaatgactcgtctgcttcagaaggaagtgaagtacaagtggacagaggattgtgaacaaagtttccaagaattgaagaaaaggctagtgactgcgcctgtattaattttgcctgattcgaggaaaggtttccaagtgtattgtgatgcatcccgactcggtttgggttgtgtgttgatgcaagaaggaaaggtggttgcctatgcatctaggcaattacgtcctcatgagaataactacccaacgcatgacctagaattggcagctgtggtgcatgcattgaagatttggctttcgaagaaggagattatgtataccttcgggttacgccgttacgaggtgttcatcgtttccagaccaaagggaaattggcaccgcgttttgtgggaccttttaagattgtgagtcgaaaaggtgaagtagcttatcagttagagttgcctctgtcaatggcgggaatacatgacgtattccacgtgtctcagttgaagaaatgtttacgtgtacctacggaggaagcagatcctgatcgtatagagcttcaagaagatttaacttatgttgagaagccagtcagaattttggaagtaagtgagaggaataccaggaatcacgttatacggttctgcaaggttcagtggagcaatcattcagaagaggaagccacttgggagcgagaagatgaatcgaagtcaactcatcctcatctgttcgccagttcttctgaatctcgaggacgagattccgtttaaggggggtaggtttgtcacgccctaaaaatcgcctaatgtaaaaatacattgtttaaatcatttttagaaattattttaaaagcctacaaactaaaccctaattatctaggaaaattttcaacataaaaatgagctagataaaattttattaaatactatacttgctcctctattttctagatttttctggaaattatttgagcaagggaagtatttttaataattgaaacaacatttcacaaattattttaattttaaaagttccaaaacccctccctaaagccgttgggccgtttttggcccaacatctttcctctctcccgcgggcaagccggcccaagccggcccagcgctgcccgagtcggctcaagccgagccgcccacccctccctcacgtgggacaccgacatgtggggcccacatgtcgggcccttctcctacctccggccggccgccgcttgccaagcccgaccgagccgccttccgcctccaaatccgctccaatccgaccccgattcttccgggtttttgaggggtttttatccccactttctcctctatctttacccccaagattcggagcaaatcgttgagtattctctccgaatcgagttcgtttcgaatttatccccaaaaaccgagtttagattttcccgagtcgatttcttgcgggaggagtccgatctcttcaatccaaggctataaataggaccacctcgtcgccctctttcgttttccccatctcccgagctctctcgtgctccgtagtgtcgccgccgcgcgtgtctagctcgccgccgccgccggtcatcttcggcgccgccgcgccgccgcttgcgtcgtcgccgccgcttgccgccgccgccgttaggtgcgccgtggtgaggggaacctcggccgcccgtcccctttcgccgccggccgccgtagctcgccgccgccggtcaaccgagccgccgccgtcgcccttctcgttgccggccgtcgtcgttcgtcgtttgtcgttgtggtgagtaccgttgggttcgtctcgtcgtcctctacgtgtacatgccctccaaatccgcggccgaccaccctagctccggcgaggtcgccaaccctagccggcctccgtaggtgacgtcatgctgacgtcatcagttttcctttttcccgattttctaatagattaaaacttcggaaaatcataactaaataaccgtagatccgtttcaggtggttcaagttgctaaatttttctaaaatcaagatctacatgttaaaaatatccacatgtactgtttatgcttgtttttgtactgttttgttgattttgtttaattgctttagtttctgacgttccggaggagagcgtttccgttgaggaaggttccgaagcgtttgcggaagcccaaggcaagtcacacagatcccaaacaaccctttgagcatgttgaacccgtttaaagctattattttatttcaactatgcattgttttcgaatgtcatcgggtggtgaacctttcccaattaaataatggccgaagatgactttattttcctatgggtcataatttgattagcatgaaccttatatattggattggttcagctaaatgttatatgtaggtttgcttagccatgcttagaaacattagctaattaaaggggattaaatataaattatattatattattcttattattatggttatatttaatggtcgctcacgatggttaatcgtgtgatgttaattaattgataattaaagcctggttaaggtgggttgtgagcatatggttttgatggttgtgctcatgacaattaaggaccggttcgcgagctactgttgtgaaacatttatcgtgccaatcacaagccagcgtgggcaacggctttatcttttgtatagcgtgattcattatagtgcgccagactgagaagtggcgagaagtccacgggggtcgctggggagtccatgccttgtttataagggggtgattatgatccaggaaaggtgcgctgtaatgggttatgttgtgcaaggggtattgtcacaactcctttccgaggtaccgtggtggtattgaggcacatggtgacatgatgtggggttgtgtcttgtgggtacagtggtacacctctgatcagagtttaaactattcgaatagccgtacccgcggttatgggtgagttgagcaatgtttttcgtgattagtctcacactactcatcaatgttaataatgtgataattaatttggctcctggtttggaatggataattcctggtttggaggtttaatttgttcaactggggttggttgttcaaatgtggttgggcctatgcaacatgggtgtgttgtatggtgttatttaatattgattaattattcaactgtttttactattctcttaaatatttattaaatgctgtttctgcaaatgagctatattatgccatcctttgttatcctgtgcacttgcatatttgctgtgtgacttgttgagtatgtcatatgctcattcttgtaatattcattcatcagaagacgagtatctcagtgaaggtgatgatctggaggattaggcttgttcttggttaagatgcctgtggagtggagtcgccatagctgttccgtagtttgttatagttttatctttccgctgcgtaaaatgttattctttgagaggaactatctacctctgtaatcttttattatttgcgaatattaaatagttatttatttgtactctattatcaatttgtcattgtgtgcctcggttgattcctggacgagagtttaacacacatgtaagcgtttggaattttggatagaaattccgggcgtgacagctgctacggttctgcttccccgcttctgatcgcttgcgagcatgagagattgaaacaaggagggcctccggaaccacagcttcgcctgaaatctgcaccgagtaggcgggtgatcaggtttttgaggagtgcttccgcatgactgctcctcgtcttctgttcgtcgtcgtcgtctgctacaccatgtctggtgcctccgcagctgccgcgcctagagatggaggcgcactaggagccggagccgctgcgaacgaaaacatcaacggaggcagttctgcctcacaatccagcggagggacattcacagggtataacctttgcttactgttaattcaatttttgatacctctgttagtcgcaattctattgcgttcattgtatgatcatgatgcttattatattttaagcatgctcctggttttgttagattttatcactagatcaccccacattgttcatgtcatgattattgtcttaatattcttttgcaatggaccaatcccgagattgcctccgtaacgggcaggcgattcaattccaattgatcacgtcgttattgcggcaacggccggatatcgctcctgcgttataaggaaagatctaatccgataagattccgggcttactttccatctggtgttcttcctcatcctccttgcgcacggctgtgctgctacggttctgcttccccgcttttgatcgcttgcgcgcacgagagatcggaacgagcagggcctccggaaccacaccttcgcctgagatctgcaccgggtaggcgggtgatcaggtttttggggagtgcttccgcacgactgctcctcgtcttctgttcgtcgtcgtcgtttgctacaccatgtctggtgccaccgcagctgccgctcctagagatggaggcgcaccgggagccggagccgttgcgaacgacaacatcaacggaggcagttctgcctcacaatccagcggagggatattcacagggtataaccttcgcttactgttaattcttttgatacctctgttagtcgcaattctattgcgttcattgtatgatcatgatgcttattatatcttaagcatgctcctagttatgttagattttatcactagatcaccccacattgttcatgccatggttattgtcttaatattttggattaaaatatgccgatatatgaccatatttccaacaaaaatgtagtttaaaatttacggaacttgatcgcttaaatatcaggcaaactctaattaattttctggttgcttcaatcataagaagatggtccaaaaataattagacatacaagcattactataaaatttactttcatagtcccgagtaataattcttttacgtaggttaataaaaggtgcaccctgctgtgacgagcccagggtggcctcagccctgaaggtacatttattctccacatgtaaaaaatatttttcacagatgattccttaagaaaaccgctagtgacatagtctgaactatccatggataagtcggttccaatggccattatttttgtattattgtatagtagtgaaggctgcatacttaatcggtacttaattatccattacaaaacacagaagttgcaaccatgaatcttaaggttgatccataacatagtaatttgtacctatcaatttctagtttcaataaattacaattttactccaacctgttcactaaagaatatcgattggagacttttccaagagatcaatatataagaatataactttgagcacttaatttcaaaaacatcaaaaaggagttattaataatgtgaaagcttttattcaaaccagctatgctatgttgaattgatatgccgaaaacctatattctaaagaataattgtagctaaagatttaacttatcactacttaaaaaaacacgtagagatcaaaattataggtgccggaaaagctaaaaccaacacctcctatagtgcttttctctccccatgagctgaaaacatataaaaccggcacccttaagcgactataggtgctggttctaaagaaaaaaaatgcacctatactacatatatgtgcttttttttctaaaacaagataactttaatatattataagtgtcggttagttaaaaaccgacatgatcttttaaaaaatcgtcacctataccaaaccgagccgagcacgggccttatccacttcgcgcgcatctgcggccctatctcttctctccctctctctccctctttctctctctctctcgcctctctttgtccctctctctctcgcttctctgtcgcggcggcagtccggtggaggcagcggtggcggcggccacgacctcccctccaccaaatctggccacaggggaggcggcgagatgggaggcagcgatggcgcctgcgtcctcccctccgccagatccggtggtgttttcccaatcggggctcattagttgggaactttgacgtattctcataggtgccggtttaggagccgacaccttgaggttccagtaacctaaagataaaaaagcggctcaatgtattaactcgattcgagccgatccattgagcagatccagttcatccccacaggaatcaaagaacacatacaaggtcaaagaacacgtgaacacgtgaacttcagggacataaaaaacattaacatctagaacatcaaaaacacgatggcagtcggcgtccttctccacccctgccgccgtcgctgcatagagaggaggggtggtcatggggatatgtaatttgatcctatatatgtgagttcaatcagatttccatcacttccgaatgtgtgtatgtttggtttctagtgcctcctaatcctatgtacgctcactgaaacagtctgccctcccactatggttgctgttccatttacttgcactctgatagtctgatgtaagttagctcatatgggaattgtccatgtttgggatggttcggtctggctagccctttattatcagtcaaagatcaactcctatagtatgtactaatcctccacttatctatgctttgtataaagttaaagcctattaaatctaaaactcaacatgcaaccgtgccacatcatcacccactagcaataattacataatctcatgcaagcatagaacatgatgtacaatttatttaatgatacaaatcaaaatgcaagcatatctaataatcacccgtcatatcatttcactaccacagaatagggattcggtgccggttgggaaactcctttcgatgccggttttcccaaccgggaccacgaaggcggcacaaatcacaggagattaaaggtgccggttttaaaaccggcacctttgaggcgcacacgagccaaaaaaaatcggcttgagtcgatgcaagccgtcaagccgatcccaaatattgcatcaaaaccatgaacacatgaactaaattgcctcaaatccataaacacatttagatcacattgaacaaatcacgaagaggaaataatacaaaacacaaagagggagggacaagaagggaggggaagagatcgatccgcggcctccagccgcctccctcctgccactcgctgcctttgcatcccccctcccttcccttctgccgccccctcccttccgccgccgcatgacgcctcctccgctgggccccctagctagggttaccaaaaaagctcggagctcgcaaactgctcgacctcgattcacattgggctcaattcgagctcgtctcgaactctaaatgagtcgagcccgagcttgtatccaggcttgcaagcctcaccgagcgagctcgaatagctcgacgagctcagccactcacatttgctctaaaaatcctcgatgttctctgacattggctggttctggccaagctgtcatgccctctaccttgtttgcatcagacgttttcgagtagctcgaatagctcgaatagctgggacttttccacttgctagctctcaataacttcaggcagcaagcatacagaccaaagcacacataccaacaaagggtgtgtttagttcatgctaaaattggaagtttggttgaaattggaacgatgtgacggaaaagttggaagtttatgtgtgtagaaaagttttgatgtgatggaaaagttgaaagtttgaagaaaaagtttggaactaaactcggccaaaggctgcatgcatggcatagagtgcatcgccatcaatggagtgcactcatttcccgtaacagctgcatatgtaaactgtaatgtatggttgctagcatgtactatagcatattctagtagtactactgcttcaaatattggctttctaacagcgtgggacaaggattgacttcccactatataacacactcgaagctcggcaaaagctcgaagctcgaacgagccgagctcaagcctgtcttgaggctcgaagtctgacgaggctcggcttgagctcggtttgactatttatcaagctcatgccaagactggtaagctcgctcgagctcggctcgttgacagccctagggccacccctccgcgggatctggcagaggaagcaaagggcaggggaggtcgcggccgcctccgcctccgctggccagacgcccgccgcctccccttccactggatctggcggaggggagggcgcagccaccggccatgggagagaagggagggaaggagaggggatgcgagtcgagtaaaagattgacgatgggagtgagaagaacaggagacgcgagttgaaccttatcttcttctcgtgctggtggggcccaccggctcatcgatttgccagctcggctcaattagtaggtaatggttttttataaaaaaccggcaccaataacatattataggtatcaatttttaattaatcgacacccgtttttttaagaaaaccggcacctatagaatagatgtcagttcttatttagaaccggcacctataattgcttaaaggtgcccttttttgcgatttcaacctgcagaagtgggaaaagacttataggtgccggtttcagtatttacggcacatatagtaccgatacctatttgatgttttgtagtgatgtttgcataatatttttacaaatctatctatcacttttacaatatttaacatatacttatcaatatgattcacactgaagcacgagtatcatttgactgataaatcctgatgttcaaatatttttttctttttacttctagcttgattgtgaaaaaaaatactaagaatttctttgtaattcccgcagcaaagcgcgtggaatcacctagtagaagaagattgtaacacccaatcctttagcaacatgtagtagtggtgtaattctggtatatgtggcctcaaattggttgtacttggtgattcaataccacctcagaagtttagattggtgataatcatcttataatggcaaggcttggtgttctagccttgtacaccaggttatattttactcactgagggacaaagcacaagtgcggatatagttatctatgtcgggcggggaccctcatctgtcttgacgagctgcttcgtcacgcattattggtcagtgatgtgaaaactcatctatgttgggtcagcagccatctctgatagcaatcatctttgtcaggcctaaataaaagatgtaacggatgctagttacaacctgtcacattgagagtcatccgtgacagttgtttgtaaaatcatgaatttcaagtgataatattcatgcatttcatatgtgggattcgaacctaagatctctcaccacatgcaaaccaaccttaccatctcacctggagaccacatgttgataggtcatctgatgctattctcttaactattcttgtccgaatatggaacataaatttgaaactctagataactttaaatgagaatgcttttaactacaaagttgcagctcagagagctctacaactttatcataaggtatgtctccatccaaaatcgtttgaaaaattcaaaaaatattttggaaatagatcacatcacttataacacacatttggggatgaaaacaatcttaaatgaaaaatattgtcaattagaaagttgtagatctcatcaaaccctttgaatttgacataggccatgtttctatccaagatcatttaaaaaaaattaaaaatacgttattcaaaatagatctctccacttataatgcatattcgagcatgtaaactgtctcaaattcaaatgttctcagttttgaagttatagatctcatcaaggtctacataacatgtaaattgatggttcataactacctcccttcacggataagtgtggtaattaagacataggtcacggatgagtgctctcatctttgatgggtcatctcattacacccaccatggatggcatgttatctgtggctgggcatggttatgacctgttataggtaatccgcgacgtcttagaaatacgacccgacaaagatgaccttatatcgttgacaggtcttcatgtatattcatatcttaaatgggctactttttgaaccgttgagatgagttatccgaaacgagtcgcattagcccaacacagatggctcgtcaagaatgcccagatatgtaccagtgaaatataagcacggttaaacgttgtgtcatccggctccatgtgcaagccaggcttctttaggaattaaagtccagcggattaaaataacttgcaaatgaagattctaagaatggatagaatgcatgcacttcagtacatcatgaagagtcacgctccggttctctgaatttgtagtatgtacctgatttattttgtgcaccgtgaactattcatatatatggcagtttcctatgaactataattgtttggtatagcaaccaatcatcttagtgattactatgaactatagttgtttggtatagcagccaatcatcttagtgattactttgaacatcatcatacatgtacgtccctagaatttcagtttcacaataccccaaaagccaaccttgtatgcaagctattgaatcaaaacaagatgtggccctctaaatatttgttttgaaaaccaccaacttgcacgcatttagagatccttcattggacatgtacgtgagcatgagcacgagcacgagattcatcatgtggcagagcacgagtaagctaccccaatggatgtagtcgcaagctacccaatctaggactggcagcatgtaaacctggcacggtatactcatggagaagatccgtctgcagttcactgacattgcaacctagcaaaggatccatatgcccatagggttgatacttgtgctgtataagctgggttcccactgcctcccaaccctacaggttacgtttgtcatgttggggtagggatacctcgtgagtgtattctggaaatagctaggatccttggtcgttaaacactctgtggtttgtatatatgtatggacatgtacactttaagtcatttaattgccttgaatctgcacttcaatatttaggttgctcgtttgggaggatttcctcccatgtgaaatatatatgtaacttatgttgtttggtggctaccttgatcatccaaccttcggattgttcgaatatgtgaagacttgaactacatacatctttcattgcaattatttgatatggctggccaatatcagtctgcagtactgataacttcagtgtggtcatcagtgacagtgaggttattatgatgagaaattttatggtccttgatgttttgtaccaaattttatacataacatattgctttctcaggaactgtaagatctctattgtcaaaacatcattgcacaattgggattctcatgatgttgaaaatatattccagccaccaaatataactagccacatagtcatgcttttgcgtgacttttgttccatttaagaacttccatacatggtttattagttcaacttagcttttaaaaatctttttttgcatgtttattttcctttataaaactaataaaaaccgcatatgaagccgtatatagattatgatcagatataaaaataaattctgtttaaattctaaaaatatgtatatgaggttgcgaaatatcatttctctgtgcatttatttaaacccatcacaaaaattcatttttcccgtacgtcagaaaacatcatagtccacagggtttgctctaaagtctgatagtgaggggtataaactccaagctttcatacgtattttccatgaacaattaatgtgtctgatatatcttttgaaacgacgtgaacatgcaaaaaaataatgaacaaatgtgaaattgaatgcagtagtatgcacatgaaacttggggcaattcaatcgtaatagggcgagccgtgaagccaaaaatatattggtggtatcaaactaaatatcctgtgatttgatggtattaagtgaacgatttattcggttccaatgaactagctgacctgactagcaagcaacaatcatgtaacttttcaccttttcaggacctttttttttccaatacgatatcaaataagtagatctagactctagccatttcacaacactacaatatgtccacgtataaaactatccaatatataaacctgaagcgaacacatccttcggctattccaaaattctgtttcttcacaaaactctacaatatatgtcaccagtgcgagccagacaaaacgaaaagtgatttttagataaaagatcattgcaatccagctttaatttataacaaagcttgcaagaaaaacaaggtaatatcattgcaatccatctttaatttataacaaagcttgcaagctagaaaaacaaggtaatatcattgcaatccagctttaatttataacaaagcttgcaagaaaaacaaggtaattaactaaaaatggtgcaaagtgatcgatcgagagtttgtcttcacgtccttttcttttgcttcaaatacgtttcagtaccaagcattcaacaagaaaattaacttagcaaaaatcaacgctcacatattcatggcatcagcttcagacaagctcgtcctctcggccatcgtgctcgccgtcctcgccgccgtggtggcagcggcgtcgggctacggcgacgtcggcgagtactgccgcgtggggaaggcggtgtcccggaacccggtcccgtcgtgccggaactacatcgcgcggtggtgcgccgccgccgggggccgcatggactcccgcaagcagccgccgcgggagttcctggagccgtgctgccgggagctcgccgccgtgccgatgcagtgccggtgcgacgcgctgagcgtgctggtgcgcggcgtggtcacggaggagggcgaccgcgtctccgggatgatctcccagcacgcggcaccggggtgcgacgccgcgacgatcgccgggatggcgagcgcgctgacggactacggccggtgcaacctgcagcacacggccggttcctttgcctgcctcatgtttggtggtggcatggattagattaattatttcattagtgattaattaattaattaggcctttgcttaattaattatcgatgtttgctagtactagctagcagtatcatgtttggatgctgcttctctatgtttgtgataatgataataaaaagaaataaaatgaggaacggatgttcctctttgttgttattcttggaaaatcgttttagttatgagccatgttttgatttatgttggtgcagccagaaatttttcgctggttgtgcttactttttgcaccaccagtttttataataactcaaatctaatatgttttgtataaaaaagtgtaaaagtatgatagaaaataagaacagtaatatcacataacattgtaatcttggtgatttggagaaaaggctgaagtatttaaaaaaggagttagagaagtgtaggagaggtaatatagggatagatcaagtgacgagggaggaggtgttgcggtacaaggtggaaagactggaggaacagattgatgtgtactggaggcaaagggctcatgtccggtggctgcagcaaggggatcgtaacacctctttcttccatgcggcttgttcggagaggcgcagaagtaatagaataggaaggctgagaaaggatgatgggggatgggtggaacaggaggaagaaaaaaaacagtttattactaactattttatgcagctcttctcatcaaatggagtacgtgatccccggcaaattctggaggctgttccccagcgaatcaatgctgagatgaatgaagagttaacaagggatttctctgaagaagaagtgaagaaggcactggataatatcggggatctgaaagcaccggggccagacggaatgccatcactgttctataagagattttgggacgtggtcggtgatcaagtagtgaaagagaccctggcagtactgaggggagctcctatgccgactgagtggaatgaaacaactatagtgctgatacccaaggtgaataagccagagaacatcaaggacctaaggccgatcagtttgtgcaatgtgttatacaagattgtgtcgaaggttttggcaaatagattgaaaggtattctgcccgatgcgatttctccatctcagagcgcttttgtcccgggaaggcttatatcggataatattttagtggcttatgagatgacacacttcatgaggaaaaagagaaaggggaagttgggatatgcagcaatcaaacttgacatgagtaaagcctacgatcgggtcgaatggcatttcttaagggagatgatgttgcggctgggttttgacgagggatggacaaatttgatcatgcaatgtgtcacttcggtgtcgtatagaatcaaggttaatggtgaattgacggatgttttccatccgggcaggggccttcgccaaggggaccccctttccccctatctgttcttactgtgtgcagagggtttctcagccttactgaagcaagcagagaatgaaggaagaatgaaaggtgatgcacagtgcctacaagagatcctatctctatatgaggagttatccgggcaaatgataaataaggacaagtcggtggtgatgttcagtccaaacacgtcgaacagtaagcgaaatgaagtcatgcaggccttacaaattaatcgccagacgatgaatgagagatatctgggtcttccggtatatgtcggtcgagacaaaatgaaggtgtttgcatatctgaaggacaggatctggaaacggattcagggctggaaggaaaagatgttatcacgggctggaaaggaaatcctgatcaaagccgttgcacaagccatcccaattttcgccatggcatgctttgacataacgaagaattttggcggaccagattagctccatgatcgccaggttttggtggaataatcaggataaggaaaataaaatacattggctcagttgggagaaattgacaaggccaaaaggagagggagggctggggttcagagacatatatacttttaatctctcaatgttggcaaagcagtgttggcagctgttgcaggaacctaactcgctgtgtgcgcaaattttgagagcaaagtatcacccaggggcatcaattttgcaggcatcaccgagaccgggaatgtcctacacttggcgaagtattttaaaaggggtacaaattttgaaggatggcatgatctggagagtgggcaacggtgaaaatatccggatatgggatgatccctggataccgagggattggacaaggaagccaatcacctgcaggggcacaaacctggttactcgagtaaatgagctgattgatccttacacgtgggagtgggatgagccactagtgagacaaaccttctgggaggaagatgttgaacacatcctgtcaataccggttcatacagatatgaaggatgttgttgggtggcactttgacagtaaggggcagttttcagtcagatcggcatataaggttcagaaggctatgcagcgaagaaacgacaccaggtctccggcaacctcatcgggcgatccctccggtgatcaagtatggaagaagctttggaagttcaactgcccaaataaaattaaacactttttgtggcggttgggacatgattctattgccctgcgcatgacactgaagagaagagggttggacctggataccaagtgtgttgcctgcaacaggcttgatgaagatggtggccacctatttttcaagtgcaaggaagtgaagaaaatttggagggagttaaatctggaagatttaacatgcgagttagccaatttgcattctgctagggcgattgtggaagcgctctctgcactgggggagaatgaaaaattaacggcctcattgctgctgtatacttggtggaatgagagaaataggagaagggagggggatggaagaagagaggcacatctgctggcggttgtcaagcaggctagaagaccaagccactgggagagaccgacgttggatactatgaaactaaatatagatggagcttttagaccacagggggcaataggaggatggggctatgttaccaggggagcggatgcacaagtggtcctagcgggagcgggcaaatcgactcgaatgcaagatgctctctgtcggtgatatgggaccgggggtatcgtgaccagaggcttgaggcagacacaatcgcccacgcggcctggcaccttcgaggacgtcgggcccgagggtgaggtgtctgccctcctcctgatttctcccgagggggggtcgggttactcctgccccggccccgagggccgaggcaccccgaccccttgaggaagtttgcgccacatatatgggataggtgaacacggcagtgctcacctaaccgcatttattgtagtctggtcaagcgtgtcacgctgcatgcagcgcagtgcagcgcgttcctttatccggtctgtgaccggtcacagaccggtcagatcacgggttaggtggcgactggcggtctgacgcacgccttgccccatcccgtcaagacgaaagcctctaggcacttgtctcaagccggagctagcgtgttatctcttagagatggcacgttagccctggttagatttataccaggcttcatcccaaccattacatgcaagatgttacatgaagaagggcaaacatgcacgttgctaagctgacgcatggtagacaaggatgactaatctgtgaccggtctgacactggtcgcgtcatccacagacagccataatcccacgttgcacctgtttccggcggaagcgggggtaggtatgggctgtcccgtcagaagggcactcggacagcaaccgtaccgatctccgtccatttatgaagagaagaacagtccagtttggaaagggagaggggcatgtggtatccccttgagatataaaaggaggaccttgcccacctagaatggggatctttttggctggttcatactttgtaacttgtccatacacagatccaccaaaacacaggagtagggtattacgcttcccagcggcccgaacctgtatacgtctcctgcgtctcgcgtttcttccgggttcgcgatctttccacatacagcgagagcttgggatttcaccctaagcccccggtcgaaccggcaaaggggggcctgcgcggtctcccggtgaggagccacgagctccgtcatctggcgcgccaggtagggggctcagcgtgtgttttctgagctctcatactcttccgtgtgcgccaagtttcccttgttcagcctaatggtcgagcaagcaaaggcgcacgacctctctccgagtgtgagcggcgacgacggggagccaaacccacgccgtcgagctcgtactcccccacctcctccacaccaaaatcctaagcatggggaggcgctcgagagggttgataaatccgcagcatcaccggtcgtgggtgatgcaggagaacggcgagatggggagcgtcgcctcctcgtctacggcgacggcagcacgcctcagggcgcgcttcaggctgctggcgcgctcctacgtcacccgcccgtcgtccatgacccggagtctccagctcagcgatggctggacgacgtggccaacttggtcatgacggcccagcagcgcctgggtgctggtggacggtccgccaccaccaagacctccggcgccaccaccaccggttccgtgtcatcaaggcggagggcgcggcgagcggcggcggctgcacgtcattcggctgccactccctcatcgacaccttcgactcgggaggatcagcatggggagccggatgcccgcctcaacatcgagcgccggcgtaatagccggcgtactccccgtgaaacggagggtgcctcctcgtccagagtgtcacctcgacatggacgtgaggaccagccctccgtgcccccggctggtggtgtcggctgtagagcctttgtggcgagtcttcggaatgtccgttggcccccaaggttccggcccaccatcaccgagaagtatgatgggagcgtcaaccccaccgagtttctccaggtctatacgaccgggattgaggccgctgggggtgacgacagggttatggctaatttctttcccatggccctgaagggacaggcgcggggttggctaatgaacctgccacccgcgtcggtccactcctgggaagatttgtgccaacagttcaccatgaactttcaaggcacatatccgcgcccaggcgaagaagcggacttgcacgccgtacagcgaggggatgatgagtcgcttcgctcgtacattcagcggttctgccaagtccgcaataccataccatgcatccctgcacacgcggtgatctacgcgttcagggggggtgtgcggcacaaccgcatgctcgaaaagatcgtttccaaagagccccagactaccgcagagctttttcagctcgcggaccgagtggctcgtaaggaggaagcttggacctggaacccctccggttccggtgtggcagcttcggccgcccccggatccgccgctcagacagggcggcatgacaggaggaggaagaagaggtcggtccattccggcgacgagggtcatgtcctcgccgtcgagggcgctccgcgggccacccgaaaggggaggcctgcaagcgacaaaaagaaagaggctggtactcccagcagggagcgcccagccggtaggtggtgctccgtccacaacacctccctccatgatctcgcggactgccgcgccgtcaaaaatttggcggagcgaacgaggaagtgggaggaggacaggaggcaggagcgccgggaaggtaagtccccggcggttccttccggcaaacggcgaagtgaggccaaacagaaggcccccgctgttgacatcgatgacggtgatgatgacctaggtttccaagaacctggggccaccattgccactgtcgatgggggagcgtgtgctcacatctctcgccggagcttcaaggctatgaagcgagagcttctggccgcggcccctactcatgaggcgacgcgtcgggcacggtggtcggaggttgtcctcacctttgaccagaccgaccacccaccgtgcgttgcccggggagggcagattgcgatggtggtttcccccaccatctgcaacgtgaagttggggcgtgtcctcatagatggaggagcggccctcaacatcctttcccccgcggcctatgatgccatcaaggccccggggatggtgctccagccgtcccaaccgattatcggtgtgacgctggggcacacatggccgttaggtcacatcgacctaccggtcacctttggtggatcagccaacttccgcacggagcgggtgaacttcgatgtggcggacctcagtctgccctacaacgcggtcctggggaggcccgcgttggtgaagttcatggcggcggttcactacgcctatcttcagatgaagatgccgggccccggcggccccatctctgtccatggcgacctcaaagttgcgctcgcttgcatggagcagcgcgcggaccacctcgctgctgcgtccaagcacgagggtggtgacgagaggcttggcacctccgcccccaccgccccgaggcggcggattgtcacatgcgacgaggtcccggtcaaggaggttgccctgggcgacggtccatccaagaccacacggatcggtggtcttctggatggcaaataggaagacgcgctcgtctccttcctgcgggcaaacgctgacgtcttcgcatggagaccggcggatatgcccggggtccccagggaggtgattgagcaccgtctcgccgtgcggccgggcgcgaggccggtccggcagaaagtgcggcggtaggccccggaacgtcaagccttcatccgcgaggaggtggcgagacttctggaggccggattcatccgtgaggtcatccatccggagtggctggcgaacccggtggtcgttcccaaggcgaacggcaagcttcggatgtgcatcgactacaccgaccttaacaaggcatgtcctaaggacccttaccccctgcctcgcatagatcagattgtcgactccactgcggggtgcgaccttttgtgttttctagatgcatactctggttaccatcagattcgcatggctagggaggatgaggaaaaaactgcgttcattacccccgtaggaacctattgttatacatcaatgcccttcgggttaaagaatgcaggtcctacttttcagcgtactactcgaatttctttgggtagtcaaataggacgtaatgttgaggcttatgttgatgacttggttgtaaagacgcgcaaccaagagactttactctcagatctagcggaaacttttgaaaatctccgcgccgcccgcataaaactgaaccccgataagtgcgtgtttggtgtacctgcgggcaagcttctcgggttcttggtctctgcccgaggcatcgaggccaaccccgagaagatacgagctatagagcggatgcgcccccccagcaaacttagggatgtgcagtgcgtcaccggttgcatggccgccctaagtcgtttcatatcgaggctgggagagaaggcgctacccttatttaagctcctcaagcgctcggggccgtttacttggacggaggaagctgaaaatgccctcgcccagttgaaggcgtatctcagctctcctccggttctagttgccccggagccaaatgagcccctgctactttacttagcggcgaccccccaagtagttagtgcagcgttggttgtggagcgcgatgaggacaatcctcattccgcgcacccccaccctgtgccgacttggcccgggagcaagcagggaggagaggcccccgagtcgaacggtggcctaaggcccctgacgaccggagtcggccctctgcccgcttgtcagacggtgctgggtgcccccgaccctcaggaaggccccgaggccactgagggaaggccgcacctatcgccctttggccccgaggctaaccctgtgctgactcgacccgggagagagcagggagaagaggcccccgagccgaacggaggcctgaggcccctgacgcccggagttggccctttgcccgcttgtccgacgacgccaggagcccccgacccccaggacggccccgaggccactgtgggaaggccgctcctgtcatcctccgaccccgaggtcatcggcacagaagacgagtgcgccccgaggggccacttggacgaagaacgccccgggggtacggcccctagcgaagaggatcggccccgccgaaaggtgcagcggcctgtctactttgttagtgaggccctccgggacgccaagaccagataccctcaggcccagaagatgctttacgctattctgatggcctcgaggaaactgcgccattatttccaggcgcatcgggtcactgtggttacgtcttaccccctcggtcaaatcttgcgtaatcgcgagggtaccggacgggtggtaaaatgggcaatcgagctttttgagttcgatctgcactttgaaccacgccacgctatcaagaaccaagccctcgccgattttgtggcaaagtggaccccggctccagagaccgtctcaattcccgaggccagcacggacccctcacagctgcctcacacctcccactgggtgatgcagttcgacggttctctgtctctccagggcgccggagcgggggtcacgttgacctctccgaaaggagacgtccttagatacttggtccgtctcgactttcgagcaaccaacaatatggcagagtacgagggactccttgccggactcagagtggcagttggactggggatccgccgcctcttggtgttaggcgactcccagctggtcgttaaccaggtctgtaaggagtaccggtgctctgacccacagatggacgcttacgtacgccaagtgcggcgtatggagcgccattttgacgggataaagcttcggcatgtacccagacgggataacatggttgctgacgaactctcacggctcgcgtcctcgcgagcccagaccccaccgggcgcctttgaagaaaggcttacccagccgtcggcgcgacccgaccccttaggggagacggatgcgcctgatcggcccccgaggcccgtcggagtccaggcctcgggacccgaagggagcgctccaagctcccttagattgattgcatggatctctgagatccaagcatacctcacagataagactctacctgaggaccgcgaagggagtgaacgcgtccaacgcatttccaaacgctatgtgctggtagaagggaccctctatcggcgcgcggctaacggaatcctcctgaaatgcattcctcaggaacaaggcgttgagcttcttgccgatatccatgaaggcgagtgcggagcccattccgcctcgcgcaccttggttggcaaggcctttcgtcaaggattctattggccgacagctctcaatgatgcagttgatctggtccggcgatgcagagcgtgtcagtttcacgccaagcagatccatcagccggcccaggccctgcagatcataccactttcgtggccatttgctgtctgggggctcgatatcctgggaccgtttaagcgggccccgggcgggtttgagtatctgtatgtcgcgatcgacaagttcactaagtggcccgaggcttatccggtcgtcaagatcgataagcactctgcacttaaattcattaaaggcatcacggcccgttttggagtgcctaaccgtattattacggataatggcacccaattcactagtgaactcttcggcgattactgcgaagacatgggcatcaagctctgcttcgcctcacctgcccaccccagaagcaatggccaagtggagcgcgccaatgcagaaatcctcaaaggccttaaaaccaagaccttcaatattctcaagaagcacggcgattcatggatcgaggagttgccagcggtgctctgggcaaaccgaaccacaccaagccgagcaaccggggaaacgcctttcttcctcgtctacggcgcagaagcggttctcccatccgagctcaccctgaggtctcctcgggccaccatgtactgcgaagccgatcaagatcagcttcgcagagatgacctcgactacttggaagagcgaaggaggcgcgcggccctccgagccgcgtgctaccagcagagcctgcggcgctaccatcagcgccacgtccgggcccgatcactctgcgtcgacgacctcgtcttacgccgcgtccaaacgcgtgctggattgagcaagctctcaccaatgtgggagggtccgtatcgagtgatcggtgtccccccgccgggctccatacggttggccacgggcgacggcactgagctgcctaacccgtggaacatcgaacaccttcgtcgcttctagccctgagggagggctcgggtgtcagcgttttgggctcgggcaaacccggaccccccccctcgggtgtgcagggttggccgggggctaccacgcatgcacattattatttctcttatttcagcgtttcaaaaaaagcagtttcaatttcctaaaggttgtgtctgtgccgttttttccttttgaagaatcttgacttgaaataaggtcactcgtgctcaaccttgccctcgggggctcggttcggtcagctaaaatcgccaaacggggcccagaactgagccgtgccccggggcgtggtgaactccgggggggaatcggcaaaaacccacaatcgggtcacctataaccctcggtcaccacgttcccggcctggccagcctcaacatgtggatctccccaggcactagccccgacccgagccattagaggactgggacttgggcacgagcccttaaatcaagctaagacacaaaagaggaccacggcacagatcatcctcatctcatacgcatagcaaaataaaattgacacgaagaattttttcatttttgattccagattaagttgatctatacaaaaaagaggcatgaaggccttagaagaaagaaaaagaaaaaattggagattggcgggggcctgggggctcattccgatgcgcccgggtcgccggcctcgtcgccatcgttgtctgcaccgctggcgtcgccctcctcgtcggagttgggggcgaacgcgagccgaggggccgagccctcgaagctgttgacgatgtggtcggcggcatcccggacccgcgcgcgcgcatcgtcctcggtcccgggagggaactcatccagcgccatccacggagagaagttggggtccctggcctggtaactcgctaatacgagttcgaccgctccttgggcgaggtccctcgaggatgacttaatggtcttctcgagctcctcggggagttgttggagagcccaggccatcttcgtgaggcgcggagcgaggccttccagattggtggagtgcggcattgtttggcctttccagaggcccgcttgccgaccggcgcgatctaggcgggagaccgcatcccaaagtgtgccaggccctatctcgcccgccaagcggagggcctcggcctccccggcggatgagtcaagggcgcgctgcatgtcggcgacggtgtgttcggcagctgcaaggcgggcgactaagtcgctttcgcccgcagccgccccaccgatgggcgctctcgcggccagctctttttcccgctcc

SEQ ID NO: 6180 - DNA, 34897 bp, Oryza sativa
aatgttgaaagtcctagcctcaagcttcaaatccatcaaacataggttctgaaacattcgaagtgcatcatcagtgagtttgtttttgcaaagtccatgaaggattatgttgtatgtgctaagtttgttggaaatttggtcataattcggcatattttaatccaaaataacaagataataaacatgatatttacaataggatttgatccagtgatagtggtgaatgtaatcaacatgagcatgcttaacgttgaataagcatcaacaatcacataatgacacaatgttgacattgcgatgaacattaacagtaaaacttctaattgaaataatgtaataaggttataccccaagaatggtcctccgctggagtttgaggcagtattgcctccgttggtgttgacgggagtctccttctccttgtctccagtgttcgacatgttggtgaagatgaagtagatgttgacgaacagtgagtagtcgcgccttgcgctccccaaaaacctgatcgcccgcccgtctgtgcaaacgtcgcagcaacgcgtggtttcggaggcctactctcccaacgcgtgtgcacacactcgtcgggatgggattaccgtagcagcaacagcttttgaaaatggatgaaagtgtgtcttcttcttctcgcgggagatcaaatccattctcattttataagaggaatggaagatgaagagtaagagtcatggaataggaagaggaatggagcaactaattgtcatcaactagccatgaaccatcctccactacacaaccatcaaccaacaatcaattaagagtaattgatgtaagttaccaatggaataggaagaggaatagagcaactaattgtcatcaactagccatgaaccatcctccactacacaaccatcaaccatccatcaattaggattaattgatataagttaccaattccttaatcaaatggattaattctcaaaactcttcatcccattgatatcccatagaagaatgaattcacatgaattcctagcataatgagccttggaatttatttgatttaattgatttaaatggattaattatccaattaaatctaacaaagttcaatctgcattccactttcggtaatcctgacatagagttcttttgcagcagcagttcttctggtttgaaataaaccttgcagaattatgttatacgtaataatatcaggactaacaccactgctctccatctccttaaaaagaactaacgcgtcttccatcctactaattttgcagtagccattaatcaaagtgctataagtaacagtattaggtttcaacccaactgagaccatgccagaaagtaacttcattgcttcatccatcttacctgccaagggtaatgatatcgggcttcacaccaattcgtaccatcaagtcaaagagttttccagattctataaccctcccttctttgcaatgactgtcaattattgaattaaagaaaatagtgctaagacagatgcctcgatccaacatttcaagaaataactcttcagccttctcccatttgtcaaagatacagagactatgaattagggagttataaacaatgctgtcaggtcttagtccttcatcgatcatctgctcaaaataaagcatagcatcttctactctacctgacttgcaaagtacatctataactgttccataggtcactgcattcggattcaatccttgctgcctcattttgctgaatacaagcattgcctcttctactttctcttgtttagcgtatgcacatactagaatgctgaaaacataatgattagggtggataccgtttcgtaccatcaaatccaagagaccatgcatctcaacaagggctcctttggtagcatacccctgaagcagggtaccataggtagtaatatcaggctttaggcccctcttggtcatagaatcaaaaatctttcttgcttccgtgcatcttccgttcttgcaaagataatccatgagcgagttataagtaacaacatctggttcgacaccatcactgcgcatctttttgagaaatacaatagcctctttcggctgccctgaagagcaaaacccatgcacaatactattatatgtcatgcaatcaggcatgacaccactcttaaccatggtggtaagtacctccatggccttgtccacagtttgagccttgcatagcgcagcaataatagagttgtaggtcacaacatttggcgaaatcctctggtcaagcattttgtccagatccccctccttgaagaagccattgatgacggtgctgtacgacaccacatcaggtgggcagtcacctccatcatcagccattatgtgcagtaactcgagagcttcttggcttctgttctcatcacacagcccgttgagaagaatattgtaggagaagacatctggtatgccacgacggagcaattcgtcgaacacgtggcgtgcgtcctccgcgccaccgccactgccccccgcgcggccccctcgcccttggatcgagccctccgagcgaagggcgccagcagcgcgggaagcggcgcggcgcgccatgcccgccctagctgacaggtgcagcagcagccagtggaggggaaggagatggcagggatggtgtaggagatcggcgacgagcagggtgatcgcgatcgatctcttgcgcagttgtgtgcggcgctcttgggaaaaaaaaccagaaatttccgttcagaatggcccacttttattttttttattgtactgaaaaattacccttgcgttgcaatggaaaaaaaactaatgttatgataatgattatatttattttatagtttcatgggagttataagagatagttataaaaataaacaatgccccttctctcccaccgtaagtgatagcagctgccatttcctcatcacggaccgtgaaataatatgatatggttagatttaatttttaattaaattaaccatgattaataaatctcttttaatttttttttgaaattttgggagctttattgctaattttcataataaaaacatcatttcagcatttatttaaataaaaatctaaataacagttagtgatgctctaaaatgaaagcacagtttaaattctatagtctgctacatccttcgtttcatattatatgtcactagcaaatatgcccgtgagttgcaatgggtgaactaaaaattaaagatttgcactggttttaggagtttgaggggacaaattaagggagctaaagcgaaattattctgtgcggagcgtacacatggcctatggggtggcccaatagtgcggccggcctgggaacaattcagaggcaacttaaaggacctaaagtgaacttatttcacgcggagcgtacatgtggcccaatagtgtgggcaacctaggagtggcacccggcccaacgcgggagaagccgtagttgtccgatctgatggacggtcctgattgatcccgatctatataaaaactcagcagcccaaaccctaactctaaaatcatttttcctcccccctatctctctcaaagccaccactccccttcccttcctcaccggcgtcgccgctcccccccgcgcgcgcgccctcaccggcggcgccgctccatatccccctcttcctcctgtctcgccggcgcggccacggggaggcggcgacggggagggcaccctactggttcccctcgaccactccctccccctttctccaccggcggcgctctccctcccggcgtggaggcggtgatacattctagtataatgaatttggatagatgtgtcacattcacctaaaatctcttatgctatgtaacgaagggagtattgcaactttgcaagtttgtaaatgtgccaaaaccggtgtgttgaatgaaacatatgttaacgtgctaaaatgatgttaacagtttaataatcggtgaattgatttttgcgtagttagtagtagtacatgctaaataatgaacgtaagggcaagctattgctcgtgcacacttgccatgtgcactgatattttgtttttgacattttggtttttagtaataccccttcttttttttaaaaaagtctttgttcctttataaaggaaaggaacatcgtatcaatatcacacgttatactgtcatatccgtatacaatcgcttgtgcgcataccatataagatcgcttgacacgcagtaactgatatgttgagctgaccatggaatctcgtcaaattcatacccagaacgcagaaacaaatgaaaaggtaaatcacatgcacgtaacacaagtgaatccaatacaaaacattattacacttaccgaatggtgtacccggacacaatcttaaagaaactaaaattaacaataaatcccttaccttactcattaatattcatagtcactaggatttgaacctagtagataacgttatgcacccacaactccttcacaataattcctttggtgcttccccaaatttgatatccttaacttaagccaagtaatcgagcgtctaatatcaaatcttaccaataaatttgtggagtatataattaccaagtttccccttttcttctatcttttggttcattttcacttcgattttcaatgaaatataactcatttgtgcacgacaaaattactttgttctactgcttaatcggcgtggcagcaccaagtgcacaaatgaaggcagaagcagtcttaccattcagtgttcgatcctagcctgccctacaccatatcttcaaacaagaacacaggattgcattgacagactcgagcacacatttttacttcacagtttaatttaatgaaacgagcaacttctcctaaattacgataagttcttaggatacgttatatatttgtattgttaaatataaaataggggctaaaataaactacatcagagtctatttttacaaatctgactaacaacggacagtcctgtatttctcctctcttcagtctgcaaaaatggacagcactcagcacctagtctgctaccagccatactagaggctcaggaacatgaagtagataaattgtggactagaagtctagaacatatataaattataaaacatggaaaaaaattcccactcaacgtgggcaagcaaattagcatgatatgcatgaaaataaggtgctaacattcaaagatagaaataaacaaaattcattatgtggtttggccatatgtgtatgcaacaaagttcttcattttaaagaaggtgctataactgtgtgaatagaactatgttcaaggcagccaccaaagagagtttggtgttttccccaaaatcatatatgattcataaaatcttgtttgtttaccaaattctgtaattgcatatatgtctacttaagaaagcagggatgagactacagccataccagctggctcctgctgtccatacgccgcaaaggaattactcctaagagatacattgcccatcaaataattcggaacataaatatacttgtcttgcttataaacttgaaacaccttcctagagttagaagggtatagatatccaaaaaactctgatggttcgcaacatagatagcagggctactattcggtggcaggttctccattccctcgacgtcaagcttgtagaacatggaaattgtcagagttgcccaaatctttgcaatgtagtgctgagctctcgaaaaaaatttgcaaatatacttattttttcaataatttatgtttatatacatgcatggagaggttttataaaaatatacgcatcccgcgaaacggaaacgcgggacagcgacggttccgcagattcaaaatacgggaccgacgatcctgcgcggaaccgtcatggtccggcagctccaaaacgcggaatcgcgacggtcccgcggttccaaaacgcggaaccgcagtggccagcgactccagcactgtgcagcgcagtttatacactgttttaaccctgtgcagcactgttcacacattgttcatggtcggtgccgcgcctccattgtgcggaactgacccgggaactgtgtaaaacagtaccagaaacagtgtcaaacagtattaaacacagtgccatgcagtaaaaaaatgttggcgccgcggttccgcacactggcgctgcgggagcgtaccggttccgcgttaccggcaagcgagactggctcggtcccgcagccccattccgcgcgaacgcctcggccgtccactccgcgccgccacgccatacttttgttgcgctcccgcataaccgatctgcggattagttatattttcgcaaattcttcatactagtgtatataaacgtaaatctttttcaaaaaatgggtattttcaaatttttttcctgaactctcctccggtatcggtcaaataggagcacaagtggatgaaccacaaccatggcgacaaacaaaaagattgctgcaactgcagccaccgcgtagaagcaaacccctctgacccttgaaatcacatcgatgtctggtaaccaaatcaacaacaaaagtaaccacataagaaatgcaattctggaattcggtatgaatcccatgagtttgtccatgtacatgattttatttgcatccgcacattacatgtaaactgtatagacatagttttttgttttgcatcatacatcttagtaagaaatatccattgctgctcaaattccatgaaacacaaatgcacaatagctagtattagctgctacaagttctttagaaagtcttaacaactgcctgttctcctcaatttatactaaacattctattgacaccttcaaggttggtgtggagctaactgttataaccaacaatatatcatggtggttaacaagaatgatgcgctggcaatgattatgtttgatttccacaccttcagttttaaaattagagatggcaattttgtcactgcaggttcaaatgatttttctcccctccacaattccacattttgtcaagcaattgccaacaacgttccaaatgtaaatgttccagcaaactacattaatggctatgaggcctgcccagcgagacgaacatcacaacacattttgcgagaaaaaaaaataaaaaagggaagagagtggaggaggctgcaaacctgagagcgcctgcggcgaatcccccatggtagcgacaccaccagcggcgaaatccgatctcaccacagtctccctccgccgccagctcgccgccaaagcctgcggaccagggcggagcagcgcggccgatacaccctgatgcggatggcactccacgcctcggccacggtcgccccccgccatcaccactgcaaaaacgccaaaatcacaaatcaaccggatgagaagatatcagctagcggcggcctcgagatgcgtgtgattaccgtgcgcggtcgacgacgtggcagcgggggcagcgacgtgggcgattacgtggtggcgacgccgacgcggcggtcaaatgcaaaagggtcatcaccaccaccactgtcggtgattacattttaagatagacggagtctttttgccatttctctggagttcccatcagaactgtgcgctcttattgaaatccatccagttgagcctctaattggatttgcattgccacgatccttttttatattcaacttcaaaccactaccattgctgtgcctctcgcctaatgaaccacttgatgccccattgcttgatataaatggagaacaattgaatgccttctgtgacagaccagcatcactaccagaagatatagtaatatgagaaacttctgattttgaagataagcaacaatgacgtgtctggttcgacaaaagtttttttttttcgagttcttgctctttccatcattaaatgaagttccccccatgacatctgctgcataacaaagcttcaagaatgtcactaattaaacttatacgaggaaccaacaagataatctgggtcaggaaacatgaaatattaaaaatatcaggtagcattttataaatatttggtgtcaggccaagttcaacatctgtagtgagacttgaatggcgaccaaactatattgagacagtgcatagaaaagccaacgagatcaactgatcaaacaaaattggtgtttgttattaccagagtaactctgttgagagactttagacgatttcggatatgtagagctggaaacaacagaagaattctgaagtattgaaagagctgcagcaaaacaaaataggcgtcagactgcaactttaacatactggatgtttaaaacattttattgtgttagcgaacacattgtattattaagaaaaatacctgataataactcaatagtattgataatgacaccaacaaaagaaagcaaggagcgtttcgggttcaattttctactcatattaagcaaatgggtctgcaagaagcaaaatgaatgtaagagttcatattgctttttcaggaagaaaagaaaattgttaagcagacatacaaagtcgcactgtttgcacattttgcacagaacaaatcaggagagaagatagtacagaagaaggaaatgggtactaaactgaaacagaacatataaggagcattaccttgttatcatcgcttagaaatatggcattttccaatattttcaaacatttcaagaggagagcagcactttgcaaagatgttccttcatttcggtccaaagctgaagtggatgtatcctttatgagattctgatacacaaggtttgccaccagaagtatattgttaatttatttattcagtttatcagcgtaatatgattgcattattagttggggaataaaaagtacacagataggaacaccaagcatttaaattaatgcgcaatttactccaaacttgcttacacatgcaagaacagcaagtatagctggaaaagtaacatccaaatgaataatgttcacttggtgtagatatgtcaagtgttattatcgtttcaagtgttattatcgtgggggatataatcatcagaggaactgtaagatactaacaccacatgcagaataaaaaagtattaaaaaactatttttgcaacataaaacaacataatttgtgttgcagccaattttccatgtcctgatgaaaatagttactacctcaagcattttccatgccccaaaatataacaacctttggctatgtatctggacaagcattactttcatgtggcttcaagcacattaaagctaaaatggcgaaaaggaacaagcctgcacaatccattagagttgaacaaaggaaatgtaaaatatgcgatgttagcgagatctcacctccaatgttgaatgaaaatccaccataacgtcaaaaatactatcaagacctcccatctcccttaatgtctctttaaaatttcctccaactctggacactgtgtcagaagtctctgtaacaatcaaatatttgataagggaaaaccttcctagtatgacaatggccataggtgcttctagtgcagtccactactccaattcaattctgcaacacagatggaagtcatcaatcaaaagcaggtgaagaaaagggctaagcaaaccacccatgaatattgcaaataggtgctatgtaacttatgacaagttgacaactgcttatttggctcatataaataaatataatggtcataaagggaaatcatgaccaagaaatttgattaaaacttaccctctactgaaacagcagacaagcatgcattttccattgtcaacaaagcaagccactttggacacagttctggccttgttgttttcttgtcatctttgtcgagcgacttgatcacttgacagcttaagagaatctcttcaacttttgaaaggatttcctctgaaatgcagtcagaatccttatttgatccattaagcatttgaactttactgattccaaaaagtttggaacctatcgatggtgctgtggaatcaacaagattcactggaggatttaataatttaagaagaaaatggacaccagattctgaatccaacaaatgattttcttgaacctgaacaacaagaagggagatattggagaataagcacaagtgaagttataccattaaagagtacgagctgctagcaataataactgaaatttacaccataaattaaagttcaacttcaaacaaaatgatgaaataaaagcatggattttctcaaataatcttctttgtaatcacatgccaaaatattcatggaaaactggtgaatacttatataactatactgtagaaataaataactttgtcatgatgtgattatctttatggactgttatataaaagaaaacaatcgatatgcgtaaaaaattggaatgaagcatgcacagaagcataaggatgggattgagaggtactcacatcacttcacaaaatgaatagaagagcagctgcaccaatagtgcagggaggatcatcaatgttcaaaaccaaaattgaatcaataatttgttgtaccaatctataggatataagaaaagaggacacttgtgagtaagaaaacaaaaggtaacgtacaataatttcattaacggaacatgtgtttgttgaatggaacgatttcagtatcttttgttcagttaaaaaacaagtcaaactattcaacacctaaacagtacacattaacgaaatttaatgaaaccctatagattgatacacacaaatgaatcctacacaatgttggatctaatgccaaaactactgcctagacaaattaagtttgaaactccagttacaaattcctttatgatccgttagtagagataacgacaaacttttgtgttttttctggcatcaaaggcagaacataattgcttgtttaccgtctaggaaccagagtaaaaataattcggagaggtgacatacatacctcgctatttacacataaagagaagatccctcctctaatacaactgtaggagaaaagaactccaacacagaatttcaaagctgcaaaaggcttcagcagctcaaagattctataaaggacttatatttttcagggagaaacctatgatattcttgatattttcccccagacaaaagatctaaaaacaaggaagcagtggatgcttcgagggagaagtgcttctcatcaatcatgaacaggtaagtgccagccctggttatatcacccctctgtaacagtttcctaacaatggaatttagcatgcgggagttggcagtacagccattctcctccattgaaagaaatagatcatccaattcttctagcaacccctgctctataagattttctgccattaaactgtaggtcctaacatctggcactaaaccgttagccgagagagctgcaaacaaatccttggcttcatcatttctgccaactttaagcaatgcaccaatcataatgttaaaagtcctagtctccagctgtaaatccgtcaaacataggttctgaaacattcgaagtgcctcgtcagtgagattgtttttgcaaagcccatgaaggattatgttgtatgtgctaagttcaagctgcgttccactttcggtaatcccgacatagagttcttttgcagcagcagttcttctggtttgaaataaaccttgcagaattatattatacgtaataatatcaggactaacaccactgctctccatctccctaaaaagaactaacgcatcttccatcctgctaattttacagtagccattaatcaaagtattatatgtaacacaatcaggtttcattccaactgagaccatgctggcaagtaacttcgttgcttcatccatcttacctgccaagcaatatccatcgatgagagtactgtacgtaatgatatcgggcttcacaccaatacgtaccatcaggtcaaagagtttttcagattctataaccctcccttctttgcaatgactgtcaattattgaattaaagaaaatagtgtccagacagatgcctcgatccaacatttcaagaattaactctttagccttgtcccatttgtcaaagatacagagactatgaattagggagttataaacaatgttgccagggcttagtctttcatcgatcatctgctcaaaataacgcatagcatcttctactctgcctgacttgcaaagtatgcctataactgttccataggtcactgtatccggattcaatccttgctgcctcattttgctgaacacaagcattgcctgatctactttcccttgtttagcgtatgcacatattagaatgctgaaaacataatgattagggtggataccgtttcgtaccatcaaatccaagagaccatgcatctcaacaagggctcctttggtagcatacccctgaagcagggtaccataggtagtaatttcaggctttaggcccctcttggtcatagaatcgaacatctttctagcttccgtgcatcttccgttcttgcaaagataatccatgagcgagttataagtaacaacatctggttcgacaccatcactgtgcatctttttgagaaatccaatagcctctttcggctgccctgaagagcaatacccatgcacgatactattatacgtcctgcaattaggcatgacaccattcttaaccatgctggtaagtacctccatggctttgtccatagcttgagccttgcataacgcagcaataatagagctgtaggtaacaacatttggtaaaatcccccggtccagcatttcatggtatgtaccgtaagctttgtccagatccccctccttgaagaagccattgatgacagtggtatacgacaccacatcaggtgggcagtcacctccatcatcaggcatcatttggagcagctcgagagcttcttggcttctgttctcatcacacagccccttgagaagaatattgtaggagaagacatttggtatgcagccaagctgggtcattctgcggagcactatgtccattgcgtcgctcgtcctcttgtcagcacagaggcccttgagcagaggagtgaaggcgatggcgtccactctaaatcccttcttaatgacattgcccaaggccgcgaaaccgaggtccaagcggcccgcgcagcagcaggaaccgatgagaatgccgtaggtgcacaagttgggagttacctcgtcggcgccggctcgggccatgcggttgtagcgggacacggcggccgcggggctgtgacgcgcgacgtcggcgagggcgcagttcaagccgtagatcgaggcgcccctgccacgccggagcaattcgtcgaacacgtggcgtgcgtcctcggcgccactgccccccgtgcggccccctcgcccttgggtcgagccctccgagcgaagggcgccaacagcgccggcgcggacgcgggaagcggcgcggcgcgccatgcccgcccgccctagcggactggtgcagcagcagcagcgccggcggaaaccaacgcgacgcagctgatacggagaggtgggcggcagcagtggaggatagaggggaggggaagggggaggtcggcgccgtgctatttggcgctgaagtatacgattttgcgctcaacaaaaagattatttttaaataagttttggtcacggttaatttataaaattaatttttggaaagtgtcaaattgtcaaaaatttgtgtgataaaagggtggccgcagtttgcaagcgcgtctaggtctagacgctgttataaacaacgtccatcctgttttgataaatcctccaaacaaattgctaataatttaattttaaaaatattaattattattaatataaaaattcggcgaaacatgtgtcatgtaaattggatatatagatctttatttgagtcagattttaaatccgtttgcttttggaaatacggaaggagtcgtataaggtatctctttaaaaattttacatgctaacttgatcgagatatctgttctgcgcgcgtggaagagaaaaaaaacataaattttttgcggtagtttaatagagggatccacctttagttttttagttttttattgaatttaggctctctcttagatggaggagtatttccacttcctattttcagtttaggaaaaaaaataaattttagggatagattattgctaacatattagtgatgctctaaaatcaaagcacggtttaaatttgttatagtctactacttcctccatttcatattataagtcgttttgattttttttagtctaacttatttaaatttgactacgtttatagaaaaatatagcagcatttttaacacagaacaaatatattatcaaaatatattccatgctaaatttaatgaaactagtgtggtgcttaaatgttgctaatttttttctataaacttagttaaactcgataaaatttgactaatataaaaatcaaagcgatttataagaaaaaaaaagtcaaaactactccctccatcccgagaggtaataacctattaccgaattatacattacatacaactataaatctagacaacctaatcgaattcgtgaatctagataatatctaatccaatactatattcttatattttggaagaaaagaagtgctccctccatctcataatatagcaacttagtaccagacgagacataccaatttgttatattatgggatggagaagtaggaaagaatttattgcaagtttgcaactgtgccaaaaccggtgtgttgaatgaaacatatattaacgtgataaaatggcgttattaaaccggtgtattgattcttgggtagttagtagtagttcatgctaaataatgaacgtaagggcaagctattgctcgttgtgctctgtgcaaattgggctcaaattgtggtgaagatgacggttcaagctaaagtttcagcagagggtaatgtgaaggagattatcttaagatcataaaatgtagcatcaatatatacctgcgaaagatctgagaaaaaaattagatgtgtaggagtaatggtagttaagaacccttcacttgacatgtgatggaagcaaaaccaggaagaagaaagggaatgaaagagagcttaacacgctggtaggtttcttactttctatggttaaacaaattgagttacataacgtggagaactagaacactggaagaggttggaaagtccccccccccccccccaccgtcgctctcgcacgggcggcttggggggcgaaaaaaccctagctgcccactccccacttcttctcccccacctcgccgccgccggagctcgccggcggcgaagccggcagcgagcaaggaaggcagcggcgaggcccttttttcttggcgtcttcctcctcgacgcgatgaggatggggcaaacgacgaagccctcactgcggtcggaggtggtgacgccgtggcggtgtggggaggcggcggatccggcgcccccaaggccggatccggccatcccgcgcctggatctggcgtggcggcggcacgaggcggctagggacggcggtggcggctcagcaaggtgcgcggtggcggctcggcagcgggcgggcgaggtgcgcggcaatggcatggggctgcctcgggcgcggaggcggagcgtggcggcgtgcggtcgtgtgcgccggtgacgtgcagccggcccgggcggcagcggcggcggctcagtggcatgctcggcccttggagctggcggttgtgctcgctggcgccggcaacagcgcgacggccgtggctcgctggtgccagcgcgagctgtcccatggcgcggccaggcctcggtagccgggcggccgtcgtggtgcccttagcggccagctgggcggcgcgacgcagccaggaggggcgcggagaccaggcaaagggggtgcaggtgggtggcgccggagccggagcgacagcgtatccggcattggcgcaggcccagatggtagtgcaaagggagctggagtcgatgggttgtcttcctcgttgccggtcggcaccctcgcccttcctagagctcatccccttcttttgcggggagtttctaggttggattgagacagcagctcgccagcgggggaagctcaggctgccgaagcaatgtcacccagtcccgggttctcctttggccaaaactggcaaggcggccggcgggtggtggaacggaggggtcctgggccagctctcagggatggtggttcgatggagtcggccgacgaaggggcgtcggtgcggtgcggtggaagctacgtgctaccttttgtctgtgtggtggttctgagtggtggacggtgatctgcgatcaaggctatagggtcctaggcggaagcctagtccggtggttcaccggaccggcagcggctacgccttcgggcgtcgtaacctccttggggcgctgtcaagggttaccctctccccttcttgatgagtttctctgggtgaaaaccacatctttttagatggacgatggcagcatcctacatgtcgtgaccaccttggtggcatcgttttcgaagtctcatctatgtgttgctgccgtaggcctagcggcgtttggtcacacttagtggcggtcgtttggtgctaggcttcaccctcagtggtttgtgcttgggggtagtgtatggtgtgtggtcatgcaccttggtgcattgtggtgttttttcttgtaacttttactccttaatacattcggatggccttgtcgatgacatgggatcaggagtatcatgactagaggtttgaggcagacacaatcgcccacgtggcctggcaccctcgggggacgtcgggcccgagggtgatgtgttcgccctcctcttagtccccccgagggggtcggaccgcacccgcctcggccccgagggccgaggcgccccgacccctcgtgggtttttgctccgcgtgtatgggttaggtgagcacagcggggctcacctaaccacatttattgcggtttggctgagcgtgtcacgcggcatgtaacgaagtgcagtgcactcgtttatccggtctgtgaccagtcacagaccggtcagatcgcgggttaggtggcgacaggcgatctgacgcacgcctcgccccatcccgtcaggacgagggcttctaggcgctcgtccccagctggagctagcgtgttacctcctagagatggcacgttagtcctggttagatatatgccaggcttcatcctaaccattacaggcaagatgttgtgtgaagaagggccaacatgtagattgctaaactgacgcgtggtggacaggaatgagcaatttgtgaccagtctgacactggtcatgtcgtcagcagacagccataatcccacgtcgcacctgctttcggcggaagtggaggtaggtatgggccgtcctatcagaaggtcattcggacggcaactatacaaatctccgtccatttatgaaaaggtagggtaagtccccacagaaaggagggagatggtgcatgtggtatccccttaagatataaaaggaggaccttgcccacttagagggggggactggactggacttttccagattcggaacccagaacaagggagaggctggctcatactttgtagctccttcatacacagatccccccaaaacacaggagtagggtattacgcttctcagcggcccgaacctgtatacatcgcccgtgtcttatgctctttcgacggtcgcgaaccttccacatacagagagcttagaatttcaccctgagtccccggccgaaccggcaaaggggggcctgcgcggtctcccggtgaggagccccacgctccgtcatctggcgcgccaggtaggggactcagtgtgtgtttttctgagctctcgtactcttccgtgtgcgccaagcttttcctgttcagcctgatggccgagcaagcaaaggcgcacgacctctctccgagtgtgagtggcgacgacggggagccgaacccacgccgtcgagctcgtactccaccgctccctccacgccaaagtcctaagcggggggaggcgctcgagagggtcgaaagatccgcgacttcaccgatcgcgggcgatggagaagaacggcgagatggggagcgtcgcctcctcgtctacggcgacggcagcacgccccagggcgcgctccaagctgcgggcgcgctcttacgtcacccgcctgtcgtccctgacccggagtctccagcccaacgatggctggacgacgtggccaaattagtcatgacggtacggcagcgcctagatgctggtgggcggtcctccgccaccaaggcctctggtgctgctaccaccggctccgcgtcgtcaagacggagggcacgacgagcggcagccgctgttcgccattcggccgccactccttcgtcgactccttcgacccagaaagatctgcgtggggggccggacgcccgcaccagcatcgagcgccggcgtaatgaccgaagtgctgcccacgcaacggagggcgcttcctcgtccagagtgtcacctcaacacggacgcgggaatcagccctccgtgcccccggttggtggtgtcggctgtagagcctttgtggcgagtcttcggaatgtccgttggcccccaaggttccggcccaccatcgccgaaaaatatgatggcagcgtcaaccccgccgagtggctagcgaacccggtggtcgttcccaaggcgaacggcaagcttcggatgtgcatcgactacaccgaccttaacaaggcatgtcctaaggatccttaccccctgcctcgcatagatcagattgtcgactccactgcggggtgcgaccttttgtgttttctagatgcatactctggttaccatcagattcgcatggctagggaggatgaggaaaaaactgcgttcattacccccataggaacctattgttatacgacaatgcccttcgggttaaagaatgcaggtcctacttttcaacgtactactcgaatttctttgggtagccaattaggacgtaatattgaagcttatgtcgatgacttggttgtaaagacgcgcaaccaggaaacgttactcatagatctagcggaaacttttgagagtctccgctccgcccgcataaaattaaaccccgataagtgtgtgttcggtgtacctgcgggcaagcttctcgggttcttggtctctgcccggggcattgaggccaaccccgagaagatacgggctatagagcggatgcgcccccccagcaaacttagggatgtgcaatacgtcaccggttgcatggccgccctaagtcggttcatatcgaggctgggagagaaggcgttacccttatttaagcttctcaaacgctccggaccgtttacctggacgaaggaagctgaaaatgccctcacccagttgaaggcgtatctaagctctcccccagttctggtcgccccggagccagacgagcccttgctactctacttagcggcgaccccgcaagtagttagtgcggcattggttgtggagcgcgatgaggacaattctcatttcgcgcttccccaccctgtgccgacttggcccgggagagagcagggaggagaggcccccgagccgaacggtggcccgaggcccccgacgaccggagttggccctctgcccgcttgtcagacggtgctaggagcccccgacccccaggaaggccctgaggccactgtgggaaggccgcacctatcgccctttgaccccgaggctaaccctgtgctgactcgacccgggaaagagcagggagaagaggcccccgagccgaacggaggcctaaggcccctgacgaccggagttggccctttgcccgcttgtccgacgacgccaggagcccctgacccccaggacggccccaaagccactgtgggaaggccgcccctgttatcctccgaccccgaggtcatcagcacagaagacaagtgcgccccgcgaggctgcttggacgaagagtgccccagggatgcggcccctagcgaagaggatcggccccaccgaaaggtgcagcggcccgtctactttgttagtgaggccctccgggacgccaaaacccgataccctcaggcccagaagatgctttacgctattctgatggcctcgaggaaactgcgccattatttccaggcgcatcgggtcactgtggttacgtcttaccccctcggtcaaatcttgcataatcgagacggtacaggacgggtggtgaaatgggcaatcgaactttctgagttcgatttgcactttgaaccacgccacgctatcaagagccaggctctcgccgattttgtggcagagtggaccccggctcccgagcccgtctcaatccccgaggccagcacggacccctcgcagctgcctcacaccgcccactgggtaatgcagttcgacggctccctgtctcttcagggcgccggtgcgggggtcacgttgacctctccgagcggagacgtcctcagatacttggtccgcctcgactttcgagcgaccaacaatatggcagagtacgagggactccttgccggactcagagtggcagctggactggggatccgccgcctcctggtgttaggcgactcccagctggtcgttaaccaagtctgtaaggagtaccggtgctctgacccgcagatggacgcctacgtgcgccaagtacggcgtatggagcgccattttgacgggattgagcttcggcatgtgcccagacgggataacatgattgccgacgaactctcacggctcgcgtccacgcgagcccagaccccaccgggcgcctttgaagaaaggcttgcccagccgtcggcgcgacccgaccccttaggggagacggacgcgcctgaccggcccccgaggcccgttgaagtccaggcctcgggacccgaggggagcgctcccagctcccttagattgattgcttggattgccgagatccaagcatacctcacagataagactttacccgaggaccgcgaagggagtgaacgcgtccatcgcatctccaaacgctacgtgctggtagaagggaccctctatcggcgcgcggctaatggaatcctcctgaagtgcattcctcgggaacaaggcgttgtgcttcttgccgatatccatgaaggcgaatgcggagcccactccgcctcgcgcaccttggttggtaaagcttttcgccagggtttctattggccgacagctctcaatgatgcggtcgacctggtccggcgatgtagagcgtgtcaattccacgccaagcaaatccatcagccggcccaggccctgcagaccataccactttcgtggccatttgctgtctgggggctcgatatcctgggaccgtttaggcgggccccgggcgggtttgagtatctgtatgtcgcgatcgacaagttcactaagtggcccgaggcttatccggtcgtcaagatcgataagcactccgcacttaaattcattaagggcatcacggcccggtttggagtgcctaaccgtattattacggataatggcacccaattcactagtgaactcttcggcgactactgcgaagacatgggcatcaagctctgcttcgcctcacctgcccaccccagaagcaatggccaagtggagcgcgccaattcagaaatcctcaaaggccttaaaaccaagaccttcaacatactcaagaagcacggcgattcatggatcgaggagttgccagcggtgctctgggcaaaccgaactacaccaagccgagcaaccggggaaacgcctttcttcctcgtctacggcgcggaagcggttctcccatccgagctcaccctgaggtctcctcgggccaccatgtactgcgaggctgatcaagatcagcttcgcagagatgacctcgactacttggaagagcgaaggcgacgcgcggccctcagagccgcgcgctaccagcagagcctgcggcgctaccatcagcgtcacgtccgggcccgatcactctgcgtcgacgacctcgtcctacgccgcgtccaaacgcgtgctggattgagcaagctctcaccaatgtgggagggtccgtatcgagtggtcggcgtcccccggccgggctccatacggctggccacgggcgacggcattgagctgcctaacccgtggaacatcgaacaccttcgtcgcttctacccctgaggggggggtcgggtgtcaggtttcgggctcgggccaaccccgcaccccctcgggcgtgcagggttggccgggggctgccacacatgcacattcttatttctcttatttcagtatttcaataaaagcagtttcaatttcctaaaggctgtatctgtgtttttttttccttttgaagaatcttgacttgaaataggtcactcgtgctcaatcctgccctcgggggctcgggtcggctaaaatcgccaaacggggcccagaaccgagccgtgccccggggcgtggtgaactccgggggggaatcggcaaaaacccacaatcgggtcacccataaccctcggtcaccacgttcccggcctggccagtctcgacatgtggatctccccaggcactagccccgacccacgccttttgaggactgggacctgggcacgagcccttaatcaagctaagacgcaaaaggaccacgtcacagatcatcctcatctcatacacacagcaagatgaaattgacacaaaaatttcttcatttttgattacagattaagttgatctatacaaaaaagaggcccgaaggccttagaagaaggaaaagaagaaaaaactgaagaatggcgggggcttgggggatcaatccgatacgcccgggtcgccggcctcatcgtcactgtcgtctgcaccaccggcattgtcctcctcgtcggagttgggggcgaacgcgagccgaggggctgagccctcgaagctgtggacgatatggtcggcggcatcccggacctgcgcgcgcgctgtcctcggtcccaggagggaactcatccagcgccatccatggagaaattggggtccctggcctggtaactcgccagtacgagctccaccgctccttgggcgaggtccctcgaggatgacttaattgtcttctcgagctcctcggggagccgttggagagccccggccatcttcgagaggcgctgggcgaggcctccatggttggcggcgtactttacggtccgccctctccagaggcccacctgccgaccggcgcgatctaggcgggagacggcgtcccaaagcatgccgggccctacctcgcctgccaagcggagggcctcgacctccccggcggacgagtttagcgtgccctgcagatcggcgatggtatgttcggcagcagcgaggcgggcggctaagtcgttttcgcccgcagccgccccgccgctgcgcgccctcgcgtccagctccttctcccgcgcctcgaggtcagcggcccgctggtttagtgcggtcctctcggcgcggacacattccagagtgcggcgcgcctgctcctcctgcgctgcctcgcggagggacaggctgtccgccagccgttgcgccgcggcctcggcctcctcgagagctcgctcccgctcggtgagcgcgtcctcgtggaggcggagtgcggactcctcttcggcacaggcggactcgtgcgccgccagtgttgcctcccggatagtgacggcggcctcgcggtccgccagatccctctccacgacgcaggcgcgctcttccagcgccatggcgcgcgcctcaagggtctcttcgcgccgtcgggacgccgcttcggtctcccccgcccgctgttctcgggcagcggcaacgtcaagcaccccctgggcggcgtcgagctttttccctagctccgcctcccagctcccgtattgaaggcggagggtgtcctgcgcctcgttcatcacgctggtggcaatgagggcagccccccgctcctcctccacttccttggcgatttccgccaacaccttcttacgggcttcaagctccgagacatgccggcggtgtgccttgcggcccacctccaccatggcctccactgagcgccgcccctcctcgacacgcgcccacgcggcgtcgagctccgcccactctgcttgcagggcctccacctgggcactaagcccgtccaacaccgcgatgtttgcggcggccaaggcctgcagaaggggctctgcgctcagcggggcgatagaaggcgtggggaagagccgccttggagaggatgccacgcggctcgggccgccgatggaagtgccggactcggggatgtccctcagacctggttggtcctgggcgtcgcctgagggagtgggcccaagcgacgcgcccgcagcctcgtcgccagctgccccggaagttgtcgcctgagcgtcgcccgaggaagcgggctcaagcgacgcgcccgcgacctcatcgcgagctgcctcggaagtcgccattgcctcgtcctggcgaaatccggctttctcccgagcggcttcctcggcctggtgggctcgggcggcctcctcccgagcggcttcctcggcctggcgggcccgggcggcctcctcccgagcggtttcctcgccctggcgagcccgggcggcctcctgggcggcctcctcggcttcccgtaggcgatccgcggcctctcgccggtcagattcccgcctccgggcctctgcggccgccggatcctcggcctcagactggccggacttggaatggcgggagggacgcgacgggatctcgctgaaacagaagaaaagaccagaagacgaacaagatgggtgagtgaaaactcgcgttgagagaatgaatacagccacgatgggtgagagacgaacctgcgagggggtcggttaaacgaccactttggaggggaaataaggtttccccgagatggttctgtctcccccatcttgcggagccgcttcttcttgcgctccccctcgggctgcgatgtcggcgcggccccctccgggcgcctgctgttggcacgcaccgccccgccccctcggggaggagatgggggaggtgttcctccctgcttcctcttcccccgggcgtcggcagggcggctgctcctcgggcctccgtcgcgagacccagaagcacgaccccctcccggggtagattgatcccccctacggctcccgcctgcgccgtcgtggccctttggagctcactcctctgaggccccgaccgccgtcataatggtcaggatggaggcgcggtctggatcgctgcagagagggaggattccttggggaatgagggacgcctccatggagttgagattcagcacccgttggaccactatcttgaaatcctcaggagcccagtcccatctgactccctggtgggtcctcatgtagtcttcggacccggtgtactcccaggcgccccgagcgcgccgctggagcggcgcaatccgacgacggaggtagtcgccgtacaccatggcccctgtgagcccctgggatcgtaggcccgccaggcggtcgaggacggcgtcatagccatcccccagatctaccggcgcccgccagctggaggcctgcgccgggggctggctcggaagtcagaggcgcgcttcgtcggcgaggggggtgtagaaccagtcgctcttccagtcgtcccacttcttgcggagggcgcaggggatgtagcgattcagcaccggcccccatggctggaagtagcagccaccaactaccgatggcggcgacaccgactgcacggtgaagaaccaccggaacagccgaagagatgggcgcaccccaatgaacatctcgcacagatgcgcgaagatggccaatgtcatcaccgcgttgggggtgaggtgcgccatctggagatcgtagaacttcagaacatccatgaagaaagaagaaaatggcggaaccagccctgccattgcaaaggggagaaagaagacggaccgccccgggtagtctggcgccgggcgtccctcacccagcgtgactatctcccggccggtggcagattccggcatgaagcggcgcggcagcccagcctgcctctcgctcacgatgcgggaaggcggcagcacgctaccatcgagcagagcggagccccgtgccatggcgccggaggaagagaagattgagagcgagcgcgtgtggcgaaagtagagcacaggaaagaaggagttagggcgcaagcggcgaagacaagggaaatgatggcgaaaggaaggaaacagatcctttcctcagtgcctttatactcttgccaacgctgtgcccggctcctcgcttctcgcgcccactatttcgccccctcgtttctcgcgcccacgcttccactaatcccattcgcccgcttgcggcgcatgaggtggatatgcggttgtggcagtcgagatagatcatatcgtgcgcgcgttaattacgctcgccgaccaaagcgacgttaccatatctccagacgaaacgaatcgccatgtccagattcgtgtgctactcgagtaatgtggcagtcttgaagagaccgctcattattgatagtagagttaccattgccgatgtgcgtgatttgtgaccgttgggtttctgcccaattgtggagaccggtcccacctgtcaccaggccttaggagtggcgtcacgcccgaccgcttcccttaaagagggcgatcgccctggcataacgccgggggctactgtcggtgacatgggatcaggagtatcatgactagaggtttgaggcagacacaatcgcccacgtggcctggcaccctcgggggacgtcgggcccgagggtgatgtgttcgccctcctcttagtccccccgagggggtcggaccgcacccgcctcggccccgagggccgaggcgccccgacccctcgtgggtttttgctccgcgtgtatgggttaggtgagcacagcggggctcacctaaccacatttattgcggtttggctgagcgtgtcacgccgcatgtaacgaagtgcagtgcactcgtttatccggtctgtgaccagtcacagaccggtcagatcgcgggttaggtggcgacaggcgatctgacgcacgcctcgccccatcccgtcaggacgagggcttctaggcgctcgtccccagctggagctagcgtgttacctcctagagatggcacgttagtcctggttagatatatgccaggcttcatcctaaccattacaggcaagatgttgtgtgaagaagggccaacatgtagattgctaaactgacgcgtggtggacaggaatgagcaatttgtgaccagtctgacactggtcatgtcgtcagcagacagccataatcccacgtcgcacctgctttcggcggaagtggaggtaggtatgggccgtcctatcagaaggtcattcggacggcaactatacaaatctccgtccatttatgaaaaggtagggtaagtccccacagaaaggagggagatggtgcatgtggtatccccttaagatataaaaggaggaccttgcccacttagagggggggactggactggacttttccagattcggaacccagaacaagggagaggctggctcatactttgtagctccttcatacacagatccccccaaaacacaggagtagggtattacgcttctcagcggcccgaacctgtatacatcgcccgtgtcttatgctctttcgacggtcgcgaaccttccacatacagagagcttagaatttcaccctgagtccccggccgaaccggcaaaggggggcctgcgcggtctcccggtgaggagccccacgctccgtcaggcctccttcggcctttccggcgaaaaaaagttacataacgtggattaatgtttgtttgcaacttatacattttctccaagagagatgcacacaacctttcagagtataaattataatttatacagtttttaataaatccaatgtagatatttggctcatttaaaagatttgtgccacccttataaaaaagaacatatagaagtatttttgtttaaagtacagagaaaaaattgccgagcacacttgccatgtgcactgatattttgtttttgtcatttttgtttttagtaatacccttcttttaaaaaaagtctttgttccttcatcaaggaaaggaacatcatttttttattaaaaaaatcaatatcacacgttatactgtcatcatatccgtatacaatcacttgtgcgcatagtatgcgtataagatcgcttgacacgcagtaattgtcaagttgagcagaccatggaaaattcaacgtttgagtttctagcccagaacgcaaaaacagatgaaaaggtaaagcacatgtttagtgcgtgcatgtaacacaagtgaatccaatacaaagcattattacagttaccgaatggcgtccgatggcacaatcttaaagaaactaaaattaacaataaatcccttaccttacccattaatattcatagtcactaggatttgaacctagcagataaatattcatagccacaaggatttgaacctagcagataacgtcacgcacccataactccttcacaataattcctttggtgcttccccaaatttgatatcgctaacttaagccaataatcgagcatctcatatcaaatttgccagaatacatacagcccggagctcacagcttccggataccatcttaccaataaaatgcactctctttatggagtaattaccaagtttccccttttcttctaacttttgattcgttttcgcttcgatttccaatgaaatataactcatttgtgcacgacaaaactactttgttctactgcttaatcggcgtggcagcactaactgcaagtagctaaaaatttagcaataacgtctgaaggcagaagcagtcttaccattcagtgttcaatcctggcctgccctacaccatatcttcaaacaagaacacaggattgcattgacagactcgagcacacatttttacttcacaatttaatttaatgaaacgagcaacttctcctaaattaagataagttcttaggatctgttatatatttgtattgttaaaaataaaataggggcaaaagtaaactacatcagagtctatttttacaaatctgactaacaatggacagtcttgtatttcttctctcttcagtctgcaaaaaaggacagcactcagcacctagtctgctatcagccatactagaggctcaggaacatgaagtacataaattgtggactagaagtctaaaacatatataaattataaaacatgaaaaaaattcccactcaacgtgggcaagcaaattagcatgatatgcatgaaaataaggtgctagtggataatgctaagtacaaactagctaatgtgaaccagctgacacggtgcctttgttgcttttgtaacgagctagagaagaatattaagattcatacatgtgtactgaattttcgtttttgaaaatatactaaaagagttgattgttttagatcatagaaatggtaactggcatttacaccaactaggatgtacatagacaactaaacaaattaatgggccatatctaaagtaacagcctcgaatacatgtttgatgctctttggtcatttttaatcgaacaagaggtgttaatgttcagtcctctcttacaggttacttgcctcttcaactatatgactgggtgaataaactcaatcctctaaaatattacttgcctcttctgtaaatttaccaagtgcagaaatgtacaatgccattacactacacaagcttatttatactgattacgaaagtaattagtaactagtatcagtacctgtaacaagcttagccttgaaagcctgtctgtgcctttgaataggttccatataataaaaaaaaacaccatctttctttagtgcactccataaccgtttagaataagagtgtcagctatcaccttccttgcttcagaacataatttctcagcatcattcccttcaattggatggtgaataatgagctttactgaacctgaattaaggatgccttccattccagaaggcatcagtttccctgtcccgagaagagtaataggtatcacaggagcaccggtctttgtagccacactgaatgcacctctctggggacatttataaccacgtcagtacaccatgagaaggttaacattatatactgaatataaaaatctcattagatgtaatgtaacctaagtttggttactgaaccttaaatgcacctagctttccatctttgcttctagtcccctctggaaagaaaaatacagatgctccttttttcaccaaatccacacaccgtttaagacagtcctgaattttaacaaaccatttgttatgctcagcatggaatacaatgttgacatactacaaatatataggaaggcgatcatgcattaaacaaaaacgatgctaacattcaaagatagaaataaacaaaattcattatgtggtttggccttatgtgtatgcaacaaagttcttcattttaaagaaggtgctataactgtgtgaacagaactatgttcaaggcagccaacaaagagagttttgtgttttccccaaaatcatatatgattcataaaatcttgtttatttaccaaatactgtaaatgtatatatgtctacttaagaaagcagggatgagactacagccataccagctggctcctgctgtccatacgccgcaaaggaattactcctaagagatacattgcccatccaataattgggaacataaatatacttgtcttgcttataaacttgaaacaccttcctagagttagaagggtatagatatccaagaaactctgatggttcgcaacatagacagcagggctactattcggtggcaggttctccattccctcgacgtcaagcttgtagaacatggaaattgtcagagttgcccaaatctttgcaatgtagtgctgagctctcctccggtatcggtcaaataggagcacaagtggatgaaccacaaccatggcgacaaacaaaaagattgctgcaactgcagtcaccgcgtagaagcaaacccctctgacccttgaaaccacatcgatgtctggtaaccaaatcaacaaacaaaagtaaccacataagaaatgcaattctggaatttggtatgaatcccattagtttgtccatgaacatgattttatttgcatccgcacattacatgtaaactgcatagacatagttttttttttttttgttttgcattatacgtcttagtaagaaatatccattgccgctcaaattccatgaaacataaatgcacaatagctagttttagctgctacaagttctgtagaaagtcttaacaactgccagttatcctcaatttatacttacattccattgacaccttccaagttggtgtggagctaactgttataagccaacaatatgtcaaggtggttaacaagaatgatgtgctggcaatgattatgtttgatttccacaccttcagttttaaaattatagatggcaattttgtcactgcaggttcaaacgatttttctcccctccacaattccacattttgtcaagcaattgccaacaacgttccgaatgtaatgttccagcaaactacattaatggctatgaggccagcccagcgagaggaacatagcaacacattttgcgagaagagagtggaggaggctgcaaacctgagagcgcctgcggcgaatcccccatggtagcggcaccaccagcggcgaaatccgatctcaccacggtctccctccgcctcctccagctcgccgtcgccaccgcaacctgcggacccgggcggcggcgcacccgatgcggctggcactccacgccacggccgcggccaccgctcaccaccaccgctgcggaaaaaaaaaaacacccaaatcacaaacccaaacccaaacaggatgagaagagagatcagcgagcggcggggggggggcctctcgagaggcgcgtggctaccgtgcgcggtcgacggcgtggcgtcgccggcgccggcggcgtgggcgagcggacgcggccggaggagggtccccataggggctcacgcctcctcctcctcctcctcctcctcctcctcctctcgacggcggcgcggcggaggctttggatcagggggcggcggcgatggatgggtggattgggtagagcggagcggtcgccgttggccgccgatggcgatggagagctttggatgtatttaagcggatgataaaattcgttggaaaccaaggcgtcggtggcgaatcgcgatgcgaacgatggatgaacaagccgtgacgtctggaaaaattcagcaaatttgatccttgtttagattccaacaaaatttggccaaaaagatcgcatcaaatatttggacatgcatggagtattaaatgttgacgaaaaaaaaaaccaattacacagtttgcatgtaaattacgagacgaatatttttgagcctaattacgctatgatttgacaatgtgatgctgcagtaaacgtttgctaatgacagattaattaggcttaataaatttgtctcgttgtttacaggcagaatatgtaatatgttttgttatttgtctatatttaatacttcaaatgtgtgtccgtatactttaaaaactttgcacccaaagaacttaaaaaactttacacccatcaaatatatctgtaaggcctcatggagttagggaaaatttttgggtttggttgtcacatcggatatacgtacacacatttgaaataataaacgtagtctaataacaaaaacaaattacagtttctgccaggaaactgttagatgaatttattaagtctaattgatgcttgtatacagaccaatcattttgaaaactaagtttttttttcaatcataaaaaataaagtacaaaaaatatttaacgtttacgataagaatagcttcttttaaaaaggaaaaagtccatatgtacccataaacttttgatagaaattcctctagcatcatgaactttaaaattggatattcaaccccctaagttttgtaatgccatttatattgtggttttcgatagtggtttacttatttggcagcttaaatgactagttttgaatatttaatatagtatattgccaataatcgatcaccaatttatactatattgtaatgtgaattagtactattgatattcctatgtaagagagaaaaagaaaagggataaaatgattgcaacttaagacgaacgtgtagattttgtgcatctcacgttgtcaaactatttcagcatgtatgcaattaaatgaaaaccacttcaggtgtaatatgaataatataaagttcaggtgtaatatgaataatataaagttcagggagggagggagggttggatgtccgatattcaaggtaagatagactcaagtcaaaatttctgaggatattcaaacttttgttatgagtgtctacgtggtggacttgattttaccaaagataatgaaaacgtaaactcaaccatttatgtgttggagggaccgttttgtcttttgtgccgaagctatttataaagcacgggccgaaaccggtgaaaccttcagaaaattacagccatcaataatttattgagtgcttagtttaaaaacaaaggagacaatatacatagactagcctcaaaaagttatgctatcatgtattatgaacttgttactccaagattttataaaattattatgatattaaaataatggttaaccaaatcttgtagtactaaacaataaacatcatgatagcatggagtgtacattctaataaaaagaaatgctgcaatcagagttgcatcaatctccgagatcatgaaaaatcggtatttcaactagggacttcttaacttccacaaaacagagcggaatacggcatttgcaacagcacaccaaccatacacttctacacagaatttgatggccaccaaagtgagagaagacgcagatgatattgcattgctaacatgtgatttattctaagcttcatcagattaagacgtgtggtcacaaggtacaaactgtatggacgtctctgaataactgaaacaccacacactacactgaacattcatccctatgctgttgctactttacacttaattagagaaaaaaaaaaggagggctactcccatcatgctaagaaaaataacatcgctagatgagaagaaaaaattacacaaaacatgagcaaaaacaacaggggaaaacataaaaaaaaaaagaatgaaaccattgttagctcccaagcccactgcaggtcagagtatcagtccatctgcagagccccaggccaagacaaacacttgtgtgtatgcttttttgctgcaaagaggttgttagttgatctgtacaggcccctcttcactctttctatgaaagtttgcatttctcgataacttctgtgacagctgagtgcgtttcctctgtgatcatattgagctgcagatggaacgactgaaagagaaacatgatggattaataaatgatggaagcagaataagctcaggcagcttcagagttaatcaaaatgaacaaaaactagcagcttagataggcatgcactcaaccagtgtgggcacacaatattctcagagtcaagtcctaaatcgcaagttaagaaagagttgtgcctggagtgctaagccaagagggtaagaggttagatacttagaaactccctttttacctctatctgttgtaagagaacatttaattacgtagccaacatgttggcttgatttggtgctgtacttcaactgggagttatcaataacttaactcggtaccagattgtgtctctcatctcaagggtagtgataaaggtattacacaaagtttcaaatgtgacagcagacaatcttacagtgggagcacactagcattttaagggttaaaagtcccagccggaatgttttctccagttgagaaataaaacatcctgttactattcaaacttgaaacaagttcaaattttccttatttatgtgaaattttgcaaacaggcttcctggatgggaagtacaattatggtgacacctcacacctcagacatg

SEQ ID NO: 6181 - DNA, 3299 bp, Oryza sativa
tcctgcagccctgattttgaagataagcaactatggcgtgtctggttcgacaaaaggttttttttcttcgagttcttgcgctttccatcattaaatgaagttccccccatgacatctgctgcataacaaagtttcaagaacgacactaattaaacttatatgaggaaccaacaagataatctgggtcaggaaacatgaaatattaaaaatatcaggtagcgttttataaatattggtgccaccgtgtcaggtcaagttcaacatctgtagtgagacttgaatggcgaccaaactatattgaaacagtgcacagaaaagccaacgagttgatcaaacaaatttggtgtttgttattaccagagcaactctgttgagagactttagacgatttcggatatgtagagctggaaacaacagaagaattctgcagtattgaaagagctgcagcaaaacaaaataggcgtcagactgcaactttaacatactggatgtttaaaacattttattgtgttagcggacatattgtattattaagaaaaatacctgataataactcaataatactgataatgacaccaacaaaagaaagcgaggagcgtttcgggtacaattttctactcatattaagcaaatgggtctgcaagaagcaaaatgagtgtaagagtttatactgcttttcaggaaaaaaagaaaaatgttaagcagaaatacaaagtcacactgtttgcacattttgcacagaacaaatgaggggagaagatggtacagaagaagaaaatgggtactaaactgaaacagaatatataaggaacattaccttgttatcatcgcttagaaatgtggcattttccaatattttcaaacatttcaagaggagagcggcactttgcaaagatgttccttcatttaggtccaaagctgaagttgaggtatcctttatgagattctgatacacaaggtttccaccagaagtatattgttaatttatttattcagtttatcagcgtaatatgattgcattattagttgggggcataaaaagtacacagataggagcaccaagcagtttatctcttaaagggatacgcaatttactccaaagtttatgcaagaacagcaagtatagctggaaaagtaacatccaaatgaataatgtccacttggtgtagatatgtcaagtattattatcgtgggggatataatcatcagaggaatcactgtaagacactaacaccacatgcagaataaaaaagtattaaaaaactattttgcaacatgaaacaacataatttgtgatgcagccaattttccatgtcctgatgaaaatagttactacctcaagcattttccatgtcccaaaatataacaacctttggctatgtatctggacaagcattgctttcatgtggcttcaagcacattaaagctaaaatggcaaaaaggaacaaaacttgcaccatcctttagagttgaacaaaggaagtgtaaaatatgcgatgttagcgagatctcacctccaatgttgaatggcaatccatcataacgtcaaaaatactatcaagaccgcccaactcccttaatgtctctttaaaatttcctccgactctggacacagtgtcagaagtctctgtaacaatcaaatatttgataagggaaaaccttcctagtatgacaatggccataggtgcttctagtgcagtcaattactccaattcagttgtgcaacacggatggaagtcatcaatcaaaggcaggtgaagcaaagggctaagcaaaccacccatgaatattgtaaacaggtgctatgtaacttatggcaactgcttatttggctcataaaaataattataatggtcataaagggaaatcatgaccaagaaatttgattaaaacttaccctccactgaaacagcagacaagcatgccttttccattgtcaacaaagcaagccactttggacacagttctggccttgttgttttcttgtcatctttgtcgagcgacttgatctcttgacagcttaagagaatctcttcaacttttgaaaggatttcctctgaaatgcagtcagaatccttatttgatccattaagcatttgaactttactgattccaagaagtttggaacctatcgatggtgctttggaatcaacaagattcactggaggatttaataatttaagaagaaaatggacacaagattctgaatccaacaaatgattttcttgaacctgaacaacaagaagggagatattggagaataagcacaagtgaagttatgccattaaagaatacgagctgctagcaatattaactgaaatttacaccataaattaaagttcaacttcaaacaaaatgatgaaataaaagcatggactttcttaaataatcttctttgtaatcacatgccaagatattcatggaaaagtggtgaatacttatataactgtactggagaaataaataactttgccatgatgtgattatttttatgggctgttatataaaagaaaacaatcgatatgcgtaaaaaatagaatgaagcatgcacagaagcacaaggatgggattgagaggtactcacatcacttgccaaaacgaatagaagagcagctgcaccaatagtgcagggaggatcatcaatgttcaaaaccaaaattgcatcaataatttgttgcaccaatctataggatataagaaaagaggacacttgtgagtaagaaaacaaaacgcaatgtataataatttcattaacggaatatgtgtttgttgaatggaacaatttcagcaattgaatacatttgaaattcaacaggaaaatggatacaaataggaagtgtgctggtgcgtaacaagttgtacatttttactctcagcaattttatttgtgcacattagcataaatgggtacgaagtaaaataaaaagttgcaagagtccataacagttcaagcaatcaacctcctcacagaaaacatgtcatttgctaacatgaacttccatcaagtgcttcttttattcacagtagattgcgatgtttatacagctcaagtggaaattccacaaaagttttgtgaacattgtagcattgtgcttttggtttataagactctgcctaaggctctggctggcactccttaatctaaagcgattttgaacttttaagaataattttaggtagaactttacctgtctacttagcaatcatgaaaagagagccaggcaccaaaagtaacaaataaaagagattaagtaccaaatagaaactctcctgaaagttcaaaattgactgatctcttg

SEQ ID NO: 6182 - DNA, 4740 bp, Oryza sativa
taataatcgtgtccaactctaaaacttcttatattctaggatagagggagtatgtggtgttatccatctcactccttgctgcctcacacaggtaaatagaaacatcattccatcagatatttcatgattagtacatgtgcataataatacgttgagataagataatcagatcggaaaccattctatacaatccaatcttgttccataaaaaatatattgtgatgatcagtactgcatttggtaaagaacaaagcttcagacatatcttttgttcagttaaaaaacaagtcaaactattcaacacctaaacagtacacatagatgaaatttaatgaaaccctataaattgttttggatctaatgtcaaaattactgcctagacacattaagtttgaaactccagtcacaaatccctttatgatccgttagtagagataacgacaaacttttatgttttttctggcatcaacagcataacataattgcttgtttacagtctaggaaccacagtaaaaataattcggagaggtggcatacatacctcgctatttacacatacagagaagatccctcctctaataggactgtaggagaaaagaattccaacacagaatttcaaagctgcaaaatgcttcagcagctcaaagattctataaaggacttgtatttttcagggagaaacctataatattcttgatattttcccccagacaaaagatctataaacaaggaagcagtggatgcttcgagggaaaagtgcttctcatcaatcatggaaaggtaagtgccagccctggttatctcacctctctgcaacagttccctaacaatgaaatttagcatgccagagtcaacagtacagccattgtcctccattgaaagaaagagttgatccaattcttctagcaacccctgtcctataatattttcagccatcaacctgtacgtccaataattcggcactaaaccgttagacgagaaagcaacaaacaaatccttggcttcatcatttctgccaactttaagcaatgcatcaatcataatgttgaaagtcctagcctcaagcttcaaatccatcaaacataggttctgaaacatctgaagtgcatcatcagtgagtttgtttttgcaaagtccatgaaggattatgttgtatgtgctaagttcaatctgcgttccactttcggtaatcctgacatagagttcttttgcagcagcagttcttctggtttgaaataaaccttgcagaattatgttatacgtaataatatcaggactaacaccactgctctccatctccttaaaaagaactaacgcgtcttccatcctactaattttgcagtagccattaatcaaagtgctataagtaacagtattaggtttcaacccaactgagaccatgccagaaagtaacttcattgcttcatccatcttacctgccaagcaatatccatcgatgagtgtactgtatgtaatgatatcaggcttcacaccaatacgtaccatcaggtcaaagagtttttcagattctataaccctcccttctttgcaatgactgtcaattattgaattaaagaaaatagtgtccagacaaatgcctcgatccaacatttcaagaaataactattatatgtcatgcaatcaggcatgacaccattcttaaccatcgtggtaagtacctccatggcttgtccatagcttgacccttgcataacgcagcaataatagagctgtaggtcacaacatcaggtaaaatcccccggtccagcatttcatggtatgtactgtaagctttgtctgaatccccctctttgaagaagccattgatgacagtggtatacgacaccacatcaggtgggctacctcctcctcgatcatcagccatcatgtgcagcaactcgagagcttcttggcttctgttctcatcacacagcccgttgagaagattattgtaggagaagacatttggtatgcaaccgagctcggtcattctgcggagcactatgtccattgcgtcgctcgtcctcttgtcggcacagaggcccttgagcagaggagtgaaggtgatggcttccactctaaatcccttcttaatgacattgcccaaggccgcgaaaccgaggtccaagcggcccgcgcggcagcagcaaccgatgagaatgccgtaggtgcacaagtcgggagttacctcgtcggcgccagctcgggccatgcggttgtagcgggacacggcggccgcggggctgtgacgcgcgacgtcggcgagggcgcggttcaagccgtagatcgaggcgcccctgccacgccggagcaattcgtcgaacacgtggcgtgcgtcctcggcgccactgccccccgcgcggctcctcgcccttggatcgagccgtccgagcgaagggcgccaacagcgcgggaagcggcgcggcgcgccatgcccgccctagctgacaggtgcagcagcagcgccggcggaaaccaacgccgcaacgcagtttgtcttatacggagaggtgggcggcaccagtggaggatagaggggaggggaaggaggagatggcagggatggtgtaggagatcggcgacgagcagggcgtggagagaatgagagatcggccggcgacgtcggggcagggagatcgcgatcgatctcttctgcgcggcgctcttggggaaaaaaaagacagaaaaaaactaatgctataataatgattatatttattttaaagttccatgggagttataaaagatagttctgaaaataaacaatgtcccttctctcccaccgtaagcgacaacagctgcgcattttcctactgcgcgccgtgaaataatatgatatggttggatttaatttttattaaattaatcatgattaataatgctctttgaatattttttaaaattttcggagcttaatttctaattttgataatataaacaccttttcaacatttatttaaataaaattcccaatttctctatgggccattttcagtccatttactatctcagcccgcaaataaattctactttacctcctccaactcctcctctgactacgtttgttcgaccctccggccttccctcggcccatcaagcatgcgcggcctgaagatggaggcgttctgagccgtctgatctgatggacagcttggatcgcctccgtgtcgctgaagatacgaatggggaaaaacctaaccctccctcacatttccttctctctccatatcctatctcccaagcagcggcggcggcgccctcccataccacgtgcgatagcagcgacatcgttccccgtgagcggcggcggcggcgctcgagcggattcggcggcatcggcagcttcccgcgggattgagataagatttgtgtgctttttattattttttctgttctttttctctattttttggattgtctagttggatttcaatcggatttacggacgaaaatttaatgtgacgaaaggaaaattatgaatattttaattagttaagataagatttaggctatctcttttggtgatgctctaaaataaaagcatagtttaaatttgctatagtctgctacatcctcagtttcatattatatgtcattttgattttttttcgtaatcaaacttctttaaatttggctacatttatagaaaaatatagtagcattttaataaaaaaacaaacatattataaaaatatattccatgctacatttaatgaaactaatgtggtgcttaaatgttgctaattttttttctataaatttagtcaaactcaataaaatttgactaagaaaaaagtcaaaacaacttataatatgaaacagagggagtacgaaataaaaactactccctccatccaaagaggtaataacctattaccgaattagacattacatacgactacaaatctagatagcctaatcaaattcgtgaatccaaataatatctaatctagtactagattcttatattttggaaggaaagaagtacttcatccgtcccgtaatatagcaatatagtatggaacgagattgttatattatggggcggagaagtagtaaaaatgttattgcaagtttgcaactgtgccaaaaccggtgtggtgttgaatgaaacatatgttaacgtgataaaatgacattattaaactgtacaaacagtttaataaccgatgtattgattattgggtagttagtagtagtgcatgctaaataatgaacgtaagggcaagctattgctcgttgtgctctgtgctaaggggctcaaattgtggtgtagatgacggttcaagctaaagtttcagcagaggataatgagaaggatatcatcttaagatcataagatgtaggatcaatatatacctactgcctagataccttaagtttgaaactccagttacaaacccctttatgatccgttagtagagataacgacaaacttttgtgttttttctggcatcaacaccagaagataatagcttgtttacagtccaggaaccacagtcaaaataattcggagaggtgacatacatacctcgctatttacacatacagagaagatccctcctctaatcggactgtaggagaaaagaattccaacacagaatttcaaagctgcaaaatgcttcagcagctcaaagattctataaaggacttgtatttttcagggagaaatatatgatattcttgatattttcccccagacaaaagatctataaacaaggaagcagtggatgcttcgag

SEQ ID NO: 6183 - DNA, 3461 bp, Oryza sativa
ggctttgtatgacaagtgggtcccactttttttaaaaaaaaaagaaaatgctgactggattgctacgtgtacgccacgtaggacaaaaccgctctggattggatcgagggggtaattcgtccggtattgaaagtttgggatgaaaaatgtctggttttcgggttcgggggtgtaattcggtcgaccgcaaaagttcagggggtaattcatactttttccttttttctttcctttccttcgccgcaaagcactccaacgccgccgccccgatctcttccctccggcggccgccatgtcatcggcggcgaacgaattacttgttcagaccgaagagatgctgcagaaggaggcgaaatggatggcttaagtcaagctaattttagatatttattattttgtgtatttgagaggagcaatacctgtactttattatagcatagcaagggacggcttgttcttagatgatattgtggatgcatgttgattaatttttttctaataactctatcgctcttttcctaactatctgttctatgtaccattgatgaagcatatattgtgtcgctgtcatttggttgtttcatttgtaatattagttgtcaccgtagcgttagcacgggcatactcctagtgaggaggaagaggatttgcttcgccgcgtcaccgggggaggtgtcacgttgagattcctgctggggctggggttgggttgagattccccaggcgcccgcggcggcctcgatctgggcggcgcagatcagaggacggcgcggatcggcgagcttcgcactgggcacgtgtgcctgtgtgtgggagtcaggcctcgcagccgccgctgctgctgctgctgctgctgcacctgtcagctagggcgggcatggcgcgccgcgccgcttcccgcgctgttggctcggagggctcgatccaagggcgagggggccgcgcggggggcaatggcgccgaggacgcacgccacgtgttcgacgaattgcttcggcgtggcaagggcgccacgatctacggcttgaaccgcgccctcgacgacgtcgcgcgtcacagccccgcggccgccgtgtcccgctacaaccgcatggcccgagccggcgccgacgaggtaactcccaacttgtacacctacagcgttctcatcggttgctgctgccgggcgggccgcttggacctcggtttcgcggccttgggcaatgtcattaagaagggatttagagtggaagccatcaccttcactcctctgctcaagggcctctgtgccgacaagaggacgagcgacgcaatggacatagtgctctgcagaatgaccgagctcggctgcataccagatgtcttctcctacaataatcttctcaagggtctgtgtgatgagaacagaagccaagaagctctcgagctgctgcacatgatggctgatgatcgaggaggaggtagcccacctgatgtggtgtcgtataacactgtcctcaatggcttcttcaaagagggggattcagacaaagcttacagtacataccatgaaatgctggaccgggggattttaccagatgttgtgacctacagctctattattgctgcgttatgcaaggctcaagctatggacaaagccatggaggtacttaacaccatggttaagaatggtgtcatgcctgattgcatgacatataatagtattctgcatggatattgctcttcagggcagttgacagaggctattggatttctcaaaatgatgtgcagtgatggtgtcgaaccagatgttgttacttgtaacttgctgatggattatctttgcaagaacagaagatgcacggaagctagaaagattttcaattctatgaccaagtgtggcctaaagcctgatattactacctattgtaccctgcttcaggggtatgctaccaaaggagcccttgttgagatgcatgatctcctggatttgatggtatggaacggtatccaacctaatcatcatgtattcaacattctaatatgtgcatacgctaaacaagaaaaagtagatgaggcgatgcttgtattcagcaaaatgaggcagcaaggattgagtccgaatgcagtgaactacagaacagtcatagatgtactctgcaagctaggcagagtatacgatgcagtgcttaccttaaagcagatgatcaatgaaggactaacccctgacatcattgtatatacccccctaattcatggtttttgtacctgtgacaaatgggagaaggctgaggagttaattttttaaatgttggatcaaggcatctgtccagacaccattttctttagtagaataatttataatttttgcaaagaagggagagttatagaatctgaaaaactctttgacttgatggcacatactggtgttaagcctgatgtcattacatacaatgcactcatcagtggatattgcctagccggtgttgacgtaaaacacgaggcctgggagatctgcttaactccagtgcaggtccaaaactcgccttcgggtatgcttagcgtgccaattgatttgatcctgcaatcaacaagaaacaaagacaaagaaaccgcggttaaatccataaacgatagacgatcggctaggtgccgatgacatatcatttatctttgagccgatgtcatatgtgcatcgatcggcagtcattaataaataagaagggactaaatctattcgatcggctgtagatattaacaatatatagtccttatatcgatatatacttaaatcaagtgattgggatagatcggactccatgccgagacagtatgaatcacttagatcgaaatatatattaataatgagattatatacgttcatagcatagccgatcagatggatctagcatgtatcggttgatactccgatactactctatattaagatattaaagcaagtagaatatactaaacaaaagcctaatatacttaaatgcagcaatatcttaatataaagggcagatttaacatgtcaatcgagcatataggataaaagtagttaaatcaggtaagatcggctgaaaccccgatactaccctaatcggcaaccaaagacagactagagattgagattctaattacgactcataagatcaaactcaactgatgcagctataagtatgaaaagaaggataatatctagacaatcaagccgttggatatgtcatagagtggtggatatcctatataatctaagtcaacgtcggtatttaacctaatcggctgccttctagtaacagacgttagccgattagaggttagataacgatattgccaaagattatgtaagatatatgataactcgacgaattacataaacaagattagagtgtcataaagatggaagcactaatcccgagaacgcaagccgccataacaagttttacctcttgttaaagatcgaaaccgatgcagctcaacccgaaagcaagaactcgtcg

SEQ ID NO: 6184 - DNA, 46470 bp, Oryza sativa
aaccctaaccctaccaagcaagaaaactcagaacaagaaaacaaacacaagttggtaaatcataattcagaacaagttcttgtgcctaagatgaaggcaatagctacggattgcaacaccaagcatgctgttcgaaggtcaaatgccctaaaggtggttcatttcccacagaaatgccgattacggagccataatcgtacaaaatcccactgtttccgccaagattacgcagaagaaacaagaactggctgcccaatttcataaccctaacaagattcctcaccaagattgcccgcgaagcaagagcaagaacgcgaattgttattctttacttacagcgcagacaagtaagaaaaaaaaaaggagggttctttggtgtaccgacccctgggcccggaggacgcggcggcgcggcgcggaggcgcagatcccgagcagcgcgaggaagctggcccggcgcacccgcctcggcgcggtggcgcgcagcccgtcgagcgcgaagttcgcctcgtccacgctctccatcatctcgccgtactcctccgcctccatgagcgaggtggccgccgccgccgccgccgccgccgtggcgggctccgcgtagtccccacccccacccctcccccgccgccgccggggcggcggcggcgggtcctcgtcgaagtcccacatcgacgacgactcctgcgacggcgcgggcgggtgcgacgactgcgacgacgaccccagcaggacgaggtcgtcctcctcctccccgtcgaattcgaacgcgtcttgcgacgacgagaacccaccgccgccgccgcgctcccctcctcccccgtcggagaaggagcgggatctgcggccgtaggtgcgcacgatcatctcagctgctgctgctgctgctgctccgcctcctagctgctgctgctgcggcggcggcggcggcgcgcataggagagaggagagagagatttgggagtcgtctcgtctcgtctcgcgggggtggggatgtgggtgacgtcgtcgtgggggggatgggtttggatttggatttcgaaattttttgctgctgcggctgcggctgatccggatttgggaattgggaatcgggaaaaatggaggcggaggggagaggcgtgcggatttgggggaaatcggaggaggaaaccgggaatgggacgaggaggagggggagctgaggcgctgagctcggcttggctccggatgtgctcggctcggctcgtggcgttgggccaagctagctagctagccaagaaagggaaggggatttgtaaaaagaaaaaaaaaaggaaggaaggggtgggacccacttgcataggaaggcggttaggcggtgggtgggatggggcgcttcctagccgttggattgttggtgttccatcttggcatctcatgtgggaggatgacgagccattcggtgattttcgatttagttggtgtttgtatcgatcagtgttacgtcggatgtatactaattaaaagtattaaacgtaaactaacaataaaattaattgtataaatgagagctaattcgtaagataaattttttaagcttaattaatccgtaattagtacatgtttactacagcatcacataggctaatcatggattaattatgctcaatatattcgtctcgcgaattagtccagggttatggaatgggtttcatcattaatctatgtttaatacttctaattagtgtcaaatatccgatgtgatagggattaaaatttagtccttggatccaaacaccaccttagatgaagatgaagatattttagtccacgtaaaatgaaacaagttagtaatgattaattgagttttacttttataaaccctaaaagtaaattttatttgatattttagagtaagtttatatacaaaattaaaaaacagtttgaaaaacatgctaatgtatcatgtatcttgatgagaaaagaacataacctaaatgaagatgaagatattttagtccacgtaaaataaaataagtcaataatatatatgattaattgagttttttaaaactccaaaaatagattttatttgatattttaagtattttttatatagaaaattaaaaaacagtttgaaaaacgtgtaaataaaaattaagatagaacttttatcataatggacaaaaggatgtactagtagttgttgagccacagggaattcgtgagtagtgagaaccaacccgttgttgctgggaaattcgtgggaactatagtaccccgttgattgcatcttcttcaacctctcggtcaggttagtggtgctactgttcacgccatggttgacgctggtcaaacgctcgttttcttcaccctcgtcaacgtcccgtcttccatttcatcgttttgctccacagaccacagctgcatagagagttagagacccacctagttgtatcctcctgaaaaacctctacaatttctttctttttgccttttcaggcttttgctgcacggttctcactttataaaatggaggccagtttagggcaaagaagtgccaaaacctcactttaattacaaaaccgagtagtttctttatttactgctggcaaattttttaattgaaatgctttttttttccaaatctcactcaccttcttcccaaatcaaaattatatttcacaccaaatactctatttaaaagggtgtttagattcagggatgtaaagttttggcgtgtcacatcgagtattatatagcttatcgtataggatcaataattagtatttttattagtgcccaaacaccctgtgcgacactatatataatacccgatgtgacacgcccaaacttcacatctttggatctaaagcacccctcagtgttctaaacccccaaataaaccattagaaattcagaataagtcagccccgtacaactggtcgacgagcagcggcggtcagtgtagcacacacggtggtagctgcgtccagtggactcattctatgtaggcacccgatggccagtattttggctgtacgccggaccacgaaaaactgctatcgcctgcgcccactggtttctgccgtctgctggtttcaggatgcttcaggttcaggactttgcttgattgctttctgtttccgggagctgctactactcctgtgcccaaggagaaagaagttcactgtttgtgcagggaggtggagagggataactattctaatatcttgaaagaatattagggcctatttagttccaaataaaaattttcacgttgtcacattgaatatttgggcacatacataaagtattaaacgtagaaaaaataataattacacggttcgtcaggaaactgcgagacgaatcttttaagcctaattgcgtcatgagttgacaatgtggtgctatagtaaacatttgctaatgatgtattaattaggcttaatagattcgtctcgtagttttctggcggaatctgtaatttgttttgttattagagtgcatttaatacttcaaatgtgtgtccgtatattcgatgtgagatgaaactaaatatgcccttgattccttcgttgtttacatgtcatggttcaatattacggaaatcggcatgtattggggaatgattgaattgaaatttccgggaatttcgatagagaaattgaagtttgaatagatcttagctgaatttgaacaagcttttagcaaatttatcatttaaaaaaaatctaattagctgaaagaatatccaggcggagggaaccaaccgacttgaaaattttcagtcagaaatatgggacatatatactagagatggacatatagagttggagagctcagaggcagctagagatgatctttgatagggtacaaaactacaaattactcaaaaactctacagagatcatacaacttaaaagaaaaaccatctgtagttttcgatcacccaagctcttattaccaaaagtaatcccaaaaaagaaaacacttgagttacatcttacaacaatcccatattcccatcccatgatccaccagtgaacaacacaactttcactctgcaccatcatatcgtacacatcaagctgatcattaacagctaagtaattcgtgagaaacgcgtcctacaaattctcctccatcgatctttcttggtagagaggagaagaagaagaagagcacagcaaaatcctagacgaaaatcaatagcacatcactctcactcactgatcgtgatcggccaagccgacgagcttctcgctgagctcccagaccttcttggccttctccggatcggaggcctcctcggagagctggttctcgaacgaggccgagttgttgttccagctccagtacaccccggacttggtgaggctggggtcactgacgacctgggccagccgcttgccggcctcctcctcggagacgtagcccttggtgatgtacttctggaagggcgggaagaggaggcggaacagcgggacgtgctcccggaagaggcccgtggtggcgatgcacccggggtagagcgacgcgaacgtcaccccggtctcgccgtggtaccggcggtggaactcctgcatcgtcagcatgttgcacaccttgctgtccttgtaggccttggcgccgtcgaactcgccgccgtcgatcatggcggagctcgacacgccgtcgaggcccgaggcgagcccccggaggtcccccaggttcgccttcggcggcacgttccccgccagcgtgttcgtgttccctgcattcatcgtatcgaaattagaacgatgttcttatagtaacatgttacaatagaatgttgccgatatgctttcaaatgatatgatattttttttaaaaaaaagttacaactgcacttataaagtttttttttaaaaaaaaatcagcttatcgactttgtaatacttgattcattcgtttatactatcaaataattatcatacccattttagaaagcagtataaggttgtgccctccatgcacagaaaaataatccattaattaagtattatctaagaagaagttttcacttttagaggtttgtgcttgtgtggttagctcgtggttcttgaacgcacacgctggtgcgcatcatcctcgacaacttcctattatgtttttcttgtaactttttctcattcttaatacattcagaaggtctctttcaatcttcccgatgaaaaagaaaaacttaaaaattggattaatcacaacaacttcctataattttttttataaaacatgcaatttttagcagttcagtaattgtagtaattgtgtacgtggagaactacaaaatagtagaagttggaagctttgacattagaacacaacagcctaattctggtgaggaagaaaggttgtcattaccggtgatggagccgacgatgatgaggcgcttggaggggtagtcggaggaggtgaggtcggcgaggagctcgcgggcgaggaggaagtgcccgaggtggttgacgccgacgctcatctcgaagccgtcggcggtgaagctcggctgcttggcggtgggctggtacacggcggcgttgcacaccaccacgtcgacgggcatctccagccgccggacgttggcgacgaactgcctgacgctgtcgagcgacgccaggtcgaggtggacgatggtgtagctgcccttctccatgccggcggccttggcggcgcgcgacgccttgaggaagtcgcggcaccccatgacgacgtgccacctgcccgtctccgccagcgccttcgccgtcgcgaggccaagcccggacgacgcgccggtgatgaccgccgtgcccttgcgcagcgtctgcttgcccgacggcgacgccggcgtcaccgtcggggacgacaccgccgccgacgcctgcgcgcggatggccaccgacgacgtgctcaccctctgcaggagagtttcagttttcgtggcaacaatgtcaagatatatgaacaaactaggcctttgtttttatataaaaaattttttggccaaaaacatcacatcaaatgtttgaacatgcaagaatattaaatgtggggaaaaaaataattgcacagtttatatgtaaattgtgagacaaatcttttgaatctaattatgctatgatttaataatgtgatgctacaataaatatttactaatgatggattaattaggcttaataaattcgtctagtttacatgcggaaccaagtttatgaaattacagggagcaaacttgacagtcttgcagtaaaatcaagtttatgaaatcgatccacatcaatatgaacttgaaatgccaaagctaattaagtagtagtacaattttttgggggtgtggcgatgtcagagttttgagcaactatttctaagtacagcaagtaaaccttgcaatcttgcactaaaagttacccaaattcgcatcactttgcaatgctatatatactcaaactaacactgacataaaatccagatcaataggaagtcaaaatgccaggctaatcaagtataatacaatttttgtggcgctgtcagagttgtgagcaactaccatttctaagtacatcaagcaaaccttgcaatcttgcactaaaagttcgtcaaaattcacatcagtttgcaatgctagatacactcactcagcaagtccaaatgtcaacctgaagttgcaaattaaccagacacaaaggctacttggttgcactaacaatggcggcacacactgatgttactagcaattagcaaagctgcacacctgtgaaaacaaaacaagcccctgacattgtcatagctaaaacgatgagagaatcatcatgatataatctcattagccagttgattaatgccaaacacaggcataaccatttgcaacgccacgggtgctcctaatctgacagagcaaaccacagagccacagtggtaagctcctccaacataactgaaagtctgaaactaataatcgtgaagtctagaaacgaaaacctggcaattcactgaacgaactagccaattacttgtactactcgccagttagtagtaagtactaatattagcactaacaaacagagcatcagcacagagcaagcagagtgctgtaacaacattattacagttactaccttggtgcgaaggccgagagcactggtctccagcttgagcccgtcgccgagacgaacgcccaagaacgccgagtccttcaccgctccctacacccccaaaaaccaacccaaaaacaaaaaaaaaaccatttaaccaatcgccgccatgaacacgaagcaaaactctgaactagtctgaactctgaaatgcctccatggctgaatccccgagcttagagctctcacctccttgcgggcggagagcgcggaggggaggaaggaggtggtggtggccgcctggagagccatcggagatttttctctcttttttttcctctgcagcgaagtgagtgaggctttggggggttggggttctaagctagaagaagaagagagcgaaggagattaggcgggcgttttataccaggtggcgataaggcgatagggggaggagtgccacgtggcgccgagctggcgatggcccggccaatggggtttcgcgggctggatttcccctcaacgggatatttattttttattattattgtttctcgtcgtttttatctcctctatgtgcgctgatttttttttttgggtgtatgttggtcgctgtttcggttggggtcgatcgagatggttcgagtgagttgtgcgtggatggatgggccggttttgtttggtctcgccgtggatcgcggttgaaggaccagtatctgggaacggatgagatatgggcctgttcagctgcttgatacagcccctgcaaggaataagttcacttcatgacccttaaaagtgatcgaaatctaattcgtatccctaaaccataaaaaccataaaaccggatatctcgactcccaaactcttaaaaccggtgcaatttgactccctggacgattttgaagagtggtttcgctgacgtgacgcctacgtgacagtattgactcggtcttctttccacgtggcgttaacgtggcattagaaataaaaaaagggactgcctatacatcatgcgatagattttctagccccctatcatgcaaatttttcaagccataggataaatttaatctcatctatttaaatttagggagtaactattaaaaaaaaagttggcatgtatttacattgtaagttcctaaaattacatatgtaattacatatgtaattttagtgtatttatgatgtaagtcataaaattacatatgtaattttagtatatttacgatgtaagtcacaaaattacatatgtaattataatgtaagcacgatgtaattagtaagcgtggatcataagcaaagtagcagtagaaaacactgctcaaatgcaaggaaaaaaagcaggcgtgtgtttcgaaattgaacggtaaatatgtgagacccacagaacgcaacaacaaagtccacataatgcaacaacaaaagctcggtccatctcaaagtccacagccgtgtatgactttgctcaatccaaatgcagcactaattgtaaacagagatgaatggtcaaaaaagtgaaagatttagcaccctatttttttttttgtcaacagagcactagcgattccgataaaaaaatgtgcgagagcactagcgattccgataaaaaaatgtgcgtgacccattactcattcacacaaaaagaaatgtggacccattgacatgtgaggcccacatgtcagtcctctctttcaccttccttctttctcctccctctctcccttccctctctttctctcccctttcttcttccacttccttcccggcaccggcggccggtgccttctccaaccccatcccggcgagagcgcgggcacaagtcgagcagcaggtcgtcacccacggcgctgtcggcgacgccctccacgtcggcgcggcgcgcggccacggcgggctcgacttcttcgtgtcgcgctcgcacgccgcccgcctcatcgacctcgtcacctcgctgtcgtctgcccgtgtcgtcacgtccaagcagctcgtctcgcacgtgaagctctgcctggtgtgccgcgacgacctcatcttcctcccatctgcacattgctgcaatcaagcaaagaaagtagcaggacaagcagtagcagagtaaaagagaggacgaggcttcattgaagtcacataggctagattctaagggcattagcaattcgtccgccctcaacaaggagccaaagcctccacgtaggcaaaaagcaaaacgaggctttcatctccacaatgcgcgtgtagctttggataggccgcatcggcatcgctccatctccaatctacgcgccgccgctagcttcttccccagcttcccgcttcttccgggctccggccggcgcccctcatctcctcccccgaccagcgcccctcccgtggccggcgagcggacaagctctgtggcgtggaccgcggagactacgcaagagaggcggcggaagcctggcggagaggcgacggcgcccgggcggagaggcgactgaaccggcgacagcgccggccggagcggaggcccagcccggggctcgctagatctagcctcgggccctctccggcgcggatgcggcttctctggcgacctcagggtggatatggctcggacgcccctcctatcccgtctccggcgagcttctccggcgcagatgtggctccctatcccccctctctctctccggttttctccaaatgggcggatgcgattttcctggcaaaaagttgatttctctgacgaggtcctcggagccaatgttggtcacacgaacctggagaaggagcggtccccactcccctctctcctccatgcatacactttatctaggtagacaaacattgccacacgccacgtgtgtgcactgtgaatggcctaaaaagtccccggccattgtgcttcttcaaagttgaacctcgactaggagtaatgttcaacttctgagcgtaagatataagatattaggcctgagtaattagttgggccagatgttaggtctagcccatttagcgcctagggtttagggagcaatatatttatgggtgttttcgggtgcctctttttctacccctcgttttccgcgcgcacatttttcaaattattttttgcaaataatttctatatgaaagttgcttaaaaaaattaaattaatccatttttttaaaaaaaatagttaatacttaattaattatatactaatggagcgctactttttccctgtgcggagggttcagtttgggaagtagggacagcgaacacatatcttctcctcttcctcgcaccggccgccggcgcaacacatgagttagggtttcgacatttttgagagggagggttcagggcgacggcgcgggcgcgatgccgttagagatcgaggggcaggcgatggcgaggtcttccgtctggaagaagaagaagcgcgccaagccgatgcctgacaagggttggaagaggaaggggaagggatcgaagaagaagaaggcgaagctgcacgacgtcgacgacgaggtcgtggtggcggcggacgccgccggatccaagtacgaggaggctgccacccatccgcctgggacggagacgacggtgacgatggagctggatctcatcgaccactatctggtgggcgagctcgtcgcctacatgacgggcgcgttgctatgcccgatccttcacctcaagtccatgaactgccccttcgtcgaccccaggcacctcgctcctgtcgagaaggatgtagaattctccgccaacatcctcaagcaacaccgcctcaccaacggccccgtcgagctccagatggaccccatcaccacctccgatgaccatgaccaccacgacgacgacgagctcatcgatatgaggggctggataaactggaggacaccggaggagatgaggaagaggatggtcgaggaggaacaggaggaactggaggaccaagcttaaggaggaagcttaatttatttaacaatctgcttgctgtggctttgtaatttgcaagtttctgctcatcattatactagttatatattatactagttctgctcatcattatgatgtaatcttgcaccttatatcttgctaccggtgattcagatatatcaagttaaaaatggatgtagccactctctgctacttaaatttgttgtcttgttgctactacctccgtttcataatgtaagactttctagtattttccccattcatatagatgctaatgaatacgagaaatactagaaagtcttacattataaaatggtggaagtatctattaatttatcgtcttgcattaacaatttttttgggtgcaaattgagccgttttttttgacaaattgacccttttcaaaaacttatttcgaaactaacccctgccaaaaacttcaaccaaaactaggccgtcggctcagcgccaagcgcattggcgctgaggttggccgtgtcagcgccaacgggactggcgctgacattgtgccaccgtggcggccgggccgatcccctagctgacgtggcagctacctcagcgccaaccgcttcggcgctgaggtgcccaacctcagcgccaagtaagttggcgctgaccttggctacttagagcccggccgaggccgccccagccagttcttcctccgttttttccccagccgcccgcctagggttcggtcgccaccgcgttctcctcgcccaatctcccccaaaaacctctctaatcgaaggtgatttgtgcggcattgagtttgggatcggaagagaaggtaaacccttctataaaccctaagttccccaaagttttattggatattttgcattgttttggttgtagacgtggtttgataatagttggctaaggatggattattagatggataatatgggtggggatgaagtgtggaggtggcatatctttatccatttggttgttattgatacatttgacaaaatatatttgggatggatgtttggtgatgcgctagggtttgatgggagatggatgtgtggtgatggcctaggatgtgggatggatttgtggtgattgagagggtttgaaaggggttgatgtgtggtgaagggtaggtaatttgtaggagtagagtttttttttatcaataatgtgtagtatttgagtaatgtacttatttattggaaaaattagacatgttgttagcttttgaagtattggtattgcaatggtaattacatattattttcaagtaattaatgtttatgcatgggttaaaaattgtagatggatagattggtccggcttcattatggtggttgtgtggtagatgaaagtacacatggaagccaatttgagggaatgacagttagacaattagtgttttttgcgaagcctacctttgaggagttaatgtctcgcatcaagcatgaattggattggaatgatgagtcggttggtatgcaagggagatacgatgtgggcggcggtgtcatgtcacataaatttatgttagacttgaatggagagatcgaatggcaaacatatatagatatagtattggggtcacatttcaaatctcttgaggtgtttgcatggaagaaagatgttaggatagggaagaaagaacttatagaccttaatgaaagtccactcatagaatcacccattagctgtcacgaactgtcagagaggtgtagtaggaaggaagaattgattgaggaagacgtggaggggggcgagggagtaaatgatatggcggatgtggaggtcagggaagagaatgacccggtaagggaggaagtcatgcagaggagaatgtgccgttaagggaagaagtacatgcagaggacaatgtgccgttaagggaggaagttaatgtggaggagaatgtgccggtaagagaggaaggagatgttgaggatggtcgggaggtaggagatgatgtggagttgcctgaggaagaagcgaatgctaagaatgtaagtatgggcctaagggagttggctaggctgaaattctatacccgagaggagtgtgaggaggctatgatacgcagtggattgaacccaggctggttggagtatgatacagaggatgaattggatgagtccgcttccgactccgatgatgatcgtccagtgcgtaagatgtcagagcatgaaaggattgtgtttgcgaaactggtgggtagaaacccggaaataacacaattcgaggatcttaccagatctgggctagcaattgctgatggggatccacaatatgacggtgccttcgaaccaatgtgtgatgaaccaaggaaggggttggagtttcgatcgatggatgatctgaaaatatggctacagagttattctatccgtgtccaccggccgtaccatgtgaaggaatctaacgcgtcagtaaagtatactatggcttgtctcgatcgccattgcaaatggcagattaatgcaaggaagagtggaggagataggtggcgggtgactagggtgggcgaagaccacacatgctgtagtgcggaagtaaccggcaagcatttgcaacttacttcaaggtttattggaaacaggttacaggcatttgtgcgagctgaaccaactttatctccagcagcgattgtcgaggcagttgagcaaatatggcactatcggcctacgtatggcaaagcatggcgtgctaagcaagttgctatgaaggtcatttggggatattgggacgaggcgtatgttcgcttgcctacactgatgcgtgccatcaaagcaaagaaccctaccatgcatttccgtgttgaggctcatcccgagaagtccaggatggtggatggagtacagaagcgagtatttggacgtgcatattggatatttggccagtccatagaagcattcaagcacttgaggccggtgctagcaattgatggcactttcttaaccggtaaataccaaggtacattgctcatggcaataggggtcgacgccgggttacatcttgttcccttggcgtttgctctggtagagaaggagaatacatccaactgggagtggttcatcaacatgttgagaaacaagttgatcggtcctaatagagaagtgtgtataatttctgatagacaccctggcattttgaactccatcatccacatcatgcctcatcacctaaccattcaccacaggtggtgcatgaggcacttctgtgctaacttctacacagctggagctacgactgatcagatgaaagatcttgagcgcatatgtcaaataaatgagaaagcattgttcctagatgagataaaacgcctcatgggtgtggtcggagagaggccaaagaagtggctagaagaccatatgccacttaaggtcaaatgggcaagagcatttgataccaacgggcgctgagtgtcccacggtcagcgccattatggctggcgctgaggtcccagcccgcaagccatccagaaggcttgctgggctgggccgtttcggctgggctgggccatggccgaaacggccaagtcccacctcagcgccaggtgggctggcgctgagtgtcccacggtcagcgccattatggctggcgctgaggtcccagcccgcaagccatccagaaggcttgctggtctgggccttggggttgcggccaagtcccacctcagcgccagtccggttggcgctgaggtagctgccacgtcagctggggatcggcccggccgccacggtggcacaatatcagcgccagtctcgttggcgctgacacggccaacgtcagcgccaatgtgtttggcgctgaggcgacggcctatttttggttgaagtttttggcaggggttagtttcgaaataagttttctaaaagggtcaatttgtcaaaaaaaaacggcaaattgagtgcttgctggggacttgagaatgactggtgtttatatatatgtatatatatttaacccagcatgctgctatggccaactggaatcggtatagctcattactcaagacttgtatttgattaatttactcttcttccatactgtaccttgtgctgcttgcagatttatattgaggttcagtcagtggtcttaaagtgacgccaagtcatttaaggactcgtataatctttactgtcttattgccacgcttttaatttccctcgtgtgtcatactcaacattatgtacatggttcatgccataacatatttcatctttttgttttggcatggtcctttaagagcacaaggcttcagaagcacaaggaagggcaacaccgaaggcaaggagagcttgatcacaccccgcaccacctattcatgtcacaggcagcagatttcaggttggctagcctttttccctttgtttttgcatgatgatattttagcaaatcaaagtgcccgattaatattccgattctaccacatcgcacacatcggaaacagaaagaaagaagtttctcattccgtgcttcatttttacttcctccgtttcgttgtattgtagggcgttttgatttttttttcctgtagtcaaacttttttaaatttaatcaagtttatagaaaaatttagcaacatctaaaacacgaaattagttttattaaacttaacattgaatatattttgataatatgtttgttttgtattgaaaatgctactatgtttctctataaactcggtcaaacttataaaaaattagtatgaaacagatggagtattatgtttccttctgtcttggattttcatgttatgaattgaagttggttggtcagtgtcaggaagagaaacttgaggtttttgttgaaatgtaaaggggtttattgatgttttcttttaggtaccccttaattaaattaacttttactcttattagctgacatggtgttataagtacagggtggcacatgctgaggaaccaaagatggcaactggtaaagaaatgtcaggatctatgaggtcagtatggtctttttgcctctatatctttctatttagggtacccggtaccaactgatgtcaggctatatctggtaaatgaaagtgggatctgttttgcattgtcatgggaagaaagtagtgaggttctaagattggtgcatatccttattgtcagtggcggatcttgatactttttaaagcccgggcaaatacatatgtgaagaattatatacactgttaatcactgaaaatttaaggtattgtaatggtgtgatccgccggtgagtccaggcagctgcccggagttgccggaccttggatccgccactgcttgttgtccagatatattgtcataattgctaggtgaagctgaaaaaaccaaaatgttttcttttatggatctgtggtagtctgccgtcatgtggtttatcttatctacacggtttcatataactggtttctgctctgctatgtataattcttctatttaaatgcatcatactgatagtgtttagtggtatgacacgtgagaataatcagatttgtgagttaatatagaactgtgggctgcaaaattagtcgttgagcatttagatgtttctacgcctcgcaatggcacgtgccctatcaggtaacaataagcatgttgtagcagacaaaaggatttatattttcacttgttgacaaattagaatgaactatagaaaaaaatagtcgttggttacatggagcattgtactcgatgcagaacaaccttaatgagagcgaatgccattggggggcagaagaacatgttggtggtgttcttttcttctaaaaatgaagatgaagatgatgattaagttttttacgcaaaatgaggtagtattaacgtatgattgattgagttttaattattacaaacttgaaaaatagatttgtatgatattttagagcaactctcttgtagaaagttttcgcatgaaacgcactgtttagcagtttaaaaaatatgtcacgaaaatcttaatcttcatccaactttattggaggaaagaacatgaccaagttgtgtgattgggggcattgagagcgaatgcacgagatgattgcgctgttatttcagtatgacatcccgtgcagaccagaacgtcctacgaatgtgctgcctatggtggacctggtggatggaatggtaagaatttgatatgaatgtgttctgctcaaccatctgagagtttcaaactgatcaacagatgctgttgaacatcaattgctttcttcagagctcacacaatttctgtcaattgtgcagcactcgtcgttcgcagctcagggtcagcattggtggtgcctcatgactgcaagcgtcttgacaccaaactaatcatagagagcagtacagattagtacgtgtctgcgaatacagcctaaatttatcaggattcaggaagaaaatgtttggaatttgcaaaggatttgtagagctggaaatgggatgccatttggttatatgcagaaataagctgcaagcctataagcgtatatgtaaggtgccatcaaatgcggtgtatatcagaagtttgtaacgaaagttgcagcaataaaacggtactcctgccactatcttatatatgtgttagtatgattattagtcaagagttatcgagtttgattttcctcaaaagagagagggtgccatgtaattcgggacggagggagtatggctttgtttagattctaactttttattcttcaaactttcaactttttcgtcacatcgaacttttctacatacgcaaactttcattttttctatcacatcgttccaatttctttaaactttcaattttagcgtggaactaaacacaccctatgtcacattgttgctagctctgctctagctgacttccttcgcttgaagcggaaagcgcaccaatgagacattgtcactagctctgctctagctaacttccttcgcttgaagcggaaagcgcaccgatgcactcatcgatgatcgctcgcatcctggagggctcgaacttcttcccggtggtagagcacggctcaaacatacacatcggcgaacaggtccagcgcgaagcacgtgctcaagttctgtgagttcgatggcaaagaggacacctcacgtagagaaccctgatggggccaatgcgacatagatggtgttgtccgaaacgatggcggcctgccaccagtcgcctttgcccctccctcaccagcgatcgggaacggatgagagagagggaagatgggagtggaataggagatgggaagaggggaggctagaggaataagaaatagacctgacacgtggggcccactcaccacatcggctaaaatcaggctctatactgcttggaatatcgggtacaccggttttgcaagtggagggcctcgttatatgtacaattattacggtttgaggacgaaattagttactccctccgtcccataatataaaggattttgactttttacttgcactgtttgaccactcatcttattcagaaaatttgtacaaatataaaaaagaaatattgtgcttaaagtactttggataataaagtgagtcacaaataaaagaaataataattccaattttttttaataagacaaatggtgagttaaaattgcttatattatgagacagggagtatttcaacgtcaagacgagagatctaaagtgaacttatccctatatgtaattagttggacctgtgtggtaaaggtccagcccatttagcgcctagggttaccctctcctctctacctcgcagtggccgccgccgcaacgcatactcccttgtcctaaaaaaaaaaaagacaaacactggatttccgtgtcaaacgtttgactgtccgtcttatatgatttttttttataattagtattttcattgtattagatgataaaacatgattaatactttatgcatgacttgtcttttaattttttttaaataagacggacggtcaaacgttggacatagaaaccagggtttgtctttttttttttgatggagggagtacgtgagtgaagggtttcgatagggagagattagggcgacggcgggcggggcgcgatggagagggatgagatcgagggaatcggcaagctcaactcccctgagaagaagaaggagaaggagaagaggaggcgcaagcacaagcccgacgaggcgaaggaggagatggtggtggacgccatacccaaggaggaggagaatctcaagtcccccgaaaagggatcaccgaagaagaaggagaagaggaggcacaagcacaagcacaagcccaagcccgacgggacacaagccgtactcaaggaggaggaggagagcaacagcaagtccaaggccccggcggagggcgagaagaagaggaagaagaagaagctggtgacggtgaagctgagcgacgagctgatgggatacctgcggaccaaggaggtgatggcctacctcgcgcgcgagacgcctcgcccgctcccgatcgatccgggcgtcgcgcagcacatgttcgtcgaccaagaactcaggcaggaaatcgccgcccaggttcacgagaacagggaattcgacgccttcgtcctctaccagtaccgcaccaagggctacgccgagatccagcaggaggtcaccgacgacgacgacgacgacgacgaggtgtagctagaatcttgcagggaatcaataatggttggtggtaaggagcaatgatctgtgatccagctaaatatactagagtgcttctgctcattaatcattattaggatattactatgtctaatggtgttattattattgcccgtatctttgctacttgtaactaaacgtgtgggaatcacaagtaactgctttcgtagttaaaccgagtgaattgctaacgtattggaatgaatgggattgcaactgtgatttgattctgattggcatagtacttgtcatagtagttgtgatcctaaatgtgaatgatcttggctagctaacccgaacgcttcatgttactctctgtttgtgctaaaagcgattcggatttctactatttatgacttgttaccttcctgatctcgttaattctctttttgtgtgatcctattcgaattatgtttgaaaaacatttcaattatatcgcctcatgtggccgtatctcattcagagcagcttcttctataatgctgtttttctctgcgcttttgccattcatctattcattttgattaatcttcaaatacctcagaagtgtgaatcttctgcggtattgttcttttcttcatgtgccaacgcagtgtggtttggtgctttttttcatattgtagtagatatcactctcccttggttatacaatcaaggactttttagtggaggaaagagtaaagattccattcttttgtacatttgtttatagaagcaatacgtgtgctgcaaaactttgtgagccttatgcatcgtactgctggctaaatgttttcatgtctaatgaatagtacactagaatgagaaatgccatgaagacctacagtaatattatgttgtcactctgtaaatgtttggcttgctgtaaaatcattggctgggtcgaaggaacaacgaagcattgttgattccctagggccccatgccttttctgtacaggggataagaaaatcttgctacatggttaacaagccggagaacaactgatgacatcactgacaactggggcaggttctgctcatcttctctgtagtatcatttacataatacttgagtttttcagtactccctcgtttcacaatgtaagtcattctaacatttctcatatttatattgatattaataaatctaaacatatatatctatctagattcactaacactaatataaatgtggaaaatgttagaatgacttatattgtgaaaaggaggtagtactgatcatgattgcgctgttatttcagtatgacatcttgtgcagacgaaaacgacaaatgggctgcctgcctatgctggacctggtggatggaacggtaagaatttgagatgaatgtgttctgctcaaccatttgagagcttcgaaccgatcaacagatgctgttgaacatcaattgcagatcctggcatgcttgaagtgggcgatggggagatgtcttaatcggagtaccgctcacagttcagtatctgtgggcacaatcataggtaccatagcatgttttgtgtactaacagttttgctgcaatgttgaatattttcttttgttgcatttcctcacagcaagctttgcttcaactgttcaggctcctcttttgattggatgtgatgtgcgctcaatgtggccccgtttagtttcccaaaaacatcacatcgaatctttggacatatgcatgaagcattaaatatagataaatgaaaaaactaattgcacagttagagagaaaatcgcgagacgaatcttttcagcctaattagtctatgattagccataagtgctacagtaatccacatgtgctaatgacggattaattaggctcaaaagattcgtctcgcggtttccaggcgagttatgaaattatttttttcattcgtgtccgaaaaacccttccgacattcggtcaaacatcctatgtgacacaaaaaaattttctttttggaaactaaacaggcccgagccagcagatgaaagacatactcagcaactgggaggtcatcgttgtgaaccaaggcaagccttctctttcacatgcttagatctagccatattctttgatatttcaccatactcatataacaactttgtgcagacagactaggtgtccaaggaaagaaaatgcaagctgacaatggattggaggtaatccctgttcatctgcatcagtggttttcaagtttcagccttgtctttgttccatgctctgaagctggcaatactgtgttaatttgtcgataggtttgggccaggtcactcagcaacaacaggaaggatgtggtactctggaacaggccatcactgcgcattggtcgagcattggactcactgggtcagtggctgtcactgctcgtgatctatgggcggtaaacttgctttcttcagagctcaaagtacaacatcactcttcagaattcagagttcataacatttctctcttgcgatttgcaaggattggtagagatggaaatggatgccatttggttatatatatgcagaaataagctgtaagcctgtgcatgtaaggtgccgtcaaatgcggtgtattgctgaagtttgttgtgaaagttgcagcaacaaagcggcattcctgccactatcttataaagaaatatactcgcctgaagacaaatctgtggcaaaagccttcacagtaaagagttgagacattgcaagacatcacaactagacagaatgcaaaacacattgtggatcaaaacaatatcagctacaactaaggattgggtttgcaccagccaaatcacctgcatctgttgcttcaacaaaacaattaatatccacgaggctgccgtctccgcctccccgcccaccggcgtcggaaggatccagtccgttggtcagtacggccgtgattcaaggggcccatatctgtcgggccggaacgggactctgacttagatgtgcccatgttatttggtctggaagagattttgatttggaataaatccacttcgactccattagctagtgagcgaatctgattggaaaaagtatacccaaggtccctcaacttgtcatcgaattgcaaaatcgtcctccaaccgtaaaaccggatacaacttataaaaccggtgcaaattagactcctaggcggttttgactccggttttatccaacgtggcagctgactcagcatgggacccacgtgggtcccatatgccagccccttcttcccctccctctcttcctctctccttcttcccctccccatgcagggcagccggccggtgggggagcgcgggagaccggcaacgggcgatgggcgacgaggcggcagcagcgccgcacggcctcctgcgcccgccctcctagccaggggagccgggggaggagctgggtgcggccgtcgggggcggagcggggctcggctggcggggcggagctgggcgcgggcggcagccggtaggggaggagctgggcggctgcggggggggagggcgggcgcccgacggcctcgatgacgtcctctggccggcgacatgcccatcggcgccaccctcacgaagatggtggccttcgtcgacgacgacttcgaagtctacaccgtgcccaggcccacttcgacctctcgctgcaagatgccccgaatgaaactcagcagctagcctataaatagtcctgacaaattatgggccaacacttcttgacaaaaaggccattaaaaccatcaggactaggaggcctggcaatggacaattttttcacataaaaagtgcaccgaaggtccctcaacttgtcatcgagttacaaaatcgtcccccaaccacaaaaccagatatatgacatctctcaagttacaaaaccgttcaatttaggtccttcggtgattttgatcccggtattgtccgacgtggcagctgagtccgcatgggacccgcgtgttagattgaccacgtcaccacttcttaccctccccatcaactcacttcctctctccttccctctccatgggcggtggccggcgaagagcagccagggcggcgcgacaggacggttcggcgggcgcggtcaccggtgcagaggagcacgccacggtcgggcgtcgccatggcctctcttgtccccgtcaaagtcaccccgctcgacgaggtcggcggcggcgagcatggtgtcgcgtcgcggcgtgccccgttgaagtcaccccggtcgacgaggtcggcgcacgcgagcggggaggagcgtcggtggtgggaccacaggggtagagcgaagggggagctggaggggaacggtggtggcgaggtggaggaggaggatgccgctccgacgaaactcccattcagggcgagggaggagcggaagacggagacggcgacagcgggagggaagtggggatggaggcggcgaggagggagttggccggccgacgcgttgtcgccgccgccgccgccgttgtccttccggccgttgctcatccgcgaggccgtccccaacaagccgccgctccggccgtcctcccccgttccagcgccatggcagccagagttcttcggcgagggtatcaccgtcaacggcaaggcctggccgttcctcatcgtctaccgccgccgctaccgcctccgcatcctaaacgccatcaacgcccgctacttcaacgtctccctctctaacagcttccccatccacgtcttcggctccgacgcgtcgtacctctcggccctggacaccgtcaccaacctcctctccctggccgagatctttgacgtcatcatcgacttctcctagtcgccgacggccgagatcgagttgctcaactcggcgccctacccgttccctaccaacgccgcccccggctcgctcaatggcagggtgatgaagttcgtgaatccgcccgcacgcggctcctcccaccgccgtccgccgcacgcgcatgcttccacctttgcgcccatccccgcggcgccggcctgcgcccggcccgccgccgcagcgtcgccacgccaccccgccgcctgtttcctacctcgccctgccggccggcccgcacgaggtgagcggggaggccggcgaactcgcgcgcgccgctgtgggtggcagccctagggccgtccccgtgtgagagcaaagagagagcgagaggaaggagagaaacgaaagagaagaggggaaaggtgagtaggtgttgacgtgtggggcccacgtgggtcccacgctgagtcagctgccacgtcggacaaaattggagtcaaaaccgccgagggatctagtttgtactggttttgtaagttaagggatgcgttgtatccggttttgtggttgagggacgattttgtaactcgatgagaagttgagggaccttcggtgtactttttccaatttttcacaatattatcctagcgtgggccgtgggcgtgtggcccatcactgggccttttccaaaccgacttttggcagctaaaacctgtcggtgatcgatccgagccgcgtcgtgtcgccttgcctcgcctcgcctcgcctggacttcgacttcgccaccgtcgagggcaccggagatggccaaccaccgccgccaatgggcgtcgtggcagacgttccaccccgtccacccgatggaggatctcatgcccggcggcgtccgcctccccgaccccgacgagcagccaccggaccccatctacgccttcctcgaggtgttcgaggagctctacggcgaccagttccctccccacgtacgccgtccgccgatcaaaactcgatcgatcgattgattttggcctttgatttgctcatctgcttcaattccacaccctgcaggttctcctctacgactcgggggatcccaacggcggcgacgacatggaggagtctgatgacgacgtcgacggcggcggcgagagtctctccgccatcgtctatggcggggggagactgcacccgtcccggcgcccgtccgtgccgccgccggaggagaggccgagggggtggatgccgtgcccggttcttcctcgggcgggaggcggccatggcgatgccgacgccgcggccgccgaacaaggggtggagggagaagggccggccggacgcgtggcagcggttctacctcgaccgcggcgccggcaggcacgcggcgtcggaggcggaggccaaccgggagctctggatcgcgttcctgctcgaccgcggcgccgcgaagagcacctcgtggtggaggtcgttcgagcggcggttcgaacggtgcgccgccgccgatccctactacgccgccggcgacacgccctgcgccatggtgacctctttcacgttctgcttccagtaataggccttggtaccctatgtacgtctttcaatgggagagtgattaatttcagctatagaatcataagcagcattggcacaatagaactcgtagcgttttgtaagtagcatactttgcaaactttgcgtttgtttagttcgcgaaaagaaaatttttgggtgtcacatcggatatttgaccggattcgggggtttttgaacacgaataaaaaaactaattttataactcgtatggaaaaccgcgagacgaatttattaagcataattattccgtcattagcatatgtggattactgtagcctttttctagaaaatgcatacattgcgacatggtgtcctgaactcctaatacaatttatttctgttttcgtgggccaatcagtagtaaactagtaatctattttggaatttgaagatgcaattgatagtgtagtggtaagggtatgtgttgaaaccacgctcataattctttctcaaatgaatgtttggaggaacttctttgtctccaaatattaatcctgttcttttttctattattaaggaattccgaattttctgccaatctcatgtctcttttctgctgacattgtctggtgtcataaaaaagtatgtgttcaactgttcatggcttcaaatgctttccaaaccttttcttcagagtatgtatgtgatcttttgattggctaacatatgactggtaattttggagcacggcaaatgtaagagagcaagatcggggtacttgagcattggtatctcctcgtagtgcaagagtgttgactgcacgtcaattgacgataattaactttgcagatgttgcctggtgtcagcctgtcaggtgactgcccctctttcttttctttctttcttttttttttgtgatggaagtttctactctagttttgctccatggagtatgctttaatcttaaagcagtttgtctacaaattccagtctccaaattaaatgtttagagtaataatttgggggaaataacctccatttagcaaaagggaaaaattataaagtccatggtcctaacttgtccttgtggaatgctttgatgcatgccagtgtagacattgttttgcatacggccgagtgaaccaaattaattgaacagcttatataactatatgtctgttttgttatttctatatcctatctctgttttttttaatagatggcggcgttaaattttaaagtaaaatgctatacgtactaactttttattattaaaatattactaacattgatatgctataagtacatttagatattttttataacttccatctacctaaatcaaacagttgagatggttgttagtaaaaatttagtaagaaaaaattaatacgtgtatcagtgccgaccattcgtagattttcaaaaggttagtgtaaatatgataaaatacaagtcgattatacttaaattttctttaataataaaacatgccgcaagaaaataaatgatatttatattttttttataatataataaatggtcagatattatgtaaaatctattaaaaatatggaaagagtacattattaaaagcgtgttgatgaaaaaaatacatactgacttgggagatctgcttaactccaatgcagatcctaaatcttgctttcgaggacttgggatatctgcttaactccaatgcagatcctaaatcttgctttcgagcttaaatgcatgccagttgatttgatcctgcaatcaacaagaaaggaaaacaagaaaataaggttaaatccgtaaacgatagccgatcggctaagggccgatgacatatcgttaatcactaagctgatgtattagcattagatcggtaatgaagaataaagccgatcaatgtggctcctaattaataagatacaactgcccctctgtgggctcatcccaattgcggcaatacttgtgcagcacgtcaatcgatcccgaagatcaatattaacttctaatttggtacatgatctaccaatttagtcgtcaacaattatacaccaaagataccagcaataaaacaatcgacacttgaatctaacgattaaattagcggatttacaagtttttttttgagttgtgatacaaattcatttgcacttaataaaggccagcttctgccgtagtggagcggaggcctgtcgccgggaggcttgggccggatcgtcatcctttttagggttccaccatatatatacctcttgtaagccgttgtgcggcgttgtaaccccaccctagatatagtgaagatattttgctggctggcgcccgtggttttttctctcctactttgggagggttttccacgttaaaatctcgtgtcttctgtgattgatctattattctttatcatttgtttgcctatcgtttcctaacactttttgcccccaaaacttttatatttgtgaccatcggatcgcctcgagatttgagcatgaagagaaaaaaatgctagaaagaaatttttatacatgtcatgcataagatcctagtgttatctaatcaaaccattgttgaatgcaagttttaataagttatatataaaagttatagtgcagttacagtgcaattacacttcagttatggtatagttatatctgaatgtttttgacccaaaaaatttatttgtgacagttttttagatactctcaaaaattagatttgtctcccaggaattgagactgcaggtcaagcatatgatctcctggcccatttccgaaccattttgcgaagctggtccgaaattaagctctgggtggctacgtttctcttctcttttccatgccagaatcgatcgatcaaaaggcatatgcatctcctgtttctgcatgcgccgatcaagacggacgcgtggtgacttcactgtaggtatatagtggaagacttgagacggcgacggcggcggcgggaggcgacaaaaacgcttgttgttttcagtcctactcactcggcgggcgatcactcgtggagcagagcacggaactgatcgagagagagaaaaaaggggccgggagagtgccttttgcgcgccgaccatgtcctcctcgccggttcctgtcgccgtcgccggccaccacgcgactaaactaccaatatacaccacgcccatatacctacgtggtgggggccgaccaatcgggctagctttgctagtcttccagcgcaagaaaactctgcacttgtatctgtccgtagtggcggagccagtactgccgcaacgcataagaagatcgcacgtcaatatattagaagcggaggtgaatagtaacgttttccgatgaccgactaatttttatacgtgtggacggttaacgataatggagacagacatatcgttttaggctgcccgacatgccggggagctataactccgccgctgtgtgtctccggctctgatcacggtagcggcggcgaccgttgttcaggaaccgctggaattgataattggcggttagcgggtggtcaacagtggttgctcaactattgaagcacaggaacatttttttttactttttaattatataagagaaaattaatgtagtatttcttttgtcccagaattataacaaattttagttataaaccttaacgagtatgtctaaatttgtactgcaactgctgcagccagccgctggacttttttttttcttgattcactgttcgtataggctacagtagctagcgctgcagcccttgcctgcagcggaacacacccattgtaacactttttggatttacatcgattcatccattgatcatatatatatatatatatatatatatatgtatgtatgtatgtatgttttgtatatgtgtctagatctattaacatctatatgaatttgggtaatgctataaagttttatgttgttgaaacggataaagtacttaaatattgttatagttgtaaaaggagatagtagtatattttctcgagagtgctttcttttttttttaagaaatcaagagtgcaattttgttcaagaaaatgcaactactactgctatatcactggctaaccaacttttgacccgtctacggcgatcaagagagtgcagcactcagtggtatatatcttaattgcgctatctcctcacagattttaagttatcttatcagtccgtgttgcaaattgttcaaataataaatcacactttttttcttctttccaaagtgcaaatcatgtcgattatacacatgtcatgcatgcagaagtcttctcttcctcatatgtctgaattttgattctcgatagttcggtccgatgatatcgttaacacaaattggttttatatgtaagtttcacgttttgaacgaaaaccaaccagaaaccacgaaatgtataggtgttttgacacgggatgagagcagattttcgagtgaaatttgaatggtttctgataattcaaatattgtgaaaacttgaccaaaatcttatcaaaatttgattaaaatggcgaaaaccgtcatattaccatcagaagtccgtatctgttgctcaaccgaaaaggtgaaccaatccttgtgtgctcgctctacagctcagggtttttgcaccgtccatcactggtaccaaacttgggaacttgtcttgatgctattctacacctgtttgattaatgcaatacagtactagtagtagctacccgccgatcaccaggcatgtgtaacttttttttaaacgagaagatatagaagtgtcaatttaaaagaatataggaagaaaagggcattattcatatatatatatatatatataagagataaaaactaagaaaatagttagattgtacaaggaactagctagcagcctaaagtaacatctctgttagatacttggcttttgccgccgtttaagttcttgcctgttcctctatcctcgctatactacctgtcgtagggacggatctaacatgagagcggcgggctctctgagcccccactactggcgtgatgactatgaaagcccccacgaagaccctactaaaattttttaccatatatagatgggagggggattgtaactctatctagtttgctcagaccccactgctattttttttgatctgccactgatctatcgtggttagctcttacttctctttggtctataaaagctaacctaggtgggaatggaatataacctcctctgttcagatttgggttttttttttacggagaaaatatgtcggaaaaccattcattactagaaaaaacatttttctaggcgggcaaaagtagtttttccaggcgggggaaaggagcgcatgtacgtaaaggcttgcgaacgcccaacggcacctacaaaaatcattttcgtaggcggttgatccacccgcttgtaaaaatatttttagcgaaaataaaaaaaatgccactggtggcctcccccttcggcttctccccattcgggagacggctcctcctccatccgccggcgctgcccgaggggcggccgccgttggttcctcctccgtcaccgccgcatccaccacccccgccctcccccgtcggcccctcccttcggccgccaactctcctccccctcccccagtcagatatgggaggaggaaggagggagcgttgcctccgtcgctgatggccggctcccctcatctggccggatttgggagggagggacggaggaaggggagcggtgccgccgactctcctcctagttgtcgtgcgccgccgtgcctctggtggccgccaccttcgccctcatgccgcctccactgctactgccgccgccggccggttcccctcttccggctggatctagaagggagggaggagagcgccgctggccaccgccctccccccttcctcctcgggccagatctgggagggagggaggggagccatagccaggagcagcagccgccaccgccactgccctcccccctccctccggccaccgcgccagggtgcgccaccactgccaccggtgggaggggagaggggaggagaggtgggaggggaggggagaggagagaagaggtgggaggggacttagaaaactttggctgcgagggaagaggggagagaggtttttaaagatgcttattttcgtagatggacaactatctcgtctcacggtttttattttcgtaggcggcaatttagtttcgagagacctacccgcttgaaaagaaaataacgcccacgtctcgaaaaatgatttttctagtagtgattttgtatatctccctacttagacacgtgtaatgtgatggaccaaaaagtgtggtcctccactttccacacctgcaccgctgctgcagcacacaccgcagcaggagggtcgggtggctgcatgcacgcatacattgttcagtccacgtttgcttcggttcgcttttccgtcgcgcgagctgatcatcgatcgccgccctcgtctccactatgaccttagtcattaagcaaaagaaattaagccccctcttcttccacacacacctaacctcagtgctccctcggtaattgtaaaggaagttgttttgtacagcgacacgttctttaaaatataactttaacctttttatttctataaaaatatttattaagaaagtgatatatatgtatacttttataaaattatttttcaagacaaatctatttatatattttttacgttttcaaacttaacaacttgagaattattcatgatttatattcccaaggtttgacttaggtggtgtttggttggagggactaaagtggggctaaacttttagtctctaatttccaaacaccctcttaaacattgtcctaaacaacttcctttacgagcaatggagggagtatacctcccctctcgcctagctatataatcaaccccgacaccttcactgaaacacctccatggctttccaccttcgcttcctcctcctccttgccctctagctactagctcacactgtcacagtcaccacacagctactagaagtaagatttagctagattattcattaatctgtactaattgatattgctaagcagctgcagcagcagcagctggttggggggaggaagaagaaggagagtgttcgatcggcggcggcggcggctcaccggtccgacatgcgcaggggttcaccgtggtacgactactactactcctcgtcgtcgtcgtcgtcgtcgtccccggcgcggagcaagcgcgcgcaggcgcagctcgtcgtcgtcgtctccgccgccggcaagaagctaccctggccctcgccgcggcgtcgcgggagccatgtcgtcgccgttcctgggctcttcttcctcttccgcttcgtcgcccctctcttacctgaccccgcctaggcctcctcctcctcctcctccccttctcatggtacgtcacggattagctcgatggttgactgatcttgacgatgagctgatggtgttcgacgacgatcttggcgtgcaggggcagggatacgccgctgctgccaatggcggaattggcggcggcggcgtcgaggcggtgaacgcggcggcggcgccgaggcagggtggcaggcacgccgggcacccgccgctgccgaggccgccgccgaggcagtgcccgcggtgcggctcggcgaacaccaagttctgctactacaacaactacagccgcacgcagccgcggtacctctgcaaggcgtgccgccgccactggacggagggcggcacgctccgcgacgtccccgtcggcggcggccgcaagaacagcaagcgcgccgccggcggaggcaaggccggcgccacagcctcgacggcggcttctgcccatgtcgtcgcgccggcggcggcgccgccgacgtcgtcgtcgttccccgatctcctgaggcagatgctgatggcgccggctaccgccggtggcggaggcggctacagcatcgacctgaccgcgtggcagcaaatggcggcgttcgcggctccacctcaggccgccaccggcgatgtcggcggcgcggtcggagcggcgtcgacggcggcgccggacgcgaactgcggcggcggcggcgtgcagtactggaacgggtggctgcaagatgacatgcccggtctagatggttcatgttaagtaacccgtgcttgtattgatacgtatacgtatacggagctacggatatatataccgaatacgtatacgtatatatatgtgtgtgtatatgcatgtatagcctatgtatgcatacatgcatacacatgcgctatgaaagtatatacgtatgtcgtatgcgcatactaaattagcgtaacaagagcctatgactgtactagtgtagtttggattcaggttattaactcgtgggtatatgttgacctactgtagttaaatttgtgtatttgtgcgactctgcccatttctagtttgtacgtgcatctatgtgttatgctttttttttcccttttttaagtactactcccaccgttaaatattactccgtataaacttagttaaactttgttaactaagtttataaaagaatttaatgacatccaaaacactaaattagtttcattagatctaatattaaatatattttgataatgtgtttgttttgcgttgaaaatataactatattttttataaacttgattaaacttaaataattttaactagagaaaaaactaaaatgacttataatatgaaagggagggagtacaaagcaaattgtcagacagaaaaacaaaagtgaaagactgctatgtgcttgcttacatacataaaagcactagttatggttcaatgtaagtcaaggatcatatcttgataagtctcaagccagtgggtatattccattctgctagatgctctgatattaaccccatcaatttgtgaagcgatttcatagcactttgctataatcatctacagtatatagctctgaaaatgagcaacgagacacgagagcagaagcaccggtagcagggaacccacaggcaagcagaacaactggcaaaaatcctctgcaccaacagaccaacaacactttgtgtgcaaaagacctaacaaaataaatttaaatcacatggttaccaaaactgtcacagtattacacagtgatttctctctctctgaatatgcattgtaataacagactaattaagcacaaatagcagagacaagatcaagtgaagtgatggttcagggtttcagctgtacgggctcatgccgatggtggcttcccggcgggcgtaggagacccgcgacttggagaagtagaagtagtaggctccggtgagcacgcaggtgatcagggagaaggcggcgccggcgccgaacgtgccccgccgcaccgtctcgcagtccggcgggttctcgaagaagaccttgcggtagcgggtgtggtaggcggactgcaccagcccggccagcaggcacgactccgcgatgaggaatgtcaacctgagtagaagaacatcaggcagaatgttcagtaccccagtgtgcaaaaactggatggtttggatgaaatttgtatagattcgctggctgcttaactgggtaattcaactgtttgatatatagagatcattggatgaataaattgaagcatttgaagatgtcatgctatgattcttatgccttatgctgcttgcaatttttatgcttttgttttgggggcaaaagtgagaattcaataaattcatgcgttcatatagcagtctaattagtacagaatcatggcagtaaaagtatttttcagatgctgtaatacatactaggtgctacaatgaacaggtaacacagtacccatgtcaccagcaggtgtatgaaagaacacaagtagaaacatatcaatgccaatcgtatctgaggaatcatagataaacccctgttttctctagataaaaaggacagttaaagggggcgttcggtaaagattgtgtgccaggggaattatcaaagttagggccaggtcttccaaaatagaaaatttgcataatatttctggaaataagataagtgataacccatgaacacgcctagttctacaacaaactgagtaactgcctggagacaaaacaaaaatattttattttgataagtaaaacaaattgactatggttgttcgggtgcagtcatgagaaaacgcatgcctgacttgttagttcggtaaaatgtttaaacttaattctgcagcaattaagcaattatctatattattactttaaatgatgctagtggtggtgtcagcgtctgcctccaacgtcacaagctaacatgtggggccataagatccatacacatgaatgtttttgctttatatatggcattttatgcctaatcaactaactatgctaaatttaagtttttcttttgcttttatctcttataatatccgttgcaacgcatggggcctttagctagtcagtgtagaaacaaatggttcataaacaattcatacaggtagtctgaatttcagagctcatacatataccactgtcataattgtttacaatgtgttgtgcaagaagtttgggggaaaatggtcatataactagactgtatcactggactcacagattaccaatagaaagtaccgactccaaacccaacaaatcagaacagtttagtactagtattaactgaaagctactcgttgattagttgatgaagcttgcccttaatcaatgtgggacttggtccagccggccgtccaacaatttctacaaccactaaagcactaaactcaacggttgagccttgatcagttaacactgtgaaggacatagcaagcaaatggcaacctttacattttgaccaattcagcataagaactccaagatgaccaaagctaattgctaactgtacaaaattcaagaccaaactcccaaccagtcaatttatttattcttaaaaaccatcaacatcatagtttgtattctaccatagcctgctatatgctaacattcctacaattttgccccgtgtgcacccctaaataaattagcatacaatatcagcaatccaataatccgaatgcgcaagcaaaatttaacaaattacatgacattctagggaaaatatcaaataatttgcatatttcctcttcttgagaaaatcttagagctagatgattgatgattcacggatatagaacaactaatttgtatatttcagcacgaatcgcatcaatccgcagggatttcgtgtaaattttaccctcaccaatcaacaccccaattttcccaatccccaagtttggctgagtcgttgatccaacgcgctttcccctgcaccgatctctagtttctttctgacttttcggcaaccccaaacatggacagctagagattcccaagctaataatccctgaattcgcgctgctttgcttgattaaacaacgcgagaaacgaagcgcacgactcgcggggcccgcgcgtcagcctcacgcggggaggtcaatgcggcggcggcggcgagagccgaatcgtggagaggatggggaaggggaaggggggatcggagttggtaccaggaggagaggaagaggatgagagcgcaggcgcgcgcgccgccggggcggagcgcggcgccgcagcagaagcagcggctggagacggcggccaccgcctggccgatgagcagcagcgccagcgcggcggcgcccagcccggtcgccgcgtcggggcggtacacgcagtaggtccactcctgcctcgcgtccgtctccaccctcgccttgccgccggagagagagagagagagagcacaggagcatcatcagcatcagcattagcatcagcacagaaagtcagttcgtcggaggagggggagagaggggggcgcgcaccgatgggcggctctgctcggcggcgatggcgaggccgaaggcgacgacgtcgacgaccaggatgacggccagcaccctggtggagtcggccatgatgggggcgcgccgcgaaacccgaaaccggcggcggcggccggagatctcagatcacctcgtcgtcgtctcgctctcgccgcgggctcgaatgaattggccgccgtttcgtattgtactgcctgccgtttttaaaacaaagcgaggttgaactgttcgggtcgctttttttatacactccgcgtgcttgtttcgaagacgcaaagcttaaaaaagaagtttggaatttgacgatattccacttcaaatttaaaaaatcgacgcaactatttatgtggtgtttggatttagaaactaaaataaaccctgtttaacactaagtcgttctagcatttcccatattcatattgatgtaagtcattctaacatcaatataaatatagaaacgacttacattgttaaacggagggagtaataaaactaattacgtaaatggaaactaatttgcgagaaaagttttttaaacctaattaatccataattagcatatgtttattggcattacataggctaatggctcaatagattcatctcgtgaattagtccagaattatgaaatgtattttgttattagtttatgtttaatatttttaattagtgtccaaatatttaatgtgacgttaactaaaattttagtccctgatcctaataccaccttagtacaagcactgctgacgttcgtgaaaaatacatgccgatgtctcaagattcgcactagtgctgttgatggaatagcaatacatgccgatgtctgaagattcgcgctagtgctgttgatggaatagcgacgatttgatgataatttgataagagtttgaattggaagtttgacgagctagcggagtatcgtcaagtcaaacattctgctcatggcaagttgctcgtatactgttcaccggtttgattttttaagaaatattcacataaaaattccttgtacgaaacgtatttgtatatcagtttagtataaagctcacctaaacagctcataagaacggaaccttagtaacgtgcattagtacttcatcatccaagcagacctgctttcgatccattcatcgcttattcatttcggcctttgggtcattttgtattacgaaaattcttaaaatcaataacatatgatatatacaaaaaaaaaaaactgttcagcaaaatggtggcacttaggtactgtacttaaccataaaaaatatataaatatgtaaagaatgatacaccataaatataacgaatgaactattttttatctgtaaaaggccgcgacatgtctaaccattgccattcaacttaacgtttagaacagcacgcaatatcattttagacttaacacttacattttatctacacgtaaaatagtttgctgtctatatatagctaagtcacatctctctcctattgttctcctctattttcatattttcacatagttttttttgacaataactttcatgtctttttttaaaatgaaataattttgatcccagattagcaataactctataattaacacagtataaagcctcatgaagataactcgaaatctcgcgggacaagcgcaaatattagacgcttgggtaaaagttgaatggtttttctccgagcaaaaaccattgaaccacctgtgctattctgtacgttggattcgaaagaacctcaatgaacggtccgatctaccccccctctctccccacttgttggcccaccatcggcccatggaccaaaaagcccatttcctctcgaaggccttaaacccctcgcctctcctcctccctctcccctcctcctcactagggttttaccccccaccttcccgccgaaacgcgacgccgccaccgccgctcgccgccgccgtcgccgtcggcggcgctctccctccctccccctctcccccccgcacgcgcggccatggcggccgggaagagctcgtcggcctccaaggaggaccagtacgcggcgctgcgggagctgtaccggccgcacatcgactcgttcgactacttcatcgacgaggggctcgacaagatgcttcagtccatccgccccgtggagatcaccgtccccaactcccccaccaccctcagaaatatccttcctgcttttttttttttttaccttttgctcgtcgcttacagttcagtggaccagttttttgtgtgctagtacgaatttaccagtttttccccacccagcatccaaaattcaattcttatgtgctacgaatttaccttaagacagctctcgtgctttccgaacttagctgacaagttgttaataaagccaacacccagtagttccaacatagagttactaaggcgcaggtttgaattcgttttcactctcttacgaggacaccaatagatgaggtttggaaggactgctatatttgtggatgctaattgtttgtgtacggaatgaactatggaagtaacttggttatcatctcattttcccttaaccgtcgtctatactatccttggagaaaggtcatctgttcccaccaaagagggatggtcggttggatgcaccgctctacccccagcaggttttgctatatggacttatcaaatccctttacatatcattttcattttaaacacaagacatttgtttaatctattgaaaactttggacgttctttcctgtttggatgagcagtgcaggcaggcacggacgacgtatcatggggaatttaaagtggatactttcatccaatgtaatgacggaccagctgtcaggcaaaccttcaattttggttacttgcctattatgttaatggttgttaccccttctttgttgtacttcttatcacatttttttcgtaagaacttctctaggtggattttggaacttgaatgagcggctgacagcttagttgagtagtagcatccacatatgagtgcagcttgttatctgcttttaggatctagcttgtgtttctacaattttacattagtctggcaccccaataagtcttggttaagttcacctgtctctttggtacaaaagctacttctgcttcttcaagtcaaaaaatgaaaactaagctatctaatatgatatagttacctggaaaaaaaagagacttttctctatcagttgggtggaaagaatcaaacattatgcactttattagtgtcatgatgttttgtcagtttatagctttataataggccaaaaatctaaattaataagcatgattatgcagtttttgcggttcagtgctgctttacaattctgacactaaaatgataaataatagctgctttgaataatttataatcagttgttcgtgaaagctgatctgcaattctgcatgcatcatactatgctgcaattctgtagagttaggaacacccaaagcatcgatattaaaaaaagtgcagatacatcacattttggtggtagccatagacaactattattgtttcttccttctggaagctatgcaggattcatttcacgttccacttctctctacaccaccttatttgttcttatttgaccgatggttttgatttaattagtgtgaattgtattctattcttgtttatgattttatgctcatgcaattccagtcaaagctttgccatctaagaggtgcagattctgaaaaattgattttccatggtgaagaggcaacagaaatgggcgggtgagtatgttatgaacttgtttatttgtttacattctcttaattatgtcatcttcttccctttctatcatttcttagtacaccgatcatttagtctagtcattcaacttgttaagactacctgtggatcttattgatcgattcattgtgttatgattatatcacattcactcttgattcttctactgttactgaacaaattttttgacactgtttcctatgttagtgtattcattctgatgcattttgtaaaattttctttcaggtacttcatatgtggtgggatggagagacttgtacggattcttattttacaaaaacgtaactatgtaagattactcagcttttcttttagatttatgttgcaaggctaatattagaaaaaaaaaacccagagaacattatggcaatgaatggtttggtgtgaattttttcagcctatgggcctgatccgtggctctttcgttaatcgtggtgctgggtacactgacaaagcagtgatcataaggtgccatatacttgtctatagctgcttatgttactgagtttttttgctgttgcaagtatacttgtctgtgtatctagttgtaccttttttatgttataatccatatctagttttttttgacagatgtgtccaagatgatcagtccagtgtgacaataaagctgtattacctcctaaatggcagtgcaaggcttgggttctggtaagttctgcactggcaaattgtgagtggaaatgcttgagtttctttttagtttttggaacttgattcttgaatttgtgcaaaattcaggttgggaggcagagaatttctccttcctgttgggattgttctcaaggtatatatttccttcatggggcttattgttttctaactggaaattgagttaataagctttctttgtgcatgatcaagttttacaaatcattgctactatatattgttggatgatgatgcaatctacagtgacgacctcaagccctttcttgaaatattccatatttttcatttattgagtaattaagctgtattttacaaactttttttttgttctaagcgtttcattaatctttcctctttctgtagtttattctgttaccttaccagataatttgatttatactctcactattttatttaaaaagtaatattttgattgtgcttctattctttgatatttagtgtaggttggcagtattcttaatgtaactttaacagtacattgacctgattgtgaatttacaaatgataggccctaattgatactagtgaccgggaaatatttacaagcttgacatgctgctacagtgatcattatgaaagaggaaagggagttgtcagcactcaacttattggtgaaagggcacaaataattcttgacgaagtcagagacctgtctctttttactcgcacagaatgcttgttgcatcttggtatctgagagtttaatttgttctatttgcacaaatttttgaatccttcttagtcactgacatcgataattatctttgaaatgcaggaaagtacttccgatctgtgatggaaggatttgagaaagatgattttgaaactgtaatattggatgtttaatctgcatttgtctttgcatgttgttgaaatttggatcgcttcactttggtcattccacattgtgtaggttgctgaggcagttcttaaggactatatttttgttcacctgcaaaacaaccatgacaaatttaatttattgatgtaagttgaagttttattgctcttttctgtgaatttctatccttttgaacctctttaatgatgtgtatctcttattacttttcacttcttagatttatgctgcagaaactttatgcgattgtagatcaaactgcgtcacctgataaagctgatgctctacagtaccaggaagttctcttgcctggccacctgataacagtttttctaaaggtcactaaaccctctgccgtcaagctcatgaccttttttttttcctttttgaaaatcaactccatagtactacaaaaatggcattcaatgttatgtgcttagtaaaaacaatactataacataaaatagcataagttttttgtcttaacctttctacccttgttcaattctctgcctctaccttctctgttacatatttgcatggactgctggaccatgaccaattgaccagtgttagttacaagatggatgtttttaaactgcttggagctggtgctgatgtgttccttcaagcataggtgctaaggtagaacaggtcatccagcacatactatgttgatagcttgagctagtagtcctttgcgttcatattgactactacctccgtcccaaaatataagggattttggaatcccttatactttggaacggaggtagtacttatttcacgctcctagtatggtacagaagatctaggttattaacagtgtaggcatggtagtggttacaggtagtacgaagatgtttttcacccaattttgctaaggtagtgagttaagtcatattttgcttcgcacttttgctgtgcctttgagcttatttttttattctatttgtttcatctttgttccctgtgagcatcgcttgacgctggttctttgatgtcctattttatggctgagattttgttggtgttgcttttgatttcttttctgacatccagttctgttttcctaactcttgtttttctttcctatcatctccaggatagacttcaagattggttgagaaagtccaaacggttaattgttgaagaggctacaaaaaataaaagctttgatctcaatgactgtatgtttactctatccatgtttttatacaggaaccctttttagttgacctgtgtttctgaagtatactacatcgatactagaatccactaatgatccatcagcgagtgaatgctagtgatctttgcattcatatgatccaacaagtcttcatatggccagagacccagagttgtttatgggttccaacatctggtgtactctttataggagtggacgaggggtagcctactatcaccactgttgttattgtcttaggaaccaaggtctagacatgcttgttgggactaatttccataggaataagatcagtttggttagtatcacctatttccataatattagttactccctttgtcccaaaatatagcaacctagtactggattagtcaccacctagtattatgaatctggacagagaggggttggacagagggctctgtccatattcgtagtgctaggtggtgtctaatccaatactaggctgctatatttttggatggagggagtagtatatatgttaattagtatcctatattttatagaattttttggtttagatagcaagttaaatatttgatttgtttggaagttagagattttattctggagggtcaagttaaagggacatcaagagttattgagacatctagtggaaagccttgctggctgatgaggattgggggtagggttctcatagcgaggactgggtgtaggtcatctaactgctgttttgagtcttcaacttttgattctcttggctgaactataatgggtgcgtagtgtcctgtttttaggaagcctggcttgatccttaagaatataatttctaccatcctaacaaaccaaatctctaactttctatctgaacagattacattttaacattatagaaattgctggtactgaccaatctaatcttatttgcaatgaaactaatcacttataaactactaacttgttgctgcagtcatcacgcctagaccttggacccctaaacaggcttttgtctaataaatcgtgttgcatgaacactgcattctctgcatttatggctagtattggtagttgtacaagtatgctaaactcttgaactagtaatcattaacatgacggatcagaaactacagaccacaagattaatcctaacagcagatcccataaaaataccagctacaacttttataacagttacgactatttttcttttgtgcagcacaggaggtcaggaaatttctcagtaaaacttcagcatatgttggcaaagctattcagagtatgataaaggtcggaaaagtaaattcacaatcagggctagatctgccacaggtgcatctcttacaaatgcttactgcatctggtattttaaataacatttggcgataatatactggcaaagtcatatagcataaaaacacatcgtgatgcactaattgtaaaaacaacaaagaactaaatcaatttgcagtgaagtgatttatagtttactcaccttttcgtgaggtatatattttttctcgtgagtgaatttgtcgatggttttccttgtttgctctggtttattgcatcacactctcccttgcatgtctaagtaacttccctagtaactattatctcttctttcaaaggtatttgagcagggatatcatgtccaccctcctatttttcgaccttaattctttttcacactcaattacacctattaatttctgagggaatattaaaaattacgtaatgctgtgtatatgtcaacccttcaagtaagttttcaagatgaaagataacaatatgcaaaatgaattacgtcaaaaactgaaaacgatctgttcaaaagtatcactgctcactacacattatattgagttacagcagaaggtatcatgctgcggcagcacagtgctggagatggccatggggtaccggccactaacccaccgcttcaatgctggctataggctgttttgaaataatgaaggcatcacttacccacaatttacattttagtttttcagacaatatatcccaagtaatttgttggtaactgattccttctcttctgattaagagatgcttgacacgagtcacagattatgatatatgttcgtagtaaaatctcttggcaagaacgttcattttcagttaagttcaatgttgtttgtgttcacagtcctctcagatcatttttatatgtgataagcaccttttaaaatttgcagcgagatgggatgaccattcatgctgaac

SEQ ID NO: 6185 - DNA, 15704 bp, Oryza sativa
ctaccttacaattgttctgcaaacagcacactgctgctatagctagtagatgttcagtgatgtctcagatgatgcttcaattgttgtctactgctgctgctgctgttcagtgatgttgtccttggtttgatcaagtgatcaattggatatataatctgatccgagatggttgacgcgtgaggagaggctccatcggttgccatgatcgagacgtttaggcgagcattcatatggatggataaggagaggttaaggttcacaatctgaaccccaaatttatgtaagcaatatccttgcatgacaaggactggccgaaacgggatcgagttatcacaagcgataaacctagctagtactatctccgtctcattagaagtgtagatgtgggtttacattttgaccgtctgttgtatttaaaaaaataagtcacacataaagtttttttcatgtttatcatctaataacaacaaaaatactaataaaaaaatttaaataatatagacgatcaaacattgaacaccgaaatctatatccgtacttaaaaaaatgggacagaaggagtaatagtttagtataaccttgggcataaacattttaacacttaaaataagatttaaccaatcacaaactttaaccatgaatatagtttccatatggttagtttaaaaaagaagaaatggtatacacagatttgtcttgaaaaagaacagtatgataatattctaagcttatattcttttttaaaattttttctaatataaaattgatagtcaaagttttgaattttgttgtaaatcaaatatctgtgacaatcgacaacttattttgtggtagtacagttaaaacaattgcagagtctttttctatatatatttaaataccgttgattattagttattgctgttgctatcaacacaataaattgtggaacatcataaatcctattgcccacggttaatgatcactttcgcagcctatcccagattgttaaagatcacactttaagagcacaactccatcatgctcccattaacattcataccatgggtgaaatacagtgtacatgcagattacacgcaaaatgataagatcaagttgataattgttcatccataatccattcccagtttgtttgctctcttatcatctaaaaccagggtaaaaaaattatctttacaaaagtttgtgcttttggggaatattttggcggctgatgggacctccacgattaccacacaagtcaacaatttctcccaacagattgatcattctaatgtatgccgtcttttgtacgtgatgttgttggccaactctgccttattatctgtcagtaaattaattaattcattaattacctgctcttttattctcttctcatcaccttttattttttagtgtcacatcaaccactgtctagctagccactactatacatcaagcagctattgctctgtcccaaatggttacctcagttttcttcggaagagtataattgaatatgcaccatccacaaataataacaccctcaaaccatgccacgcttgaaataatgttagatatatgataaatccacttttagtcctccaattatgactgtggtccgatctgtattctttaactatataaaaccgattgttattgtttttcaacttttaaaaccgttcacattttataaaaaaagtttttttttatgatggcactatatgtagaaattgaaccctgcagtgctagggacacaaccacaccgtctggctattatctggccgcaggctaacttctggttagctcgaatagttaatggaggattagaaaggcgaagtgatgagaagaataatgaatggcaacatcatccactaactcctgacacggaacggagatcaggtgatgatgatgatgatgatggtcactgtccactactagctactcctaccaccaaatgaattcatcattgaacgactaataattcagagccggattgttaatttgggaggtgttggtttgaacactctccatgaaacctgccctttttgctgctcaagtggtagtaaactgataacgttttaatttttggttctgtcaattgtcaaagtggagatgacttggttgtcaaaatcctgatttggatgccgacctctagcgccgtactccctccatcccataaaaaataatttagtactagatgtgacacattctaatactacgaatctaaataatttagtactagatgtgacacatcctagtactacgaatctggacatacctttgtcaagattcgttgtactataatatgtcatatccagttctagatttatttttttcgggatggaggaagtatatatgctttgctttggctgtccatgatgacgcaacctatacttttggatatatccatcctaggcacctttccagacataagcaacaattttgtaaaagaaaatagaaaaatatattagaccctataaactatgcagaaaattaattgtctaaataaagctgtgcagaaagttcgaattttaacctcaaacttaaactggacaatttcatcttttaatgtcctttataattgttcttccttgacatcaacacctccacaattatagcatcatgctgtcaactttcgaatgtttcccaaaatttataaataatttctttctaaatatattaactaattggatcttaactgtaattgcagtacacagtgcaccaactatttaagtttatctatattttataattttacaagagtataaaagcagagggtacattacttaactgtttataatagagtattttcttaatccattacaacaatatttttttcaccggcacttcacctttttaagggcttgatgtccaaacttaatattttctatctccaaatgggactgtgtcagaattgccctagttaggaggcaacataatttttctaaaccccaactgtgtagacaatcccctggctctcatggcttcaacttgagacatggagcaaaaacccatggaactcgggagtctcccttcagtcccttatgaaatgagtaagagatataaaagggcaaaggcctagcctagagcctaactacttcctatgctcccaaggataaacaaaaaaaaatattaaatctcttcagatactacatagagccgaaaggaaaatgaaaaggatggaaagagaaagaaaagctgtcctttctgctttctcttgtggagaaaatgggcgttgggttagtgaaaactgaaaagtattattgcactaacccacttaggttgactttatagttcttctattaagtggaaccatctatcgatagcaaatatggttaaattataaaatagaggtgtctatggttaaatacctttaacaaatttaccattaattttaccttcttttaaggaaaactataataaatgaatagaaagctatacttgtcgcaatgtcctaactttaatttaattttaatgattagatagttcaaaaattaacaattacacagatatacatgtcctgtcgttttgattagtttttacgatataataatttcaaaatttagaactaatagtggcgagctgtatttgtttagctgcctcagtttggttattttcttgtttttaattcttaaatccaaaataacaattaccatgcactatatgacctatacttttgtctttatatgtatcatcgtaattctgtcttttttctcagctgatataagaatttttaaaggtctaatttgtattgctagatgatagattgacaaatgtagattttttaagagttaatgatagatagcagatgtgctacttctctttgccccaaaatataaacatttgcatgaattttttttctataaaataagagcagatacaatagcaaactattagccagctataaacatattttaaaaagataaaagatgagagataagagcagcgagctacagatctgtagccagctgcagcacggactctaagacacaatgtgtgtatgacaggtgggaccatatattaatagtatagtaagcaactattgtatgaattgactattaaattggctatacatgatttagagctagtagttggctatactattaaacttgctctaagtgtgtctgatacactgattccaatgcaccgggatccatacattaaacaaattaggtttatacaggagtaatttaaaatttaaccactaatatgattgaaagaaaacaactttttcttagcatttactacctccatccagaataattgcactcctagaagattaaagacagattagcaacacacaaacgattgcagtaaccctattttaattaccacattatatgcatacatttcatgcttaaacttgattaaaaagaaggttagaagttggagatacggagtcaattatttttatgtaattaattgattgggtctgacatctcaataaaaacacaatcttttcatgataaaatttgaattatagatatataactattctaggatgaaggtagtaacattaaaaaggcctgttcactagcttttcagctcagtcccagaaagaccttagttttgactgtgtatgtttaacgcatgaccgtctattttatttgaaaaatattatgattagtatttttattattagtaaaagataaaacataaataaatattttatgtgtaactaaatatttttattttttaataaatttttaaataagaggtcaaatgttggacacgaaaatacacaaccgtacctaaaatggacggaggttgtagtatttgattttaaaagaaacttttatataaaaatctagcgaaagagcagagacgcttatctatgcgcgcgctaattggtggactcacccgcgacacaagtcaagcccgaagaagagtgtgaacgcaaaataataaaataaactcacgtatttcgaaaaccgtgggccccaccgactcccccccgcgcgcgcctatataaagcgcgcgccattaaaacgcttctcccacttctccctccgaatttaacgcggagcgaagctcagagcagagcacgccggccatggcgcgcgcctcgagctcctcgtctccgccgtcgccgcgcctcctcctcctcctcctggtggcggtggcggcgacgctgctccccgaggcggcggcgctgggcaacttcacggcggagtcccgcggcgcgcggtggcggtctcgccgcgcgcggcgccgcgccttcgagaacggcctcggccgcacgccgcagatggggtaccgtctctctctccctctctctttatttttctcattcgcaactcgtgaccgcttatactgtataaattttggtacatttttcttttgtgttaccaaattttggcagacttttagatatgttcagtttgaaacgttccaaaattttggtgatggtgtttatgcgagatgaaactctgggagcttcaaaattttggtagagtaataacacgtttagtgaacagcaagcaaccgattatcacaatggaaaataaaaaagaaacagtaatcgcgtcatcttctagtcggattttttttgggggaggaaacggacatgtctctagcttgcagtggaagcgaaagcttcttctgctcttctctgcagtttctgaactctgaaactctgaactttaagctgcttttgtttgttcctttcttcgatgctttcctgcacggcaaaaaaactgacatcacacgcatgtggagtactacgcttccgttttccatttttttttatcctttgtttttgtgctcaattttgcgtttgtttatcgtgttcggcgatagattttctctctgttttttttattctgtcgatttgagacgtcagaagagtagctcgcgcgcacgcggacgcggtgggtgcatttcttttttctccgtttgtccaaaagatttctgttcttttctgcatgggaaagaagaaagaaaaactggtgctactgtacaatggactattgccatgttggagaccaatgttgctttctgtacgagcaaatgtttcgtcaggtacagggcactgtgtgaattttttttcacccggaaaagtggaaaactttcctgaattcaatggaaagcttaagagttctgtcatttgggttttttttttgtacatttaggttctgtcagactgtataaaagaaaaaaaaatcagacaatcctgttctctgtcaggctgcaagaacatccacaaggttaaccatcatcagattatcactttgagaaaaattgtagtaaggtttagactccactgcataaaaaatcttcagacaagggacaaccgagagaaagcgagcatgtccaccaaaaacaggcataaaaatttcctgcttttcatttggcttctgcttcttttgacgggcatatctatgctcttttcttttcttttcttttgcttgtcccttttagcctcttttcttgtgctgacatattcaactatgctgcctctattaaattctgtcacaattgaactggttttaccgtacatgtacttccatttcattgttctttacgcatcaggcagaatttccgcactttcttttaccacctactcattccctccaaaaaagacaaatctgggttttcgtgtccaacgtttgactgtctatcttatatatttttttataattaatatttttattgctgttagatgataaaacatgattaatactttatgcatgacttatctttttaatttttttataattttttcaaataagacggacggtcaaacgttgggcacggaaatccagggtttgtcttttttttgggatggacggagtactccctccgtccctccgtcccacttcgtcctcgtccaaattcgtattattaggatgtgtcatatcctctaacatattagagagtacttcatatgttccaaaatatcaaagtatttttatattatttagcaaatattgaaattaacaaaaacaactttgatgtccttcattaagcgagggatgattagggatgtgaggacattttagtagaaagaatttcgaatgggagataatccatacagcaagtagtactctaaattatgctagaaatgcttatatttttaaccagagggagttctttagagttcagacttcataatatgtcggtgttgtaaacaatactgctagtctttcagattcacgtgtgtaggcattagcagacagtggtacaaatgcatcaatggtcgtggttttgtcaagtaataaattaattaacaactgctgtgcgactgacgctgtctctcggtgtgtgtggctgtgttaggtggaatagctggaaccacttctactgcgggatcaacgagcagatcatcagggaaacaggtacacttgcttctgccactagtgctctcttctcaactcaacttatttctgcaacccatggcgtcacactttgatctctccagtacgccacgtaccgtgttttggtatttttctctatacacattgcattggttcccaatggacacggatcctctacagtattgctgttgttgacatgtatacctagtcatatatatcaatgacatctgcagcaggtgtagtactgcaaacaatccccgtcggtttccaatgtgcatcagcacatcaggaaccgaaaacttgcaacctcgtcagaaatctttccaatgaagcttagattatttttctaggagatgacttaatacgttgatttagtagtttttagttgggaggacactgtttttgaagttcttttttttttcaagaagtttagtagttctaaactatgcactaatttggaacatcttggaagcacaacacatagtggtggggttcggcgtagtgtggtgggtgtggtgtgtttggatgcatcaacgtcagcaacagcaggctacaaaaaacattcagagaaaaaaaaaaggttgccgtcggtgatgcgacttatctgaaattccccacgtacttttgtcataccctgcatcaaaacttccaagaaataataaaaaaaaggatcattcatcacaggctatgattaaagcaagttaacaaatgacacgtcatttgctactaatctagtagccgacctatacaatagttagatacatacagatacatactaacacctcataaggcttattaaagcttgtgttgcaacaggttaccgatctgtagcccgtcttttttcaagtcttgtctcttttctctaagaacacagcttaaatcttggtaactccgatggctatcacttcattatacttgctcttacaagttggtagtgtaataagagttgggtaaaagtaaacagccatgaattggggcggtgagatctcgagtcacccgagagacaacaatgcatctgttttggtatagctgcgagctgtacggccgcagggcgagacccttgtcggccggcacggattactacagctaggattaactgcagggatgagcttgagcttgcagatttacagcttgcaagcagcaggttttgcatggacccaagctagtactagcaatgcaaaggacagcgaccagattggctgcacctgcacactgcacacacacactgccatgctctctatctctcctgaccaaatctttattctttgggcaccagacgaatcagatctggttcagagatgccctgccccttttaactcttccaccatgcaacttgcctggacgactgaatttttagtcggcaatgttcagtaatcagtcacggcttgcttgcttgcttggccgatttgtttgttgctccagcatgctaggattgcttaagagtttcaggcagagcagcttcatgtgctagtgcagtgtgattaggagctttttgcagattgcagtagatagcatcctcccttggttatccaatcaatggctttttagtggatggaaagagcaaaagattccatgcatggagtagatagcttttgttttgttttgtttagaggagcaaggccacatgtgttgcaaaacattgtggcagaaatatggaaatgaaagggagagtgagagggtccatgttgaataagaccctttggccagaatgttcataggagctttaattaccatgttgataacggatgatgaggccccataaccaagcaatgctgatctccagaatgggtgaagacattttcactgattctgatctgcacaactggattatgttgaattaaatcattcatgtcgacagcttgtggagggcagatctctgaacaaatctagagtaaatgtcttagatcagatttttatgactgagtacacattaatcatctcatcagtcatccagtcaatcttggtggtccaaacaaaatcaattgacaatattgtcaccacagtctagtactactacaaagtatgtggttggtaatagatgaaaggaagtccatggaaatggggccctacaagcttggggtcagccatggattggtactgcctaactaccaaactctaaataagaggatggcagctgcagcctgcaggcaggcatgaaacctgctccacttggactcactccatttacatgtaaccatagttagtactagaaccactctctagctacttgtatagttgtatgttccagcttcctagtaggtggttatggacaaacacccgtgatgatcttagtgtcttatcagaataatcatggtactgatttggtctggtatcaaatttctgttacaaacattgttccttaatattgtcaatattatgcacatagtgttttttttttgctgggccggccaaaggaagaggctgatcaaatatcattaagatttgaaggagaatttgcaaagttacaagcatcgacagggaagcctgtcgaaccagacgccttttgagattttttgtactacagatttaatagaagctgtttttaataatgttgtgagcaactgagagttaaggctgatgtaattgtgttcctttcttcagctgatgcattggtcaacactggtctggcgaaattggggtaccagtatgtgaatataggtatgggcttttatctgatagaaactatgaacagtatttcatatgatacactagagtatggacacaaacattgttgatatattagcaaaagttaattcaattattttgtgatagaacagctagtaactcatgtctgtaatgttttccatctcttctttcagatgattgctgggcagaatatagtagggattcccaggtaaagagacaaaaatattctccataaagcaatgctatccaccgccataattttcagcacaattttaggatacaaatttgagaaccttgtctagtttgttgatgagcctgagaaattttagactggaaacaatcattaacaattacaatacacattaataagaaaacgtatgtactttctatcagtttaatgtgtcataactagaaattttatatgtgaaaaattctgcatggggggagaatgagcaattttaaaagatcaatgctttaaaattgtgtagaccaagctattgctgtcagttttgacaagttgtactgctctttttttcgcttctcagggtaactttgtgccaaataggcagacgttcccctctggtatcaaggcactggcagattatgtgcatgcaaaagggctgaagcttggcatctacagcgatgccgggtatgctagctttcagatttatcataatgacaaactactttgtactcatccagaagtaacttatgtcatcattagcctagatgaactaagaattttatcgaatataaactatcaacaaatctgaaactaatagcaagactgtatttcaggtcacaaacatgcagtaacaaaatgccaggatcacttgatcatgaagagcaagatgtcaagaccttcgcgtcttgggtaaacctcgactcttttacctgtctggttatacccaatcaacattaaacactgaaactattattctggtgttcttaattcttgacctctatgttccagggagttgattatctgaagtatgacaactgcaatgatgctggcaggagtgtcatggaaaggtaaggagacaaaacatctcaaactgtcagctttatgcatcagattgctgatgagcaactgttttcatgtttaatgcagatacactagaatgagcaatgccatgaagacctatggaaagaatatcttcttctcactctgtgaatggtgagtttactctctgtaacatttagggctaggtcgaaggaacatgaagcattgctgattcactccactgtgtttttttttctgtatagggggaaagaaaatcctgctacatgggcaggccgcatgggtaacagctggagaacaactggcgacatcgccgacaactggggcaggttctactcatcctctctttaaccctgtttacatagttcttgagtttttcagtactgatcgtaattgccctgttatttcagtatgacatctcgtgcagacgaaaatgaccaatgggctgcctatgctggacctggtggatggaatggtaagaacttgagatgtatctgttcctaggttgcttaaccatttgagagcttcaaaatgatcaacatatgtttctgctgtgcaatatcagatcctgacatgcttgaagtgggaaatggtgggatgtctgaagctgagtaccggtcacacttcagtatctgggcactagcaaaggtaccatagcatgttctatgtactaataattttgctgcaatgttgaacttctttgcatttcctcactgcaagttttgcttgaattgttcaggctcctcttttgatcggatgcgatgtgcgctcaatgagccagcagacgaagaacatactcagcaactcggaggtgatcgctgtcaaccaaggcaagccttctcagtttcacatgcttagatttagccatacctcttggatatttcaccatactcataatgtaactctctgaacagatagtctaggtgtccaaggaaagaaagtacaatctgacaacggattggaggtatgccttcaatggcttccaaatttgcagtttctcattgtcccataagccttggcatgatcatgactaactctgaagctgacaatactttgtgtaaatttgtcggtaggtttgggccgggccactcagcaacaacaggaaggctgtggtgctctggaacaggcagtcataccaggcaaccatcactgcacattggtcgaacatcgggctcgctggatcggtcgcggtcactgctcgtgatctatgggcggtaaagcctttgctttcttcagagctcaaagtagaacatcttctcttcagaattcagagttcataacaaatttctgtcaattgtgcagcactcttcgttcgcggctcagggacagatatcagcatcggtggcgcctcatgactgcaagatgtatgtcttgacaccaaactagtcagcaaagaaaagcagcacaggttagtacgtgtccggcgaatacagctaaattgatcaggattcaggaagaaggtttgcaatttgcaaggattggtagagctggaaatgggatgccatttggttatgtatgtagaaataagctgtaagcctgtaagcgtatatgtaatcagccgtcaaatgctggcgagtgtatttctgaagtttgcaacgaaagttgcagcaataaaaatacaaaaagaaggctttcctgccactatataagatatgaacatatgaattttttgcatcgcctgaagacctgattatacggctaaacacttgagacacggcaactgcaggatatcaaaatgagacgacatcaccaacggccaacatcctcaagcaacaccgcctcaccaacggccccgtcgagctccagatggaccccatcaccacctccgatgaccacgacgacgacgacgagctcatcatcgataggaggggctggatgaactggaggacgccggagaagagggcgaagaggatgctcgaggaggaacaggaggagctggaggacgaagccagatggaggaataagcttaaggaggaagcttaattaattatgtggcttagtaatttgcaagtttctttgtgatccagctatcctatactccctccatctcaaaaaaaaaaaaacaacctaataagatgggacataatctatatcctatcctattctgactaaattaagtttttttttagacggagagagtatatattatataatatatatgagttatatagatatcgtctcgtccagaaaaatcgtcttttttatagtgtatactagttctgctcatcattatattatactataatgcaatcttgcatcttactcccccgtcccaaaataagtgcacccatggtttttcgcgcccaattttgacaatttgtcttatatgaatttttttttaaaaaaaactaaaaacataagtcataagtaaaatactattcatgttttatcatcttatatcagcaaaaatactaattataaaaaaattttaaataagacgaacggtcaaagttggacgcggaaactcatgcgtacacttattttgggacggaggtagtatcttgctaccggtgatttagaaatatcaagtacaaacagctggatgtacccactctctgctacaagtcttgctatctacttctatctacttcctccgtttagattcattaacatctatataaatatgggcaatgctagaaagtcttataatatgaaacggagagagtattaattttatcgtcttgcgttaacaatttttttgggtgcaaattcagtgctcgctgggtacttaagaatgactgatgttttttttaaaaaaattatttaacccataatgctatggccaactggaattggtatagttcattactcaagacatgtatttgattaaattaattactcttcttccatactgtaccttgtgctgcttgcagatttatatcgaggttcaatcagtgttcttatggtgatgatcgatagagaaacatccggagattttctagctagctacacagggtgatgggctagacgatttgggtttgaagtcttactcttataattatttgatattaggtcattttctaatattcgtgtctttttacggcgatgatcgacaaagtgacgcctagtcattaatttactgtcttattgccacacttttaatttccctcgtgtgtcatactcaacattatgtacatgtgttcatgccataacatatttcatcttctttttttttttgcatggtcctttaagagcacaaggcttcagaagttcgccctctgtggacaaggaagggcaacaccgaaggcaaggagaccttgatcacacaaccgcaccacctatataattcatgtcacaggcagcagatttcaggttggctatcccttttccctttgtttttgcatgatgatatgttagcaaatcaaagtacccgattgatgttcagattctaccacatcacacacattggaaacagaaaaaaaaagtttctcattatgtgcttcatttttacttcatccgtttcatcgtattgtattataagtcgttttgtattttttttctctagtcaaacttggttaagtttgaccaagtttatagaaaaaattagcaatatctaaaatatgaaattagttttattaaatctaacattgaatatattttgataatatgtttgttttgtattgaaaatactactatgtttttttataaactcggtgaaacttttttaaaaaaatcaaaatgacttataatatgaaacggagggagtattatgtttccttctttcttgaactttcgtgttatgaattgaagttggtttgtcaatgtcaggaagagaaaattgaggtttttgttaaaatggtgaaggggtttattgatgttttcttacagggtggcacatgctgaggagccaaagatggcaaccggtaaagaaatttcaggatctttgaggtcagtatggcctttttgcctctatatgtctttctatttaagataccacaactgatgtcaggctatacctggtaaatgaaagtaatgaggtcataagattggtgcataaccttgttgtcagcggctgatcttgatactttttaaagcccgggcaaatacatatgtgaagaattatatacattgttaaacactgaaaatttaaggtattgtaatggtgtgatccgccggtgagcctgggcagctgctcgaggtagacggaccttggatccgccactgcttgttgtccagatgtattgtcataattgctaggtgaagctgaaaaaaccaaaatgttttcttttatagacctgtggtagcctgccctcatgtggtttatgttatctgtaaggtttcatataactggtttctgctctgctatgcataattcttcttttaaatgctccatacttgttagaaaactaaaaatagagacaacgaatcatgaattctcccgtgctgtccctttatatatagggagattacaaaccgtataaagggagattacaaacctagttaattctaggcattagtgtaatatatcaattctcattctaaagataaaaatatggttgattcatttccttgcaattcactgttgatgtgggggagtggattgcaaggaaatgaatctctcattgctatatctttagagagagaagtgatatatcacactagtgccgagaattaacgaggtgtgtaatctccctttatacggtgtgtactctccctatatatagagggacagcgcgggagaattcatgattcgttgtctctattttgagttctctaacgagtatggagcatttaagaga

SEQ ID NO: 6186 - DNA, 1596 bp, Oryza sativa
gaatgatgtgttggacattaatggctgattcatattcatgggcatcatgaagtttggctgatgaggcattgaaggaaacatgaaaggcgcattaggcatcatttgctgtttgtcttgactaccatgctctgattcttggcggactggagtcgccccaggtgcattttcatgagcccagttgtagggccgatcaaatccttgaggcgggttgttctcacttggagtatcccctggtggataagagtgacgaccatggaatgatggtggtcttgatagcatagggggcctctgtggggtctggtctctggaatggtggtagcgagatcggtcatcacgatcttgcacatgagaacttgaagagggtgaaacaccagtccgaggaggagcacgtgcagtagacatttcaggcatctgagattgtctttgatcacccccagaagcacgggaaatgttaggagcatctggctcattacgttcttccctctctggagtattgtgcaggaggttggcatgaacttcaggtatatgagaatcaaattcagatctcttaaggaaagacttgagacacataggtgcagcacagataaaaatcccttccatcattttcacagtttgaatcttctgaatgcgctcatcacaactgaaaaaaataggttaacaaaagtttaaaagtggcaggcgccaaaccaagttgatctgtaacaaaatactagaagataacaatgctagctagtaagatttctcacttttagtgcaatatttcttgaaaaatcttatgagcatgtgcaacatttgattggcgaagagacacaaaaagtagcattccaaggcagacagcaacatgaagtgtatcactgcttacccagtgtccatagctattgatgtaaaagattaacacatcccatgaaagcaataacagaatgcaaacaagccatagtttattagtagtaccaaaccatttgaaattcatgcatactataatactccctccgtttcaggttataagacgttttgactttggtcaaagtcaaactgctttaaatttgactaaatttatagacaaatatagtaatatttataatactaaattagtttcattaaatcaataattgaatatattttcataataaatttgtcttggttgaaaatgttattattttttctacaaacttagttaaacttgaagcagtttgactttgagcaaagtcaaaacatcttataacctgaaacggagggagtatatcttatgatctactcagttgaaactcattttggtagaaaacttaacaactgaaggaaattaacacatcaatcaggaattctcagagatcatacgagaaacttcattccatacagaaagatcactttgttactgcatgttatcctactgagaataagtcaataaactaacaagatcaagttccagaaagttcaggagaatgcttacagatagcagctggaatcacttctagcacaggctaaacagaaagcatgttcacaaggaatctgaaataaataggaaaaaaaaagagatgtcataacactatcgtagggttcaccaaacatatagtaacaaaagaactatataaagttaat

SEQ ID NO: 6187 - DNA, 1322 bp, Oryza sativa
gaattcctgcagccctagtcaagacaaacagcaaatgatgcctaatgcgcctttcatgtttcctccaatgcctcatcagccaaacttcatgatgcccatgaatatgaatcagccattaatgtccaacacatcattcaattatcctctccaacaagatggaaatccacagttcttcagtgcccctttccagatgcaactaccagatgttggactggatcaaggctcagcctcgggggtccaacctacgccacctggtcctttaagcttccctgaggggcttcagcgtccatggggcatgggattgatgggcaacccatttcagtcgatgccacttggacagggaatgcctgaaggtgcaggtgaacctcagggaggtggcggaatggttttcctgcaaggtggtttcggagtcatgcctgatggctcaatgaattcaggcataccaggtagggatctttctggccaaggtgaccggggtgttctagcgcagatgcccatgccgatgcaaatgcagatgtcacttcccccacctccccctacacagcccccttcagctggacagcaaacttttagcagaacttgatgattatttatgtacggtaatttaattgttgctgtcaaaattggattgtacttatcgagaaaacggtggtctcatcattctgcgttgctgatgagaaatgtgttgtgccatgaacgatcatatccctaatgaaattcctattgagatcgaagttttcatgatgtttgtgtgattgttactctggatgatttaatgccattgtacagttggtgtaatctttacatgttgaaacgtcagaattcattaacctattaaaacgtttttggactttatctcatttcccatttcctggagatgctatagcagcagtggacttctctctctctctctctctctctctctaatagctcattacacttacaatcaactaaatagtgctcgcaaggtggtaaggagcaatatctgacgactgatgggaaaagaaaaactatatttggtacctgctttgttgcagtactgttgccctgtaattatataactctgaacttgcagagatttttgaatttttgttgactagtatttgattgcaaaccggatggtacaagaatttgctgtacatttgccaaggatgacctgtatgtttcctatctatatctttctctatagctgtctatctgttccaaggaaaaaagatgagtatttgggcgaaatatcgccgtatggctatcatatcatctatctgcttgtcagctgaaagatatcctgaagaaagaggcttagctcctgtgcagatcttcca

SEQ ID NO: 6188 - DNA, 9883 bp, Oryza sativa
atatatatatatatatatatatatactttaaacttcttgcgatgaactaaaacttttttcccctcaaaccacagcacagctagcaaaaggcaagcacatagaaaatgaggaaaaatgaggaggagctagggttttactataggtgcatacgaggcggccgtagagggcgatggggaactcgcagcggcagcagatgtggacgcgctcgccgagggggcggcgggagcggcggccgatggtgcgggcggccgcgacggcggaggtcgtgacggcgccgaggctctttgccacggcgaggtcggcaatcaccaggtggtcggggcacgcgaccgtaacggactccggggccccgcccgcggccgccgaggccgacttcggcgggcccccgccggcgcggcgccggcgccgcctacgccgccgcctccgaccccgccgccggccccggccgccgcgccggacgcggcggcgccggagtccgacgagccgatcttgctgaggcgaatctggagcatgtcgctagggtttcttgccgcttctcttctctccagttgggtgggggattttgtttgtttgcttgcttcctcctttcgttggggcctttcgttgccgagtttgggccttttgggctgcactttggcctgctagaatgtaaaaaaggctttcggcaaaatttaaccattttgggcttgtttggcagagctccaactctttagctctagaagttggatctatagtggagttgttgagcaatctaaactcagctcaactcatattttaggtggagttgaaactgtttggctgggctttagctccataagagttgaagctagagttggagccgtaccaaacatgcctatttttttataaaaaaaatagggttagagtcgtaattgtagttgaaaataggggtgtcggacacaattgacttaaatatgtatatattttattttgtttggaactaaaatcattggactttggttaccctgaactaatccatttgtcctaaaataagttcattaccaatacaaaccaaaacaaaaattagaatactcctactttatcaaatattatgtgattatttttcattttatttatttccaatgcaattattcctaattgcataaactttggtgtaataattactcaaaatgcacctattttggaacaaatgggagggaaatatgaactaattgtggaataaagggagtatataaaattaataaaaaaagatttgggattgtcataggaaacttaacagggttagttttctaacagtgaaagtacatgtaccaacctcttcataaaaaaaagacagccatttcttttccatgacatgagagtatagatggccatctgggctgcccagcatggcatggcccaggcccggtcatgcctgggctgaggcttgtcgggccggcacggctcgaccgacacactaggccgtgtcgtgccaccccaccggcggcatacacggcccaatactactcgggccgtgacgggccggcccgaaggcacgatggtccatcgtgcttcctcagagaaaaagtctatttttggtccctcaactctgtggggtgtgtttaaatggctggaaaataagtctattttgtatacctcttgtcttgggccttgccttagacgactatttaagtctattttgcatctctatattttttttatttgatcgggccatgctgggccagcccaccgtgccgagggtgcagcccaggcacgacccggctgtcggtatcccgtcaaaaacttccagggtaaaaatttccacttctcatgccgtacacattataccctaggagatcatgtagagaggtcatcccccaatttgctgcaagcctgcactgctgtctctgctgccggcaatggccggacaactcacgatggcatccttacaacttcaaccactgcaactgaattcattcaaacccatccgattcctgtcgttagatggtagcatctgtaaatgttcttggaatatccgtttcaaaatatatttatctgtcattgaggagatcaagatggagtttttactgtagatatatttcagactttgtccccaaatttagtgctttgattgatgaatgccatggagtactactattaggtaagggtatgccttgtcctttctcattaagtttttttcaacaatttgcagtttgccgtgttcatagtaatgatgcaatttggcattttctgttgtgaatttggacgtgcaatcaatgaatgaataaatgaatacatccaagtttccaacaatttgatgcctgttcagtagtacttcagtcctcacatccccttctgttctctctgtagatgagatgagaagaagagaagaacatgagctgatgaccatttcattagttctcaaaaaaagatgaacacttcatttccaatcacatcttctattatattcctgtctgatctctgaattctatcctaacctctgtagaaaaaacatgcaaggacattggtaatttagttgaacatactagcaggcttccaaaagcaagttagaaaatattcctcatgccacattgccactttatgccacgcatgtattcgcccataaccagacaattcacacaaaccccatgatctactagaatttcagctggctaagttggcaagattcagtcactgtgccagtaaagggttgtaattgcacaccaacttcagacgcttcatgtcattggattaaccagcatgctatgccgtgctgagaagggagcctcacctgtctcacatgtcttcccctctgaatgcagcaagcacaagatttaagcgcaagcagctgcttgctctagtcgtaaatatttgacgtttagaacaagactcagttaaacttttaaaattccaaacaaataaaatggtatactttatttgccttgaaaagtacgatcgtaatattataaaactaacacacacatcacctaacactacgaatctggacagggagttaggcggtatctaatctagtactatgttactgtattttaggatggagggagtattagattttatatacttgcttcaatgtggaattggtggtcggaatttttgaagtttgacgaaattttgttctcaacaaataaatgtatttatgataggagggagtactggtgtactaccatcctgggtttctcttttaatttattggatctcttcagtcatggggctggctcatggtggcatcatgccatcaagatttccatctacttttgccaagatatttcctgcacaagattactactactatccacttttgccaggatatttcctgtaccactgttcacaaagatatgacaggttcctgtgctttctatcctttcatcaaaccgtatgacatcttgtgcccagttgctgctgttgcacaatggtttcatttgtgtttgttattgcaactgctcactgcattaacttctatacatgtgatctgcagctagcatcgtctcagctcatgctgctgctgccaccacacctagggtgtgtttagttcatgtcaaaattataagtttggttgaaattggaacgatgtgacggaaaagttggaagtttgtgtgtagaaaagttttgatgtgatggaaaaattggaagattgaagaaaaagtttggaactaaacccggccctatccattgcaatatttcattgaggtcacagagaaaagatggatggggatcaacccattatcaccaatttatgttacaacagtatctttgctttttcaaacagttacagtaacaaagccctgaagatagaacagcttgtcattactgatgaacatcgccaaaccgcttcttgacaggccacaggatcttgttatgttcagactaatcatgggtcatggaactcgcaagtagcatatatacagtttgttcttgtccaaactccaaactgcatactgtatactctcctgacaagatagaatagcttgccattactgataagcattggtgaactgcttcttaacaggccacaggatcttgtgatgttcagactaatcatggatcatggaaatatcaagtactactagcatatatacagtttgttgctcttgtctgcatacaaataaactctcctcacatgataaaacagcttgtcattaattacttatcaacattgcaaaattgcttctttaacaggccacaccatcttgcaatgtgtttagattaaatgatggatcatggtacaagcaagtagcgaacagtttgctcttcaatactcataaatatcatatgtcctttcttggatgtttttctcttgcacaaccaaactgcatactgtcctgacaagatccttgtgaaaatcttcagtaccttgctgccatatgcatcattgccaatctgtagcagctgtagctccattttggacaaacccactgctgcaagatgccatccaaacaaaatggaaccatcaaatttccaacttgaataagttgttactactaactgcagcaagatcagagataagacagagacctgaaactaagcactagctaaacttgcattcagctgctgatatacaccttgatattagtaattatcaatacaatacaacaacacagcttgatcgattaattaagcattgctactactataacacacaattatcatatcagatattcaggttcttttttttttagttcagttttagcctctccctctctctctttttcttcctctgtctccacttgttcagttgaggagttcagagtttcagagttttcagaagccgtgtctgtctcacgggtggtcaggccggcggcaggtcgtcggcggcgtcgacgacgtaggcgcggagcgacggcgagcgcgcggcggagaggtccgccccgcggccgcgggcgcccttgccctgcacccggcgccgcgcgacgtagccgcgcacccacggggtgacgtcctcgctgaccttgatcatggcgaagaagaggaggcggtagatgaagatcatgctgaagagcacggcgaggtccagccacttggatcggctcacgtcgatctggaacacgttctccaggatgtactcgccggggatcttggggagctcgtcgtcctggttgtcgaacaccaggcccttcaggtcgttctggtactgaccctgcaacaatgtcagatggaaaaaaaaaaccagtcaaacattcgaatctgcacattttttgcttgaatttgttgctactcgtgtgtaattctccatagttgttttatgttctattacatgtggtggtgaaagctgataacagatgtataataagcagtttaagagattgacaaaaattatgaaaaatatcgatcaaacccatcaaaattcaaatttaccgcttttttgctggtagtttttccgaatttattgttcctcatgtataattatcaatagttgttttatgttctagtattacatatactagtgaaaactgacaacagaggtataaccagtttaagagattgacaaaaattatggaaaatatcgacgaaacctgtcaagattgaaattggcccatttttgcttcaaatttctcaaattcgttgtttctcatgtcatgttctatacatgtacttgtgacaacagaagtaacagcagtaacacatggacaaaattttgattttgattttttggtcttgggtttaaattttcctgatttgttgttttaaaccctgatttgagttcactggttgcttcagtttatgagctgtaaaaaaagttgaaatttttacctgcaatgcccagtagtggaagctgatgtatgacatgggatacctccagaatggctttgggatgtcatggggaagcctgaagtatcctgaaaccagcatgaatatcccctgtccatttccaaaagatatttttctcttcaataaatgttgttgcatgtcatgatcatgagagaatattaacaaacatcaacattatgttgtgcagttccaagtacagtgtcaaaatttaatcccagtttgtatgcgttgcaggactccaaacagtgcctgataaagatggacaggatcaagttgttgtgatggatggtaattaattcacctgaattcctgcaccgatgatgatgcccatgaggaagttggggatgacactggcaatggccatcatcaagctctcgacgacggtgacgcttgcgtagaggcagaggacgaagaagaggtagtgcgtgaagcccgggtggaggcgcaccatgaagtagcacattgtcccggagatgaaggtgatcaagatcaagaatggcattgccgagatcgtgttgcttatcacgaatgccagcacgccatagtgcccattgagcctctctctctgaaacacctgaaagagcataaaaaagattctgtgagcatggtttgctgtaatctgaagaacttttctaacccatttgttgattcagtggtgacacaaaccttcatgtcttccacaaaagacgggaatcctccaatcgacatgaacgtgacaaagccgaagacgaaagaagcacatgcacctcttgcctaattgttttcacagttttatcagatcaccaagcttaacatcaagtattcagttcagggtagctagatacttttcagtgtaagtttgcatccaaatagaagtgacaactgaagaaggaaatttttaccagaattgagctgtatctggtgccaacattgaggtagattgtcccgatgcagactgtcacaacaatgtagatgataagcctcagccagtagtacccgaagtcccgcgacatgttgatgaacgatcgcttcgtgagtgtgaaagcctgcatccaaaagctagcctggctccctcctgcatccagcactgtccctttctgcaacaaaaataccatgtgagtcctcttagcttgcattacaatggtctagctgtggttgaatgtttggggaagttgctgtagtaatctagttacttacaacccgtgccatctcattgactttctgctgcgcagcaaagtagtactgtgagttcttgtagtaggtgatcagccttctgatggcctccgaagtcataatccgatcaagtgggtcatcggatctttcaaactatgtatgcaaaatgtgagcacaatttcagtcaaggcatgcacaggtaagagtgccagttgtaggtactaggaggagactgactgaatcctgaaacttactcttctcttcattgatcctttcagagtggccttcaccttgtcgaagtctgcgtttatgcatctgaggaaatgatccgatggattgcgcagcggtgggcaagggaagccggcttgggcaaagaactgcaaaatgcaaagaacagtacatgattcagggaacccatatagatattagcattgcagaagcaacttaatagagtttgtgaaaactgacatacctgacaagcttcagaggccagcccaaagtaaacagttttgcctcctgaaaggagatacaagcggtcgaaaagctcgaaaacctcgctgctcggctgatggatcgatgctatcactgtcctgccatccctcgctagcccacgcagtgtctgtgtcacgaagaacgctgaagcactgcaacagattaatcatctgcacatcagttacttagacagataattgctactgtaacaattacaatcacttgacaaatgacaaggcatagtaaccttctgatagttataccaggaatgagtttgataaacactactggttgaaagcaaagcaaggtagagagctgtgcaaatcaaatctccacatctcaagttcagctagattgctatcatgcttgctagatagctagattgctatcatgctgggcctggatgtaactaaatgtttactttattttctcccaatcttaatgaaattggtcggccagcctttggccgacccggcatgcttgcatgatccattaattaatgtaataacaaatgatttgccataaatataatagcagtacctacctgtcaaggccactggttggttcatccaggaagagcagcctgggcctcatcagtatctcaagggcaatgctgaccctcctcttctcaccaccactgattcccctcaggtgccaattgccgaccaccgtgtcggcgcagtcctgcagccccatctcgacgattgtgccctcgacaagggcgcgcttctcttccatgggcatcttgtcgggaaggcgaagccgcgccgagtatgagatggtctccctcaccgtcaatgtgccgatcaagttgtcatcttgggtcacataggcctgaaattacatattttactgaaactttcagtaagctggagcctggaggtaacttcttttgttaccttgagattattactgcatcagacgaagtaagataatatatgcacataacttcaggtatcaccttatcatttttgacaaggtagaactttttacatacagaaattttgctctttttttccttgataatactttatagttattgattggtacagaagttaaactacttcctacatattaggttgacagttttgacagaaacaaatgaagcacaactgcacaagtcatgaaaaatatcagcaacaaccttcttttggactatgttttttcttttaaaaaagctcctgttaagtcataaagaaatgattttggacaacatggtgacacacgctacatgtacaacaaataatcaggattgtcaacagatcatgagtttttgatgagcatagtttctgaaaaaactggtaaaccacatcccatctgctggggaagttcctagttttccttgccaacaagctagatgactgaatgagtgttaactccattaccaaacacatacctgaaagagcttttttttttcctatctaaaaattaacaagcagaaactagttaattgattgagccagatcccccaattaatcttggccagaaatgggtgatctatatccatgaaagggagttattaatgcagtaaattacatctgcagagaggcagtctgtccaaacacatgcagaagccagaaagcagcaaggttccaagaaatggcacgtggcaacaacaaaaaaatgacccatttctttctcattctgaaatcggttgttcaggtgattcagataaagacccaagtaatgaaagcaacagaaaggaaaaaaaatatacaatacacattctaatcaaacacacacaaaaaaaaataaatcttcttcaagaaaatgaagtactgcaaaaagaacacacacatattccatgttttttttttcttttgtactacaagtattctccctgtgtgcagttatacttcaagaaatgaactacttcctccgtttcacaatgtaaatcattctaacttttcccatattaatattgatgttaatgaatctaaatatatatgtttagattcattaatatcaatatgaatgtgcgaaatgacagaatgatttacatcgtgaaacggagggagtacttctttagtttaatgtgcagcttttaatccagaaaaccattttctgaagcagaatccaatcccatataaaagcaaagctgattagtatttactagtatttagtactattgtactactactaataactgattaacttagcgttgcggtcagcagttcagcacagtggcgacgggtcgccggcggcgaggtgtgcgtgcgtaccgcggcgccgaaggagaggttggccttgcggccgttgaggaggacggtgccgtcgaggaaggcgttggcggcgaggcggccggcgagggcttctatcatggtggacttgccggagccggaggggcccatgagcgccgtgatggtgcccggctcggcgtgccccgtgagcccctggagcacgtcctgcgttgtccctcctccgccgccgccgtcgccggcgccgagcacgacggtgacggtgaggtcgcgccacgccaggcgcgccgacacgt

SEQ ID NO: 6189 - DNA, 11377 bp, Oryza sativa
agagagtaagaggggcttcgtatgacatgtgggtcccactttttttaaaaaaaaaaagaaaatgctgactggattgctacgtgtacgccacgtaggacaaaaccgctctggattggatcgagggggtaattcgtccggtattgaaagtttgggatgaaaaatgtctggttttcgggttcgggggtgtaattcggtcgaccgcaaaagttcagggggtaattcatactttttccttttttctttcctttccttcgccgcaaagcactccaacgccgccgccccgatctcttccctccggcggccgccatgtcatcggcggcgaacgaattacttgttcagaccgaagagatgctgcagaaggaggcgaaatggatggcttaagtcaagctaattttagatatttattattttgtgtatttgagaggagcaatacctgtactttattatagcatagcaagggacggcttgttcttagatgatattgtggatgcatgttgattaatttttttctaataactctatcgctcttttcctaactatctgttctatgtaccattgatgaagcatatattgtgtcgctgtcatttggttgtttcatttgtaatattagttgtcaccgtagcgttagcacgggcatactcctagtgaggaggaagaggatttgcttcgccgcgtcaccgggggaggtgtcacgttgagattcctgctggggctggggttgggttgagattccccaggcgcccgcggcggcctcgatctgggcggcgcagatcagaggacggcgcggatcggcgagcttcgcactgggcacgtgtgcctgtgtgtgggagtcaggcctcgcagccgccgctgctgctgctgctgctgctgcacctgtcagctagggcgggcatggcgcgccgcgccgcttcccgcgctgttggctcggagggctcgatccaagggcgagggggccgcgcggggggcaatggcgccgaggacgcacgccacgtgttcgacgaattgcttcggcgtggcaagggcgccacgatctacggcttgaaccgcgccctcgacgacgtcgcgcgtcacagccccgcggccgccgtgtcccgctacaaccgcatggcccgagccggcgccgacgaggtaactcccaacttgtacacctacagcgttctcatcggttgctgctgccgggcgggccgcttggacctcggtttcgcggccttgggcaatgtcattaagaagggatttagagtggaagccatcaccttcactcctctgctcaagggcctctgtgccgacaagaggacgagcgacgcaatggacatagtgctctgcagaatgacccagctcggctgcataccaaatgtcttctcctgcaccattcttctcaagggtctgtgtgatgagaacagaagccaagaagctctcgagctgctccaaatgatgcctgatgatggaggtgactgcccacctgatgtggtgttgtacaacaccgtcatcaatggcttcttcaaagagggggatccggacaaagcttacgctacataccatgaaatgtttgaccaggggattttgccagatgttgtgacttacagctctattatcgctgccttatgcaaggctcaagctatggacaaggccatggaggtacttaacaccatggttaagaatggtgtcatgcctaattgcaggacatataatagtattgtgcacggatattgctcttcagggcagttgacagaggctattggatttctcaaaatgatgtgcagtgatggtgtcgaaccagatgttgttacttgtaacttgctgatggattatctttgcaagaacagaagatgcacggaagctagaaagattttcaattctatgaccaagtgtggcctaaagcctgatattactacctattgtaccctgcttcaggggtatgctaccaaaggagcccttgttgagatgcatgatctcctggatttgatggtatggaacggtatccaacctaatcatcatgtattcaacattctaatatgtgcatacgctaaacaagaaaaagtagatgaggcgatgcttgtattcagcaaaatgaggcagcaaggattgagtccgaatgcagtgaactacagaacagtcatagatgtactctgcaagctaggcagagtatacgatgcagtgcttaccttaaagcagatgatcaatgaaggactaacccctgacatcattgtatatacccccctaattcatggtttttgtacctgtgacaaatgggagaaggctgaggagttaattttttaaatgttggatcaaggcatctgtccagacaccattttctttagtagaataatttataatttttgcaaagaagggagagttatagaatctgaaaaactctttgacttgatggcacatactggtgttaagcctgatgtcattacatacaatgcactcatcagtggatattgcctagccggtgttgacgtaaaacacgaggcctgggagatctgcttaactccagtgcaggtccaaaactcgccttcgggtatgcttagcgtgccaattgatttgatcctgcaatcaacaagaaacaaagacaaagaaaccgcggttaaatccataaacgatagacgatcggctaggtgccgatgacatatcatttatctttgagccgatgtcatatgtgcatcgatcggcagtcattaataaataagaagggactaaatctattcgatcggctgtagatattaacaatatatagtccttatatcgatatatacttaaatcaagtgattgggatagatcggactccatgccgagacagtatgaatcacttagatcgaaatatatattaataatgagattatatacgttcatagcatagccgatcagatggatctagcatgtatcggttgatactccgatactactctatattaagatattaaagcaagtagaatatactaaacaaaagcctaatatacttaaatgcagcaatatcttaatataaagggcagatttaacatgtcaatcgagcatataggataaaagtagttaaatcaggtaagatcggctgaaaccccgatactaccctaatcggcaaccaaagacagactagagattgagattctaattacgactcataagatcaaactcaactgatgcagctataagtatgaaaagaaggataatatctagacaatcaagccgttggatatgtcatagagtggtggatatcctatataatctaagtcaacgtcggtatttaacctaatcggctgccttctagtaacagacgttagccgattagaggttagataacgatattgccaaagattatgtaagatatatgataactcgacgaattacataaacaagattagagtgtcataaagatggaagcactaatcccgagaacgcaagccgccataacaagttttacctcttgttaaagatcgaaaccgatgcagctcaacccgaaagcaagaactcgtcgaaataaaactaaagcaaaaaagggtggcgatgcgctgagattgttattgaacgtgtgttatcgattacatagggttcgggtctatttatacccgagaattacaagatatgtccataccggacacgactcttatccctaacaaactctaagataccataagtctttgcggcagacttttgcccaagcatatctctaaggaaattatataaaatatcctaattaatagatacaattaccttcccaggactctatccatgcacggcaatcatcgtgaagcatatcaactcaacccgatgttgtacaccaagtcatattgtcggaatcggctgtatcggcttacccagtctgactcggacccagctgatcctgatcgtagccgattcggactccagccgatttttgctcggttctcgaatcgatctccgcctccgtctccacttcaacctaatccccttttccgatactgatattaccaaattttgtcgttaacagccggtaagatggatgaagcaatgaaattactccctggcatggtctcagttggggtggaacctaattgtgttacttaccacagtttgattaatggatattgtaaaggtagtaggatggaggacgcgttggttcttttcatagagatggtgagcaatggtgttattcctgatattatcacgtacaacacaattctgcatggtttgtttcagacagggagaatagctgctgcgaaagagctctacgtcaggattgttaaaagaggaatagagactgaacttagcacgtgcaacataatccgtcaaggactttgcaaaaacaatctcactgatgatgcacttcgcttgtttcagtagctatgtttgttggagttgcagcttgaaactaggacctttaacattacgattggtgcgttgcttgaagttggcagaaaggatgaagccaaggatttgtttgcttctctctcagctaatggtttagtgccagatgattggatgtacaagtaaatggaagtgttatagaacaggggttgctaggaaaaatggataaatgctacagttaggaagctacttcacaaagggcaggtaggcagggctggggtttacctatcctaaagtgatcatattggtcttttattgattatgttgatattgtgtgtttacactacttcaagtctcagccctatattatgataggttaggggtctttttttggtattgtattatcttgctgataatcatgtcggtgacttctgtttacgtttaaaatctcatgctttaaattatgattgttctacatatggtcctactctgcatactaggaaatataaaatattcatgtttttatatttgaatttagtcttcttgcgggcagttctctttcttccttttcacggaactatctcctgatgaagtgcaaccctgattatttttactgcattttgctggcaattaaattagtttacaagggcttgtccatttatcttctcagtagatgtgatgtgcagaaaacatgacagcatcttttgtttgcctctataggccaatgttttttggtgcatggtctttgacctacagattatagctgtaaatcttatatagaagggttgttgcaatgattctgattaactgattgtatctatgaagttgaatgctagtggaagctcctttggccatgttatattttgtgtctgcaaagaacagatcatttctttctttttaaaaaaattgtgttaaatgcactgttgaagaatgcctaacaatttctctcggcagagagtgaagggaatgtttatttggtactgttctagatctacagataaaattcttattctactgtttctttgcttgaaattttcatgcagtggatatccagttgacctgttgcattgatggagaaaggaatcaatcagctctgaattgcctgtaacttctgcagttcctgtgtgaagtgatctatgtatgtccgcggtttgagaagacgcatcatgttctttccgtgtggaaggtttgccacagcgacgagatctggatgtatatgatttcagaacacttatgttagttgttttgagttttctagctcaatttgatgcatcgttttggtctgctcccttgtacatcgatgcagagcagaagaagcggcctgaagacttcttttttttttttaagactttgaagcggcttgaagactgatttccctgaaagcactgggaatgacagattgattcggtgcattgcacttgaccttttctctttcaatttactgctggtgattgttgtcactatttaacttgtactcctgatgttctagaccatttatattatgtatgtgtttatttatagatgatgtaaatatcagcgcaaatggggcatgtgatttacttatatttggggactggggtagtattcagcgttgaaccagctgctagcgtactcgttgtcagagaatcaatacaggttcagtttgatgggaaaatgagtttccctgataatgctaagtaattgttatggcataatcactcagttgggggcttgcagcctctgtccaactgcataagcttccagttccaccgcttcactgctaatagcattttgggctgcgctccgttaccactttcgaccttaccaaattttaatagggtctccaactaaatttgtactttcaacatctttaccctaccaaaatttagatgttccggaagtttcctctcagaaacactaccagatttcagagagattccaaattaactagcatattcaatgccaccaacattgggtaacaccaagatttggtattgcccaatgttggtaaggttgatgttggaaataaagtgaacaaaccctttttattttactactgtcaccgttttgagcttcctgttaaacccatgtcttctttctttttttactccagtctgatccatgaaggactacaagtaatcaagtcacaagtctgaatccatgaacaaaaggagagacaacattgggcagtacagcttttgccgctaaaatcaactagatagtcgataaacacaatatgaaagttatgccgctcactacagttaggtggcatctatgtaccgttctagcaactatggcaaccgatccgcaattttctgcagttgaactgaagaacaaactcagctgtgcagtgacccccctgttgcgaatgtcctccagcttactaaaaataatgggccatgcgagaggactggggcgcctgcctgctgttgctgcttgcgccgatgaagccttgcagaaggctctgtgcggctttcacttgatccggaatgccctggatctccacaatggactcggaagaaccgggatgggcttcgtgcaacttcactctcgcgccagagatctgggatcaaggggagattttcatgaggaaaactattggaggccattggggcatggttaagactgggcatagtgcgtgatgtttcgcatacgctatacctgacggatctcagctagattgacaccaccagctccaatgacagattccagataactatttggaatccgaaattcgacggagccacctggatacctgcaaagagatcatcactcaatgattatgaggacaaaattcacgtttgtgtcctgtaaaaattcagtttgcataagccatacccagtgagacctgacagtcttcggtaatcctcacgtccatggatctgctcagcggcctgaaaagaatgaaattcaaatctattaagcactgaagagaacaaaaatatacattcagatgcatcagagaggcatcaggtgaaccaggaaacaaggaaataaaaaatgagaaaagatcaacacccaactaagaaaactggtaagcaacagcagcagagaacagctgaataactgaatctagggtttgcaacaacatcgtaacaattgaatagtgttaccaatgatagatattagagtgggcacaagacagaaggatatatttggatcaccatgacatattctagaatattttggtccttttttcagacatctgaaccatcatggaagaaaatagacataatgcaacagtcatatatatggtttcatgtttctaatggaaacatatcaggcgagggccatttgcaaagaagaggcaagctaacgcattggaaatgtacctcggtataatcataagcattggaatttccagctctggtgattcctaattgttgcacattactattcccagctctcgagaggcctaattgtagtgtacccctactagagtacctatcagtaggtacttggtcaagataagaacggcgggacatataatcggcaccaggactaatagatgagggcagttctctattaggcaagcgagtagttgctgcatatctgtcgtatgaagcagatggtgtaactttgctatttccactagggtactctcttttagagaagtactctacaggatacgcagtgtaaggatcacgaggcccatcattgttcaaccctccatatgatgtatcattggcaggtcttctatatggtggatcaatggctggtcttccatatggtggatcaatggcaggtcttccatatggtggatcaatggcaggtcttccatatggtggatcattaggaggccctccatatgggggactattggcagatcgtccatatagcatgaattccctgttaggcaagatatcaacaggaggaccatcaaaaggggcaaaaggtgtcggattattggaagaacttccatctctgagtgtcctagttctaagcctcgaagcaatctctgtcagggctcctcttgcaatagctggaagcccagcaacctgaaagcttggaacaaatgtaaaagcacaatgaaatgttaacaagtaaaaactgtagttataaaggtaatatatggatctctggtgtaggtatggccaaataaattacctgcacaagctcctcatcaaaagacaagtacttaggtttatctgcttttgagtagactcggatttcagccccagtccgtcttctcatttcagtaattacctttccaccttccccaataatacaaccaactttgtttgatggtacaacaagccgtgtcgtcaagtggtgattctcagcaagtgtacttactttactatggagcaaaataagcgcctcaattgttggagacactggatcatctggaatctggaaagaaaatgtaggaggatataatattgtaaagactcatgataaaaatggtaaggcaatgccaattggaataatcatctgcatattacctcctgagatgaaacaacaattaacctttcttcagaagcatttttgccaacttctttaacctgaacgcaagcacctgtctgctgttcgacttgccgaacattgccaccacttttcccaataacttgaccaatgtgttcagaagcacacagaattttaatagagaactcttcagcttcagcagaatgatactgcagtggcctgtttctatatggatcaagcaagggtatttgtggtgagtgatccacatgcaggtgtggcaacattggatttgcatgtggtaattgtggtggagcctgatgcttcctttgtgtgcttgcatctataatttcttccagaggtggattgtctttacgaggatgttgatgcagacgagtagatatttcatagagagcttttcttacaagggaagaagatccagatatctgaaataacataagcccaagtgacagtgatttccaaaaacaacaaattgacaaagcaatcatacttccattgatgcacatcatggtattacattgcaattttgcaacatgaaattacatatcattaagaaaaaaaggcatattgataaaaagttaagagaggtaaaaactccatgccagatcaaaaagttccattacttagttcattcaagagcttaacagggcatattgacaagaaactcagatagtagtacaaggattgatatatgccatactgagtgatttgtttttcacgagtaacgaatgaacacaaaccaagttaactgataccattactcaaggacattggtatgaatgaaactacggatacaaaacaagttggaacaaaagataacaaataagttttttgaagttacctgcaccaattcatcacttttaagtgcacactgaggaagattttcagatggtaagacacggatccctgctccagtgtcatttcgtagctgttgtataatggagccaccttttcctagaagacagccaacttgatttcctggaaccaaaattcgagcaattacatcatcaacattttcagacttttcatgaacaattccagcatggagatcttcatctgctgcaattttgtcatgtatcttcaacagggcatcttgggcaaaacaatgaggcttcatgtcctcaaatccatcagtagaaatattttgagcagcttcttcagtctgacttgagtagttaaagataataattactctctcatctgcaccaggaatggaatcagcgacccttatctttgctttagttgtgtctcttagtgccttaacaatatcaccgcctcttcccaagacactgccaatctttttaaccggacacagtatcctgtaaatggtttctattggctcagaagatatggttccatcatcgtgccttgagtttagccgtttcctctttccgtcatcagaattgaaatgtggcctttttctggaagtatttgatttatgccttctagatctatcatgatccatcagtaacctttgcctgcataaggaaaagtccatcaacataaatgagaattagacataatgtaggacacaggcaacacacaaataatggacatggcgcacgatagaagtatgagaaatgttccatgatggcaacatgcatgaccttgtaacttttgcataactcaacatggaaaaaagttgccattaaatgcttatgtggatactttgggcctatggaattactcgtagctgtttgcaggaacaataataacaggcaaaggctatacatctaaactttaaagtcacctcactgaacacacgccacagtaactaaatatataccttgtcatattttctaaagatgtatctatacagtgcttccacagttccacctattgtattccttcaaacaaacatttaccactatctagtttagtctcactgtggcatgatcttaattgatccaagaaaggtagtgaattttataacgcacggctcaagatccaagtatcaatatttgtaaagtactcgagtcgtgcaaactcacagtaggttttttaaaggcaaaatgctgatatcaggccagcgtgtccaaaaaggaataccatggcagattaatgcgcagttgcacattattggagtaaacagattaagaaaatgacaagcaacagacacaaagggcatcctgtcattaaatgaatttaatggagatgttccactaaagcatttcacagaaagtaaaataaaaggactatgtataatggcgccaaacatcctttcgtagagatctacaggtggctgctaggcaactggacaggtaggacttgaatttataataacagggtcagcatacaaatcattagtcacatgtatagagcatcacattagaagcaaaagtcatcctaacgtacgtgacgtgcagcaactccataaatggaaagaaatgacaaaataattacactccatcaaggcatcaggccatcgcctggtcaataacggcaataactagctcctgaataagctactgaatgcagaacatgagatgccaaattgatgactgtacacttgccgccttgttgctgccctactaatacgtaatcaaataaagtgtcatgggcagtgggccgagaggtcgaggccttccctcgtcttacggtagctcagttggttggataggattaggttgggtccttccctccatctatataaggatgaatccagggggggagg

SEQ ID NO: 6190 - DNA, 14731 bp, Oryza sativa
cgaccaccgccacccccacgccaacgagcactccgcccgccgccgcgccgacttcctcgccgccaaccgcgcctgtcgcgcccgccgttgccggtcgcgccgccgcccacctcctgccaccgcgctgtgtgagagagagagagtgaagagagagaggatgagggaatccgtatgacatgtgggtcccacaattaaaaaaaaagaaaatgctgctggattgccacgtgtacgccacgtaggacaaaatcgttctggattggatcgagggggtaattcgtccggtattaaaagttcggggtgaacaatgtctggttttcgggttcgcgggtgtaattcgatcgaccgcacaagttcaggggggtaattcgtactttttccaaaaaaaaagaggagaaaaaaattgggggaagttggaagccgtcgcggtaggagtagtcagtcgtttgtgttgtgtgatcttctaatctatctatctatctaccctataattcaccaactcactcttacacctacgttactcattcatcaaatccaacggaccagaatatctcccgatcatctaacggtccagatcactcctcctcccccgcgtgcgtgttctctccccaaaacccgctcccctcgccgcctcgcccgctcgctccctccttcgcccaaccggcgtgcctcccccacgtactcccccgagcaaaccctaatcatcgcactgcctctccggcgcctccatcccctcctcctcgccgtactgccttcacatcgtcgccgtcgctcctcctccccctactgcattcctcttgcggccgtcaccaacgcactctccaccaaatccctattgctcaaaggacgaacaaaaagaattagagcgaacaaaaagaattagagagatggggattggaatcaagagacagatcagtaaggaccgacaagccagattcgtcgacagatcacaaccgatttttgggtttgatgtcttccatttgatttttggcgctcctccctccttgctccgatctggcctaagtgttgccgcccgattttcgcggtcgatcccggcaccagccccttcctccggccgtgtgtgagtccgacattccaagtccccgcggtcggatttctcaaccccggcatcggcctcgcactgcaacaaggtaagttattattgggatgtttatatctgaaaattcagataatttcttttgaacttcattaattgcttggtcagcaacatagcccaggaaaccaattaaattgatacacatgttgtgtgctctctttagagatcaccatccaaattgacatccaaattaaaaagaagaatttaattatctaaatcatgatgccaatattgagagcttcttttactttccgttgtatacattattctgtgatgtgtaccgaaggttatatacctcaattctggaattgtgctctattgaaccacttgtattcatactgtagtttaccttgtgtcgtttaagtttgtctttgcatatattaatgaatggcatgcttgcacacacacggaaagttctgatttgtgcatgcagtgacaatttttccctttaaaaagtcaaatttggtttacatttttattcatgacacctaaatatgtaaaatgtcgtgcattagtaatgtgcaagcactttcgatgtattgtctaaactctaaaggaacaacttaccagtttattagtgaattccggttgccacagagcatgcaagcctagatgagtacatggagaaatggtttggactggatcaatactgggcatgcaacaaattactgcgacagcacgggcaaaggttaattaagcttgccttgcgttctttactgaatggtttatgcatctgtttaggttttatgattacaattttgagtttgcaaatgtttcagtagttttactcaatgccctgtaaccaatcatgtatttgatccaatttagtaatttacgcaattgagtttagaatagtttcacaaatcaattcggagtcaaactatcaattgtttttggtgtttcaggtcttcagactgaagtttcaaagtagcttcatcaaatttttgaaagctttcagagtgattgtggaggtagccatctttgccctccttgtttcaggattgagtatatgagagactgaagtgaaggaggatttgtgcatgaaaaatattgcagaattacttagtatagaattacatacatagtaataaaattctctaaaagataagagtaatctgcttctctctttcttgcagtagcctttggaactaacactactatcaaacgattagctctactaactttcttccttgcaggaggcacaattagcggtgcatctctcatgctctgtgttacttcttttgataagataaactacagtgagaaattattttcatgataaaatgtgcaaaattccatatgtagactgtattttgcttcatactgttttgcatgttcaagaattaattgtattgttatttacttcctcaagtcatagaaaaatccttatatgaaaaaggaatatgacaaattaaagaaagcgtgttatacaagaccatattcatgcttctatgttaatcttgtcaatattggaaagcctggaggttagtgctaactaatataatgcctttttcactcttaccgagttttgtgcccttgcatctattatagattaccgagatatactgaacaatcagtattagagtttgaccagttcaaagggcagtgatgttgatattcaaggtagagtatatggaattttatctgcttgctatctttgctttcctgtttggcataagcatctttaaatcattttctgcagcatggcctaattaataatttctttcgctgatcagacaaggattgattacctccacataaaaacgcagacaagtctaggctttatgtggagtgctccatggttactgataactccaatgctaacatatcttctgaagatgttgattttttgaaatgtaaggtatatttcagtccccttagctctccgagatatgttgtatggcacagtgaaaaagcatctgatgaactcacttcagattgtttattttcaagatagctgaacgcctgaaccttcaactagactcaagtatgagtctgtagtaggtttcaaaagtgaaggttttattatagactagaaagagttacttcttattttacagtattctgctttgattggtatatattttccagtgcaacagaaaagtgcctcaaaccacaatgtgttttgtatatatatagctgcagctttgatttgagacattggagagtcatgatagtttgatcattaaccacattttaaaaatgtaaaatgtataaaatatacaacattgtaattttaccccttgtgacgcgggttccacgtgcacacaaatggtttctctttgtttatttgcatattccacataagtcctccatatttagtgattcattggttcataaattacaatataaatgcagaaactttagtcatatatgtgcatataattgtaagtgaaatgacaagacatgtaattttttgggcaaaatttagctatatcggctgtttcccgttgtttatttctacacatagatgaaaacaccgatcaactgactttgattacgaatgtattaaatgagcgtcaattttagttcagaggttcattcgttagtcatccaagagagtccaccttgcttatcacagaagtttatcttcaagttatgaaatgaccaatattcttttttgtgtaaatacaaataactacagtgataatatacattttggttgttttgtagccttgtccagataatcaggaccacatcaagcggaatggatggcttaagtcaagctaattttagatatttattattttgtgtatttgagaggagcaatacctgtactttatagcatagcaagggacggcttgttcctagatggtattgtggatacatgctgattaatttttttctaataactctatcgctcttttagcctaactatctgttctatgtaccattgatgaagcatatattgtgtcgctgttatttggttgtttcatttgcaatattagttgtcaccgtagcgttagcacgggtatgctactagtgaggaggaagaggatttgcttcgccgcgtcggggcgggggggcgtcgcgttgagattcgtgctggggttggggttgggtcggacagtccgtgcaccgcgtccatgtgtgaccggtactggtaccagctccaaatcatctgtagtgttcggatgccccttttccatcctctatacgaaagttgcttaaaaaatcaaattaatccatttttttaaaaaaaattagctaatacttcatatagacatatatatgaatctaaacatatatatatatgtatagattcattaacatctatatgaacgtgggcaatgctagaagtcttataatatgaaatggagggagtagtacttaattaatcacgtgctaatggaccactctgttctccgcacgtactgttcctagttgggaactagcaactgcgaacacaccctcaattcatacaatagttatatgtaaaggtatatcttacactattaatatctggtcacgcctgttatacgcacattgcgtcgtgaaatctgtgttgcagctggctacaaatctgtagcccgctacttatctctctcttcttttatctactcgatatgtgtttatagctgacttataatctaatattctacctgctctaaggtggtgtttgaaactaatgaagatgaagatgaagattaaatagatgtaacgtaaaacgagaaattcattagcacataattgattaagtttaagttattacaaacttgacaaattattaattgaaaaaaattctaacggaaatcgagataaaatctaaatctcttttgctacagctatgtatctaggatttttttataagctggatatttctagcaacataaattcatgatatatatctatgactaccttgataatatttagataatttattttatacacatttcaaataatttaaattttaaatcacattaatgtataaactttaaatttaccgtggatgtgaaatgggataactttagacgcacttttgggtcaaattgacgtccgttttcgggtcgaaagttataggatgatttttttttttgagaattacacagtacaacgcagacactcacaacgcacgcacactcatccctatgaaagtacgcgtgcaaatcctacccctatgagcatcttcgaagactgggccggcaaatcatccttgaaattgacgaagtctccacagacgcctcgctgttgaccggtatgtcgtctaccgctgaaagtacaatgccgttaaatactggaaaattcgctcccatggggagtcgaacctaggacctaaggtcctactgaggcatcccgcggtagcgcgataactggtcggttttgggccaaatttgtgcgaccagggtttaccttatcgtttgggccggggttaccgtcaccctgcggtagtgcggtaaccgtctaaaatcgtacaaaaatcacatccaaaatttcgaattcagaacttggcggtttcgggatttcaccgtggttaccgcacggtttaccacgatattcgcacggttatcgcgagctgtgtagctgaaatcatgtaaataaaaaataaataggaaaaaaatcgaaaatacggttgaatatgtgtagaaaactaaaaattgagaataattggaagaatatgtaggatacttaaggcctaatattgtcttcctttttccaatttgtaaactattttcagttttgtccttaaatttgaatttagcttactctatttcaaaaaatttcttcaccattagcaagtacaaatcaagaactatatccatgattttttttccaattttttttttccagaattttgaatttggtcaaaattcatctaaaccatatcgccggtttctcctaccgtacccccgcggtaagcgcgataaccgccgcgcgataagtgaaactgtgcgacactaccgaccgaatttgtgccaggtttaggcagattttgggaccactttgggcctaactcacaggtgcatttgggctgaaattacaaacactgatgggatgaatttactctcgttaaatttgccggtaattaaactgagcaacaatcaagagcacatatcagctatgagcctatctgttaacaacatatactattcagtttctccggtgcggcaccaaatattagctcaacaatctgttaccctaatactactaatcttcaggcgcaaagccatgttgtccccccaacgcgaaatcagagggaagcaaacgcgtaatttcttcagaaattacaccgattcactcctattacaggacactgaactgcacgcctcgtattataggacactcctctggtagcaaacgtccagccttgcaagcacaccaccatcctcccattaatttctgatatcaatctgccaaaaaacatgcttgtgatcgaaactaatgcatcatcaaattagtagtagtaggatgtgacttcgaatatccaattgatatcataaaagataaacaatttatctacccgagatatggacatcttgattaaatggaaagtgcaaaggactatcaaacataactggcattcaaacatttgaaagcaaaatgcccagcgtttcagttacttccgtattgtaggttactgtttcagctttcaagctattgacccagcaatgtcatgcctgtagcctgcctataaaaccaaaataaacttttctgcatgcattgttggcataatctaaacaaaatttcagactttccgtagcaattttggatgcaatcagccaaaggatatttgaagtctatacatattaaaagtaagcagcttatccaaacctgcttaattaatttcaaatttacagacaagtgtctgcagaacaaacataaaaactaaaaaggacattttgagcgttgccttcttctctaacaactaatggttagcttggaagaaagctagtattgctaatatatacatgtatacttcaagctagtatggagttttatgaattcaaaaactgaaaatggacagttttgcatcggcaaaagtaaatttaatagcatgcacctcctgactgacagctaaccaaatttgaaaacaggcactaaaaaccattggccaagattatatagcaatgcgtgggaatcaatttacaccgagaaacatgctaacatttacaccaaaaaccggtggaaaacctcttggaaaagagaataaaaaacaggcacttaaaaaatatagcttggtggcgacattgcttctaagttctaactgccaagacgtgtgtatattttatagtctcttggttaacatgaactaaaacagacatgaggtgatctgcttgctatttacacaaacagagaaaagatacctcctctagtacaactgtagagtgtagtagaaaagaattccaactcagaacttcaaagctgcaaaaagcttcgaagcagttcaaagattctatagaagcctcgtatttttcagggaaaaacctacgatattcttgatatttgctcccagacgattggggaagattctaacaagaaggaagcagtggatgcttcgagggagaagtgcttctcatcaatcatgaacaggtaagtgccagccctggttatatcacccctctgtaacagtttcctaacaatggaatttagcatgcgggagtcggcggaacagccattctcctccattgaaagaaatagatcatccaattcttctagcgacccctgctctataagattttctgccattaaactgtaggtcctaacatctggcactaaaccgttagccgagtgagcagcaaacaaatccttagcttcatccattcttccacatttaagtaaggcaccaatcataatgttaaaagtcctagtctccagctgtaaatccgtcaaacataggttctgaaacattcgaagtgcctcgtcagtgagattgtttttgcaaagtccatgaaggattatgttgtacgtgctaagttcaagctgtgttccacttttggtaatactgacatagagttcttttgcagcagcagttcttctggtatgaaataaaccttgcagaattatgttatacgtaataatattaggactaacaccactgctcaccatctctttgaaaagagctaatgcgtcatccatcctgctaactctacagtagccattaatcaaggtgccataggtaacaatatcaggtttcaccccaactgagaccatgctggcaagtaacttcgttgcttcatccatcttaccagctaagcagcatccatcgatgagtgtattgtacgtaatgatatcgggcttcacaccaattcgtaccatcaagtcaaagagtttttcagattctataaccctcccttctttgcaatgactgtcaattattgaattaaagaaaatagtgttcagacagatgcctcgatccaacatttcaagaattaactcttcagccttgtcccatttgtcacaggtgcacagaccatgaattagggaggtatacacaataatgttaggggttagtccttcatcgatcatctgctcaaaataaagcatagcatcatctacactgcctgacttgcaaagtacatctataactgttccatagcacactacattcggattcaatccatgctgcctcattttgctgaatacaagcattgcctgatctactttctcttgtttagcgtatgcacatattagaatgttgaatacatgatgatccggttggataccatttcgtaccatcaaatccaagagagcatgcatctcaacaagggctcctttggtagcatacccctgaagcagggtacgataggtagcaatatcaggctctaggcccctcttggtcatagaatcgaaaatctttctagcttcggtggatcttccattcttgcaaagataattcatcagtgaactataagtaacaacatttggttcgacgccatcactgcgcatctttttgagtgttccaatagcctcttttggctgccctgaagagcaatatccatgcagaatactattatatgtcatgcaatcaggcatgacaccattcttaaccatggtgttaagtacctccatggctttgtccatagcttgagccttgcataacgcagcaataatagagctgtaggtcacaacatctggtaaaatcccccggtccagcatttcatggtatgtactgtaagctttgtctgaatccccctctttgaagaagccattgaggacagtgttatacgacaccacatcaggtgggctacctcctcctcgatcatcagccatcatgtgcagcagctcgagagcttcttggcttctgttctcatcacacagacccttgagaagattattgtaggagaagacatctggtatgcagccgagctcggtcattctgcggagcactatgtccattgcgtcgctcgtcctcttgtcggcacagaggcccttgagcagaggagtgaaggtgatggcatccactctaaatcccttcttgacgacattgcccaaggccgcgaaaccgaggtccaagcggcccgcacggcagcagcagccgatgaggatggcataggtgtgcacggtgggagttaccttgccggcgccggctcgggccatgcggttgtagcgggacacggcggccgcggggctgtgacgcgcgacgtcggcgagggcgcggttcaagccgtagatcgaggcgcccctgccacgccggagcaattcgtcgaacacgtggcgtgcgtcctcggcgccactgccccccgcgcggcctcctcgcccttggatcgagccctccgagcgtgggacgccgccgccgccaccgccgcgcgggcgggtagggacgcggcgcgccatgcctgcccccgcgggcgccaggcctgacggacagcggcgaacagatcagcgccgccgcgggcgccaggggaagggaggggtgccctcacgtttgatgctcgagtgagggcaatgcttttatccctcactcccatgttacagtactaacattgagggggtgtttgcatagcaagggtgagttctatttctccaactccaacttcagcttcctcgttttccgttagcacgctcttcaaactattaaatggtatatttttttaaaaaaaatatctatataaaagttgttttaaaaaagaaaataaatctattttttaaaatttataatagttaataattaattaatcatgtgctaataagctttctcgttttgcgtgccataaaaatttgtctctagtagttcacatcaaacggggcctaaattttagtccttgtcactttggaaatttaggcgctaattaagagtattaaacatagactaataataaaactaattgtataaatgaaagctaattagcgagacgaatcttttaaatttaattaatccataattagcatatgtttactgtagcatcaccccctgactatatatcctccctccgtttcacgttatatgatgttttccaggtggtgtttagatccagggactaaaaattagtccctgtcacatcggatgtttcgacactaattagaagtattaaacgtatactaatgacaaaacccattccatgatcctggactaattcgtgagaggaacctattgagactaattaatccatgatttgcctaatcaatgttatagtaaacatgtgctaattgtggattaattaggcttaaaaaatttgtcttgtggattagctctcatttatgcaattagttttattattagtctatgtttaatactccaaattaatgtccaaacatccgatatgtcagagacaaaaaaaattagtccctcgatccaaacacatatagtctctccgtctcaaaataaaccaacttctaaagtttaaaatttgttccaaaataaacaatttctaacttcttacctaccatccatctgtaaaatcgagaagttttatatcttcaataacccccacctacccacccatcaatataactttgctattaattaggggtactttgttcctttgtttatcctcttatatccacattggactttttgtgagacagagagagtacaatataagagattttaaaggaatgtgacacattctagtactacgaatttaaatagtgtccagattcgtagtaatgcgatatgtcatatcctctaaaatcccttgtattatgtgatagaggaagtgtaaaacatatgcataaatccacacgtaaatctattcaaaactcaacacgatttatagtgcgaaataggggaagtaaaaaagaatacaccagtattaacaaacattttcattaaatctataattaaaatagctcttaataacgtatttattttagtattgcaacgttaaatcagttattaaatccataattaaaataggtcatgagaatgtatttattttgtattataaatgttaatatatttttctataaacgtgatgtaaaaaccttgttatatttagaacagagggagtacctagcaaaatcacatatttttgtggatcattctctattatttttgtaagtatcctcctttcagttattgtgcagtttgtaacttcaatatccctatgacatccttcgcggaaaaacgtcaggatggtgttcactgacaagtagtacaaaatttggcaagagagagaaatactgctcaacaatggcacatattaatggggattgcaggcgcgtggcctgtatatatcatattcaacattattaatacggaccaaatgatacaggctattgtctaaccaacctgacaccaatcgatattacaccacctcactttgtaagcagtacaccataaaacgtaattcacatatgcgcagtctgaagaaaaataaaaagaggcacacaaacatgttctgccacatcccaaaaccatctctcattgaggcctgtagtagctgctctggtgaggagggtaagaaccctgggcattgtacggtggctgaggatatggcggctgtggctgcggctgtggctgatgtggattgtagtactgcccgcgccatcctccaggatatgcttgttggccatagtcatggttgggaggttgctggtgtggtggctgttggtagtgaccagggtggggcgcgccataaggtggctgttgcgacggcgcaccatatggaggctgttgcggtggcgcgccatagggcgggtatggctgtgagtaagcaggtctttgctcgggctgagagtacccgggtcttgaatcgcctccgggtggaacaccatatgggccctgagcatggggagcatgcgacgacggtggtggtggtgatggactgttctgatctggtggcacagaagtattcctctgcatgcttgcttggctggaagaagatgagaagctgaaacctgctagcttcttctgcacatcttcgatcatttcacggcattgaatgtttcgggtcattatgaagtcactgcactgctgctttattttgccaattgcttcctgcacaaaaggaccatttcaggatataaatacatatacagtggtcctcctacatacaatggtaactgtcatcatatatatcctaactacagtagaaacagagacgcgcatttacctgtaatgtcacataaaaattgaggccttcattaatgttcttcttaatatctcggtatttagcaacagccgcagcaatttgcttgtaacatctctcacgagcaactgaaaacatgcttcacaaatcaggcctacacagctcattgcttacaaaccaggatacatacttaaaaacactgattgtggtactatttacatgataaaataattgtaaattagaattaaagagaccaagttccagcatcaatggttcttcatatcttaaattgaactagaactaggaggagaaaatgtattcaacgaagaaacataattgaatggttaacagagaaaaacacatgcatacaaacaacacagcattctgttgttttagctagcagacaatttgatgactaggtatgtgtatatataagttcccaaccttattggtaagtgtaacagaaataattatcccacatccaaatcattagttgctacctaagaatgggcaaaaatccagctatcaaagtcactaagcgcacaatataatccattgatgaataaatcagaagggatacctttgtaatcctctaggttgaacaccgcagcaaactgttcattttgtgcctgtgcagaaatccaaaatataaatagtgttagacataaggacgaaagaacatgaaatacagtatagttaactcttcaaaatattttctggttgttctttctttgctaataccaactaaaccattgatgctattagacgtttaaaaatttcaatataattacattttttgggggatgtctatctagattttagcagaaaggtgtttacattgaacttctagaataagagaattgcaaaggtggactatatcaatctttatcaggaatggtggcttacctgtatttgtagcagcagttgttcttgcgccacaatgttatcagctatctcagcacagacaggatcatactttgaaatctccttcttaaaaagatcatcgtgtgatccaacaccggccatcaatttagggagtatgtcatcctgatagaaatatttgtatgtcataattctaaatgaacatgatggcatcacaggttatatgtgtcactatcagtcatgaatacagatattgaattcgaccgttacaaggtgccaaggacaaacaaactttgaaaagaaaatgcaagacctccctgaaaacttgtcaagtggaagttaaacggagagcacatgtatagcttttaattggttcctagcaggttatcacatacacgtacaagcataggactccaagaacaccacatatcaggcatgaacatgatccatccatagtgaagatcaatgggcaactggttgtaaactaattttattgccagtaaaatgcagtaaaaaataatgagtaacacttcaggagataggtccatacaaaggagagaggggggggggggatgaagcgatcgcaagaagactaggttcaaatgtaaaaaaaaaaagagtgatgctatttgtggaagggcttgtgagcccttggttgcatggctggtttttttccttcttaatgaaataaagcagctctcctgcattctaaaaaaaaagtaaaaacatggatatttccctagtatgcacatacgaccaaatgtagaagaatcagaatatttgcatgagcttttaaacataaaacaaaagtcaactacatgattatcaacaagctaatactgaacaaaagaaattcctaatctgtcataacatatgtctgggacttatagtagtttatgtacacgatatcaaaataagcaataaaagatagtacctttctcttcatttctttaagcatgtcttcaagacctgctctctgtgctcctagagattctagttgcctctgtaaaagcacatcaaattggtttttaagttttaaaacaagtgaagctttacatcaaacttgccagctaacaaaaacaatgtagattaccaagctttgtttaagggctccaacaatagcatcctcattcccatccaaggacataataggcctagaaatactcggtagtgcagactctatctgcaatatataatagcaatatgtaacagaccaaatatgaaaaaaaaaagagtgtaggattgaataacatcattgaaattcata

SEQ ID NO: 6191 - DNA, 6763 bp, Oryza sativa
gtgaggtcgcgccacgccaggcgcgcggacacgtcgccgaggaattccgccgccgccttctcccgccacagcgtctcgctcagcgggctcagagccgccaccgcccctcccgccgccttgatccccacgtcctccaggtccgccttcaccatccccgccgccgccaccgccgccgccggtactcctcctcctcctccctgcttcttcatctctccctctctcgcttgctacgtccgtacgacgccggcgacaccggctcaccgtggcatgcgatgcgagagctagtgatggagctagctagctagctaagcaaacaccacctatgagggaggagaagaggaggaggtggtggatataaaggccagtaatggaggagcaggttagagagagaaaatctagggagagaagctagagagagaaggagatcaggtgcagaagtaatgaggggtgtaggggtttgacctagggtcaaggtagctagctctagagagttggaggagtagaagcagcagcagcatgcatgcaatatgcaagcatgcaatggagatgaatggcatgtcataagggggggctagtagctgtttggtgtgatctagaagcaatgcattgtgcatatgcatatgcaatgcaagcacaagagaaagggcatgtttaattcaagaaaagaaatgtttgggtgtcacatcggatgtttgactggatatcggtaggggttttcggacacgaatgaaaaaactaatttcataacttgcctgaaaatcgcaagacgaatcttttgagcttaattaatccgtcattagcgtatgtgggttactgtagcacttacggctaataatggacttattaggctcaaaagattcgtctcgtgatttccgcctaactatgcaattagttttttttattatatatttaatgctacatgcatgtcttcaaagattcgatatgatgttttgggactaaaccaggccaaagagagagaatagattggtagagatgaaggaaattctctgacttagctgtatgtgcaattgagccactgacatgcgggtcataacgaaagtggaatatacatgtcagtggctcaaccgctggattcttggccatgtaatgcatgcactggattgcaagttgttgggttgtgaacagccatatggtatctcatcactatcatgcatgcaatgcagccacacacggtttaggttctttctgctgcacaaatgctatcccgaccatggtttcttgttatagtttttttttttcatttgcaaaagagagtattccctctttcagaataatatcatttatggtttattttcagttatcctaaaataagagaaatgcccagggttttccagctagctccacaaggtggtgtgggctagacgacctgggttcgaagcctcaccccttctaattatttgataataggtccttccctgatattcgtgtttttaattatcctaaaataagtttatttttagctatcattaaatcaaagtttctgaaagcagtggataaatgcattgggggtggataaagagagaaataattgcattgagatttgataaggtgggggtattatattattattattattattattattattattattattattattattattattattattattattactattattatatatgagatgggtgaaaataaacttattttggggccgagggagtagaggataaggtttttattttacacctagtgcaatggtgcctatcatttacgtgcgattaagattttatagcaaaagttgagaaattgttaacatcgattagaatgagataaatatttaatgtttaggtcaagattcagttaagcttttaaaattctaaaaaaaataatatattacaataagttttataaaatataaaattccttatgtccacgaattttcgccaattcccttatgtgcccctaaatttagcctcatcccctatatagccttgagtttttatttattttgatcccctccatgtctattccgtgagtcgatagttaaaccattagatttttgtaaaaatatccatattacccttgtctgttagtgtacttgtgtgcaagttgattgaaaaagacagcccttaacaaaaaaatgatttatttttaaaaaaacaaacataatatagttacttgatcgtaaatttgaaaacaggatgagataaaattcagaggtatagaagggattaagtgaaaactcatgtgcacataagaaattttctctttataaaatctagtgagcttgtgatatatatgatagtagtagtaatttttcgaggcaaaatctacatatatcatttattttgtttttaataaattattgatggttgaagtgtcattaaaagtttaactgaattttgttctaatcataaaatatttttaactggatagagtatatcgtgttcggagtataggaatttttttcctcgtgaagtccttgtgttctctaaaatcctagtgtgtaacctacgctgggttagatatgttggatatctcgggaggaaaataactttccagaacacaaaagcatagacgttcggttacaaatttaattgatacattcccttttaccaaaattgttggacaaagagggtccttgtttggataatgaatagttgaatactttgccttgattataagattccttgaacgatttaaccatcgcacgtgaaaactggtgtggcacaacattggaattggttggcacatcaatgatcaaatttcatatttgtcttgcaccaaatttgcatgatctctggtccaaaggtaaaagtgacatgcaaaacatcattaactggcttctaggagtaaaagttaaatccgttgaatttagcccgcaaatctctactccctccggttttattttaattgacgttttggacaatgacatgctctacaagatatacctttgttcttattttttattataatatatacaataaataaatgcatgtttacttttattatagtgttttgaaagacaaatatatatatgtttttctagtttctttaaactaaatatttttaaagttattgatggtcaaagttataaaaatttaatctcaatcttgtccaaaacgtcaattaatatagaactagagggagtaattaagagtagcatggaattaattaaacatgtgacatgttgggctaaggccaaacatgcctcacacaaaagtgttactccttgatctcattattggttccaattacgaaatgcatgcatcagttgctaacaatgtactaacatgtaagttctataccaagatggcactcccaacaattaattggtagctaaagctctcttattatatgggccctagcttctgtacttaaaaaaccgtgtctcaaattgtccccgtgtagatgatttttattaaaattcaacaatattgttttcctcttctataaaaatatatgattcaataaagcaaaacacatattgtatttgcattaaaccgactgaagattagaccttacttttaggatttataatcactagaaagatgtatatccaagaagacaaaaaaaacatttcaattagttaagtaaagagtgtatgaacggccgagtttagttccaaactttttattcgaactttcaatttttccatcacatcaaaactttcctacatacacaaacttccaattttcccgtcacatcgttctaattttaaccaaacttccaattttagcgtgaactaaggctgtgtttagttcagcgcaaagtttggattttggttgaaattggagatgatgtgactaaaaagttgtgtgtgtatgacaggttgatgtgatggaaaaagactgaagtttggatccaaactttggatctaaacacagcctaaacacaccctacatgtagagtgctcttgtggtaatgtgtgaaccaaaggaggaaacaagagtttgtgataatctaatcttctactctctccgctccaaaatataaaaacatttcctagtataacgtttctatatagcctccaaaaatatcttaacgttcttatattttgggagggggtatagtactttactaccactgggaagaagaagcaacagctatagcatggcaattggtagtcactaggaaagtaggaatagctagatgcatgcagattcaggatgaatctctcatgcaaaaaaatgcagtgcagcccaagcccgggccctgatcactcaaacttaactgcattgaagctgtggcaggtggatgttggtaggcagcatgcatttactcattttttagtgctgttctgctgctagctgcagctgggactgctgtttactgtgcatgtgtatatatgcatggattaatggatatatatgtaggaaacctagccagtcttctggattctcatcaagataatagttttctgaactctcatttattcaattagcaattaaaatataatatagatagttatatatgtttaattatttctaggaaaatgacatgtttgtaggaggaatgtatcagatcaggtagtattgtcgccagtataatttatagcccatcctttcattatgctggtgaggttgcatatacttggattccatgttattttttttcagatatttttcatctctttaatggaagaaatgctggtggttgtgaaggagtatatgcacgcgttcgaggtcccgtgtggatcccagattcagaacagtgtttctcttaattaacttgatattgatccagggaacatctagcatgtttgtttctactttctctttcagtgtagtcgattaattaccagcgatccaattatacttctcataatctcatactcttattatgttttattgaactccgtgccatacacacaaatctcaaagcaaatctgacgacaaaccaactataaacatttgcattgcattgtaaattaattgattttcccttgattggttgactgctgaacagatccttagattaattcgagcttgcacttttgcagtacactgtaacaattccggcaaaaaagtacaatgtaataacaaacccacccaactctatcctgacatgggaattaaatctacccaatggccaatatattacagcaaaatagtgaccagcaattctgaactaagtactactgtttactgttactgcatgacctattcactctattctgatgttccaagataaagctatttctattgcataagatttatcttaaaagaagccatttcttcacttatcctaacatcttaatcaatcataactatttttcatttaccttcttattatatttttcctctcggccaattacaatcttctctcaatcattgccatctatttttctcaatatatgtgcaaaactttagaaatgcttgcatttggggatagatggagtaaataaatatatacaccctgtggcactggcctacatatatactgtgtcccctacacctggatcatgtaatactcttaggtggtgtttacatccagggacttaactttagtccctgtctttagacactaatttagagtattaaatatagactacttacaaaactaattacataaataaaagctaattcacgagacaaattttttaagcctaattaatctataattagagaatgtttactgtagcatcacataggctaatcatggattaattaggctcattagattcgtctcgcaaattagtccaagattatggatgggttttattaatagtctacgtttaatatttataattaattttcaaacatccgatgtgatagggacttaaaagttttagtcccatctaaacagggccttactttggcccctactacattgtgtatgagtgagatatttgcacatcaagtaccctgcagtttctgtgttctgatctacacagtagctagtgtccaattaactctggaagttaatgtaattaagtgctcttcataaaaaaccaatttaatgcaagcatgtttacaagtaaaaaaaaaccttctagatgagatagtaaactctcataaggtatttcacatgcatgagttctgacaggtagctgcaatggtgtagtagtagttgtgatgctgcaggggtagtatccatggctgccacactgcaagtactgcaaaaccacaggacacagaagtggagctcagttaattactgttgttttacagagagggatgatgagaaaaaatggcgggaaatgttgatgattattgttagtagtcaacattagtcttaaggtattaattaatgtgggaagcacatgtatagggaaagtaactttgatatgtgccctctctctcaagaaaaaagaaaaactttgatgtggtgccatagttagcaggattcaaattctgatatcacgattatacatatgtgagtgttcttgctagaaagttagcaaaatcaggtcacaagagtgaggtcgttcgtcggtcagcgaatatggtggcatatatagcaaaggagtgttgctccaagaaatgtgttacgacttattgtcggtgcctcccaatttttcttaggttttttttcttgatgaggattgtatccaacataacctgattgtataatttggctttaggtttatcctcaaaaagtaaaaaaaaagttagcaaaaataaccaatttaatcgttggtctctgtttttttagcgagtagagtatatacctagaatttacgacatcgattcctcataaggacttgaagaacttttaggtactaatgatgacaaagaaactaagctcatcacatcaacataataccattgttttttagatg

SEQ ID NO: 6192 - DNA, 21408 bp, Oryza sativa
aagtttaaaattgcttccacattcaggggtctgctctctaatactgctgttatttttcctagatagtttatttttcctcaagttctatctcatatcagtgcttttaattctgtttagattccagaggatttggaagtgggttatgtacccttaagccatggtggggcttatcctggactataccttttcaccaatccagctagatttcttcgtccggtcagaagtctcttaggtctatccaatggagggccaaatattgagctgattggaccatttgaacaggttcccttttatccacttcaatggtcctatattagtttattattacaagatgactaatttttcattctacattaggcattcatggaaatacgatgccctgatggtggggatggtggaagaaacaaattatttcctgcaactcatgaagaaatccaccctacagccattcttagtgtagttgcaaatttgacaccttggtctgatcacaatcaaagtcctcggaacatgtaccaatgtcaggtcagtagccagatcttcccttactgtaaatcaatttctcatgcataatgaaaattgctcacgcataatgaatgctgagaccttttttttctagacctgctaacctgcttgcttgttcacagatggcaaagcaaaccatgggattctgtggccaagctctaaaattccgtactgatgtaaaagcatttcatctacaggtttgttttcctgtgcaataattactaaccaactatcattagctacacttctttggttgttagaagttgctctatttctgttgaatatgtacctgcccaataacatgttgacaaccttaggagcaaatggtttgtgccatgtaaagataatttgtggttctgttgtatcaagtgttttaattggtactattttcatttattggtggcagatgtatgtcatcctgctcttggcaggtttgctaattttgtgccttttgaaattgtcccaaaatcaatgaaattgtctgtttctaagtacttaattatgtgacaacatatcatgcagaaatgattgcattgaaaatccttttttataaccagtcaggtggctcatataaatattttttcagacccctcagacaccaattgtccggacagctacatatagcaagtattgcatggatgagttcccatccggaacaaatgctattgttgcggtgctatcatacacagggtgagcatttcattatgttgtgtaatgatcatttgtttgaactttaacatgataaaatcatagaactggtattgcaatctaggtatgatatggaggatgccatgattttgaataaatccgctgttgatcgtgggatgttccgtgggcatattttccaggtaagtaaatgttttttccccttttttggtgactcttgaagatatctcattaacactaataagaatttaatgtcaaaatgtgtatcgaatggcatacgcacatctttaatgtactctccatcccaaattttgatgggatgcctttttctgggcatctgaatcattacccattgatctattttgagatttgtggctttaacctgggtatcttttacacaaatatatgcgacatttcagttctgcaaaatattgaatccatatttgatttatttttgtgaaactgcagttgcattaatttgaaagtagttcaataagttttctttcttcaaaagttgctattgattgtaaagatgtatcagacagttcttgacgtggatgttggtgcctaggcatccaaatatcaaaattagtttacctatctatattttatatttgaataatcctgagcattagatttggattcttcaattcggaatgccatctcagtatgcacgtttagtatccaccaacagagagtacctttggaaaaatcttgattggatgatctaacttggtatagattgaaccttaagtttgacaaaacctaaaattagtttcttttatcctttgtactctttctgcagactgagtgcattgatttatcagcaaaaagtagagataatgttacggagttcttttgcaagagtaatctttcgagggacactaccgctgcaatcgaatcagatggccttcctcggattggagaggtagttatgtgctcgtactaagttaattttttaccatgtggagaagtggtagcagtgtaatttcttcttgacgatattccccgtactcaaatgtatgtgtatgaaacagaacatatttccaaatgagcagtactacagcgtctgtaacaatctcactggtacagtaaggcctatcaaactgaagggctcagaacctgcagctattgattatgttgctgtcaatgggacaaattttaaggatcgtctacaaaaggtgaggccatggccacctccagtatcctgtgctggatgaaatttatcttcggcaataatgtgtggatatccctattcaccttgttaaaaaagggcagactaagtgcctgtgtttgtttaaatgcaagaaaaaagtgaaataccttcagtttctttaaactacaaaaaaacccagcctcttttggaaccaatgaactttagtatgttacacaatgcatttcttgaatgttagtaggattattgtttgtgaaagtgtgttctaatttgttttttgtcatcttggcatgcttttcactactgcatgtttttgtcaggctaatattcgtctgcgtcgcgtgagaaatcctataattggtgacaagttcagcagcagacatggtcaaaagggagtttgttcgcagttgtggcctgatattgatatgccattctctgctaatactgggatgaggccagatctcatcattaatccccatgcatttccttcacgaatgactatagcaatgctcttagagtcgatagcagcaaaggtacaaacttctttcataggttgagagaagcttgcatttttttcttcattttgaaagaaatatcatgattgttgcgagagagagacagagattccttgtttccaattcttctcatttaagtatgatagcgtcttggtactttctttactcactgaagtcttgtcttcacaggccggaagtctgaaagggaagttcattgatgcaacgccttttgcaagctcagttaaagagagatcaaattccattgtggatgaactgggacccatgcttgcttcttatggatttaattaccatggaacagaaattctatatagtggagtttttggcactgagatgaaatgtgagattttccttggacctgtatactatcaacgccttcgtcatatggtctcagacaaatttcaggtgggcaatcattatttgtgtaccatcttattatgtatagttaaagtcgttatctggcttatttttcctccttttctattcgatatcggattgaagatctctacaatgctatgcatcaaaagtattcattgctctatttatctagtcaccaatgtttccacactattgcttgtagattctcatggatgtgttgggtttcgcaggttcgtaccacagggcgaatagatcagatcacaagacagccaataggaggaaggaaatacggtggagggattcggttcggtgagatggagcgagacgcgcttctcgctcatggtgcctcttacctcctacatgacaggctccattcctgctccgactaccatatcgcggacgtgtgctccatctgcgggagcttgctgacggcgacggtgatcaaatccgaaagccagaagaaagccaagcgcgacatgctcgggctccccaccgtaaaacctcccaagaactttgcctgccaggcctgcaaaacaagcaaagggatggagaccgtcgccatgccttacgtcttcagatacctggcctccgagttggcggccatgaacataaagttggagcttcggctcagcaatagaacagagcatcctactactaccagcgaagaatcctgaatgatttgtcttggtagatctactctgaagatattataatcactggttcatctggagctggcagggcacaagtgtgcagtcatgccatccgcggcagtgtcctgggggatactgagaagttttgcttagaggatgtctccagttttgttgtgtgtcactgctgttttgtttcatgaaaaggcagagtctgttgtatcaaaacatcaatgattataccaattttataacattagacgtaactgaacttgtgtgcattgcaatgacacatctgaaatagtgaaatacgaagctttattcgagagatttggcaacaccggttccctcttctgaagtgatatatgtgttgtgaaaaaaagattactccctcggacctaaaaaaaaatcaacttaggaggggataaccatatatctagacatatgactgtctagatatatttgttctaggaggagtcacatcctctcctagattgattattttttgaatggagggagtaatatttggtctctgaaaatgacgatcgtaaatttataatgaaaaatactttcgtataaagtaatgatcgatacgtgatgcccaaaacctaattttgaaaaagaaacgtagaacacagtagacggagggagtatatcggaatgacccctcgagattaaactgggcccactcatgagtgggcttaggcccacagttcttgctgtatcagtataatgggccgggcttaaaactccccttcctcctccacccgccatctctcttcagttccccaacccgccgccgccgcctccactagggcacgccgccgccgccgccgcctccactagggcacgccgccgccgccgccgccgccgccgtcagccatgtcggactccgacgagtacggtgcgttccccgccgcttcttctcctcgtcctctcctctatgcactgtttgtgttagttttgacaacgtttggctttgctgggtttagtcgacttgcccgtgtcggatgaggaggagtgggaggatggggagtcggaggaggacgaggagaaggtgggctctcgtaagaaggccaaggttcacgcgaagcagctcaagaggctccaggagaaggttcgtctccgtcctcgccgtctcctacgattcgcgcacccttctcccaagcttatattgcttactattattacttgttactagtaagcatcaaaagtagcatctgaattgctcggctccattccatatgtaatgcctatgttgatttagctttgggctgtttatactaggattggggattctggtatgtgttttttattctggtatgtgttattctggtatgtgttttttattcttatatttatactaggactgagcacgcaaggcagtgaatgttagaaggtatattgcatgcttaataggtggatattggctcgctctcgtatgcatttggtaaacttgtctggttggcccttgttgattgattttattgattttggaaatggactgcaatcttccgagttttacacgcggaagtttgtgcagagtactgaatagtgacgtggttgctgcaaataagtactataagcaaggcatacaagttccttaacaaatataatgatatattttagccattctgatcattttgaagaaggtgatggtaaactaaatctcaagttctgattgtgcatttggtaatcagggcaagtactataagcccctatttattgcccataaatttgccacataggattagatgatgagttggaggagagaagttaggagagagagaatgagccatccctcatgcaaggggcaacctccacacaatctccaagaaaaatgtaagatgacgtgagagtaaactaatattggggtttgtgtactagatgtgacatgttgtatttgttacctcttaagtaatgagaagatgacatggtttaaattagatgtggcactcacctccactataaaacttgccctcaggaagctagttgtaatgtcatagggattgctggtatgtaaagagtacttttgatatctagaattacgtagctcagtactgttatgatttttttctgcttacgttggatttatagctgtttatacataaaggtagttctacagttctacttgcacttttagtgtggaataacctatggctctggtttagcggccctggcattgcaattgggacagatgaaactgaagaaatcatatgtgttaagcacatccagattccagtttaagtactttcagattagttgcttgcactttgaactagccctcttttttggaataaagaacatgttattgactcgacttttggacagtcttattctaaaaataattgatactttttgtttcctggtagtgaccattagacggctttttacaaatttagatgataattatcattgttcaatttattgctgaaattcttatctgtatgcatcattgttaacactgcaacaaccaggaagtttttcttgagctaatcatttcttccatccctagttcttgtcatatctgtgctgctgtattctgtcagctgcttacgatggctgcaaaactcttatttgtaggatcctgagttctacaagtatttggaagagtgtgataaagagcttctggaattcgacgatgatgactttgatgtaacacaaaactatttattcatttattttgcatttttttttcttcttgcttgagagaactatatacattgtatgtttgctgcatattttgtttaggataatgaaggaagtgctgagaaacatagttctgttcctaaagaagaaccgaaagaaattgtaaagcctattacaatgcaaatggttgattcctggtgccaaggagcagaagatgggaagataggttctatccggtctattctcgaagcattccggaaagcctgccattatggtgaagaaagtggaaataattctgcaccgaaatttagtgtcatgtctggcagtgtacttgacaaagtcatgcactttgttttgaaaaacatggatagaatccttcgtgaattacttgatgcacctagctttggggggaagaaagagacagttagtgagctgatgattactaagcaatggaagaggcatgggagattaatgaggttataccttgtaaatgcactccacatgataacagagttgactgatgagcaaatggtagcatttactgtacatcgtgtcagagcttctgctgtttttctggcggccttccctgcactcctcaggaagtatgtaaaggtttgtagctttggctcctcatccatctttagtaacctttcgtgtcatctgatgtctctgcagagtttgtaatttcttttattttcacttgactaattcgattacaggctctgctgcatacctggtctagaggacgaggtgctatgcctcttgtttcatttttgttccttcgagatttgtgcattcaactaggttcggagtgccttgatacgtccctcaagggtatctacaaggcttatttggtgaactgtaaattgtccaaatcaatcagtggatcaaaattgcagcacattcaatttcttggtaattgtgtcagagaattgtacaatgtggacccacaaagtgcatatcagcatgcttttgttttcatccgtcaactggcagtcatcctaaggggagctcttactgaaagaggaccaaaggtatgtgtagttgaactctgatgatcatatactgcaatgtaattatttacttggcagctgacaagttttgtggtccctatttcattttgcaagacatcgaaggacaaaaagcagaaagaaagtatcaaaccaacgaagaaacggatggaggtatgtcattattccaatgttgcatatgtactatcgaggaatagagtccactttgggataacactattgctttctttcttatgttagtttagttttactctctattctatattctattactctaactgagcctttcttttctgacttgttatttgctgaccttgttcttgtgtagaaatcctaccaaaaagtttatgattggcaatacatattctgccttgagctttggacaagtgttgtgtgtggatgtagttctgaggaagaccttcgacctttggcttatccactaacccagataatacatggtgtggcatgcctggtaccaagtgcgcgttactttcctgtacgcctgagatgtgtgaagatgcttaatcgcattgctgaagctactggtaccttcattccggtgtcttccctgctgcttgatatgctggaaatgaaagaacttggagggaaaccagatgctgtaggcaaagcagtgaatctgttcagtgttaaacaggtatattttctcgtaatacaacacttcctttgggaggactactttgaaaaaacttttaataggtacttttgtctggcaggtagataagaaaacagtgaagacacgtgcctttcaggaagcatgcatcttttccgcggttgatgagttggctaagcatttggcccaatggagctactccattgccttctttgagatgtcctttttaacacttgtccggcttcaaaacttttgcaaaaccgttaaggctgacagattccggagagagatcaaagatcttatccatcaggtttgtgaagcatgtaagagagaattgtacctaactgaatgcatgtatgctgatgtttgtatcctttgtgattccagataaaggctagtgctgagtttgtaagctcaaagcgtgcaggaattggattctctcctaatgatccagccgtggattcatttctacaggtatggttggtcctgttggatgtgcactgtatatttgttatactcatttagtgtcattttgtgagatatataatgttcatttcaggttgagaaggaagcaaagtcaagtcctctatcaaaatatgttgctactctacatcagagaagtcaggacaggatggactctctggacgacacaaggttggttacttggtttcattgatgttcatctaaatttaggagtcagccagttgagtcgtagcacttataaacagaaatgcaccaatttttttttacctcgtcgtcttatcatgcaacattttctagtagtctttacatgtgagtggagctatgcttgatgctccatattgcgagtacatataattaataaaattactgatcattcttttccctatcagcgttattgtgggggcagagtcctcaaccttttcacggaggttgtcagaagcacagaagcgacaggatgaacaagatgatggcgaagacaccattgcattcagtaagaacttgttgactgaaaagaagaaaaccaagtacgctatcaccttcctctttgcctctttttgtttcttttattggaatggtagacgttatatgtttcctttcgggggtttgcagaactccaaaggagaagagcaagaagcgagcccataatcacgacgatgtcgctacggaggaggatattgttgaggatttgatcttgagttcagacgaggaagacgaagatgaggacaagaatatggaatcagatgaggatgatggctctatgcctgttgaagatgacagcgatgacgatttcgtcgacccagacagccagtggaagaaacagaagaaagagaaatcaaagaaacggaacaagcggcaaccctcaaagaagggttcgtcaacaacaaaaagaaaagagaaaatcccacatcccaagaagaaggcgaagcattagccagagataatgaaaacgatgatgatgtgttttcaattttgaaagaaacagacgcatcatgaaaattttgttttaattgagaaagacctctgccatttcgttgcgttccttcaccgttattatttatttatgtatgcttaatcgttcagcttggctgatgttgttgattttgctccatacatttttctttctggcagattgtgtgctgagttaaacaagtgataatttccttggggaaaaaaaagagaacgcgaaaatagtattgaacaggctacaacctttgtaagacatgaaatcagtcttaactagtgcgaatcatggggatattccactactttgcacggcttaaattattgtccatgaatcggtggacctgtgattttcagttctgattgtaaactggtactagcatatgaagctacatttgaccaagccatgagaaaaattaggactaattcctttttctaaaacaaaatctccacgactttagatcactgataattcagtaggggagaacaacgagcctcattatttcaatttgctccgttgccaaagttattcacaccattatatatcaacgctaacttaattaagagctcccttgtcttaacactagcccttgacatttgtcttaacactagcccttggcatttgcaaagctctgtacaattaacctaaaccataaaaatattttcaaaccatataatattttcaactaaacaatactgctacctccttttcatattattagttgttttgactttcttctagtcaaactttaggttcaatcaagtttgtagaaaaatttaacatctacagcaccaaattagtttcattaaatacaacattaaatatattatgataatatgtctgttttgtgttgaaaatattgctaagtttttttataaatttaattaaacttaaaattaaaacgacttatatataatactaagtatcatgtaaaaaaatattgaactaaaccgattataagcagcgtgatggaaattccagccgttgacaatgtccaaccacggccgtgtgggccccactccacacgcttcccttcttcccgcccccgccacgatacgaagtttacaaacagaacagcagcctcgcttaatccttctccgtcacgtacttaattaccaccttttttacttaacttaatccaactcctaatcatcccattgcaatatgtctgttttattactacgtttcgtcgcgttcagctctcgatcgattacgagagccatgaagtcgccgttccgacgcgcggcgagcgcgccggcgccggcgccggcgccgatgccgatgctgtcgttcgcgggcaagaggccgaagcacttcacgcttcaggacagctcggcggcggagagggacgccgacctggaggcgttcatgcgcgcgcgccgcctcgtcgtggtgtcgtcgtcggagagggtcgccggcgacctccgcgcgtacctgcggagatcgaggcggtcgccggcccgcggttcgacgcggcggtgagcagggcggtgccgccgtcgtcgtcgcagctcgggattgcctggcaggacgacgcggcggcggcggcggcggggggatggcacaggtggagtacggcgggcgcggcggcgtgccagtggcacacgtcgctggtgaccgagcgggaggtggcgatgttcgcgctcgcggcggagtcggcgcgggcggcggcggcggaggacaggcgcggtgcggacgggatccggcgggcgtgcgccgcgctctgcgatgcggccggcgcgctgagggaggcggcgggcggagccgacgctggcgccgcgacgggcatgtcgcccgcgcgcgtcgcggcgctggagggcctgatgctggcgtaggcgctggagtgctacttcgagctcgccgtcgccggagggaggccgccggcgctgtgctcgatggtggcgaggcaggtgagcctggactacggcgacgtgcgcgccgcgctggaggcccccgagctgcggcggcagcacgccgaccaccggcagtgggcggcgcacgcggaggcgaaggcggcctacttcgccgccgaggcgtgcctccgggcggcgcgcgagcggcgtgccgagggagacgtcggcgtggcgatagcgcggctgaggcaggcggcggcgacgctcaagggatcgaagcctctcaagaaggcggcgcgccggtgcacgccgccgccaagtggctgaagcgggaggtggaggccgagctcgccggcgccgagcacgacaacggcatgatctactacatggcggttccggccaacggagagctcgccgagctgcccgggctgcagcagaggctcgtccagcccaccccattggagaacatcctgcagcaaggaacgcacggcgacggcggagctccggcggccggcggctagccgccgtcgcgcgcgtagctgaagtaatggacattgctgttcatagtgtatttgttacattgaatcgagagtttcgagacgttggcacgttgcatttcatggaggcctgtctcaaaaggtggatttgtttttttttaaaaaaagaaattgctaccggacactcaaaaatcatgtaattgactgaaagacacaacaaaaatgtgaaactgtcgatgaaaactacaaaagttgtgtaattagttgtaggacacccggaggcattattttataatttccgggctgaaagagaggagataaatttcgtaatgacgggaataccccccactactccttcctttcttctcgatgcagcggacatgtaggcccgcgcacagtgttgtccttcctcctcttgccagcgctccactccaaatcctctatcatccatggcccaaccgactgctaccttcacatcttcaccctcaccgcccctgtcctttgccttctcatctcgctccggcctcagtggtgacgctagcggtcgccttcgtcgtcgtatcctatgccgccctccttctgctgttcgcatgcctctgcgtctacgagcggcgccggcgagggcgtggctcacgtgtgcggtatgggcagcctccatgctactcaccaccatgttcgtatggaaggtcgcggcgctcatgctgtggcccgtggttgccgtggtgtgggggctctccatagtcaccgtgctcgacatggtttaccacagaactttactcaaatccgagcgattttgatcgagatttcaaaatggaatcttgagggcaatcgaagagtaaagtgagagcatcaaatcccctcagcctattctggaaaaatgcgagggaatcgattggattttagaagggatgcaacggcgttggtcggcgttggacgatggcgagaagaggacgacgatactgtacgcgggcccacatatcagctgcatccagaagatagaaaaaagtagagggggcattcccgtcatttcgaaatttctctccccataattcctcccctatcgttttttccttctttttttccaggtagagcagagggaacagaggagcggggcactggtgctccggtggctgggaggtggcgacgtcggcggccgaatgtgttcccgagcgccgcgctggagagccccgagctgcgacggcatcacgccgactaccggccgtgggcggcgcacatggaggcaaagccggtctacttcgcgtcgaggcgtgcctccgggcggcccgagctgcagcagcagctcgtccggcccaccccaatctgggccgattgggccgatctcagcctcccggagcggagaccgatctgggccgtccatccgcgccgcccagccaatcggacggtgggtgtattactgtactgccaggtcggtgaccgtacaagccggaatattcagtagcgtcgttcgctccctggcttctccatttcttcagctccgccgccggcggcggcggcggcggcggcaggcatggcgcgccgtgtcaccacccttacccgcgcccgcacccgcgcccgcggcggcggcgtccccagcgcgcagggtggtacgacccaagacctagggcgcgcggggggcagtggcaccgagggcgcacgccacgtgctcgacgaattgccgctacggggctggggcgcctcgatctacagcttcaaccgcaccctcaccgacgtcgcgcgtgacagcccagccgcagcagtttcgctcttcaaccgcatggcccgagccggcgccgacgaggtaactcccgacttgtgcacctacagcattctcatcggttgctgctgccgcgcgggccgcttggacctcggtttcgcggccttgggcaatgtcattaagaagggatttagagtggaagccatcaccttcgctcctctgctcaagggcctctgtgccgacaagaggacgagcgacgcaatggacatagtgctccgcagaatgaccgagctcagctgcatgccagatgttttctcctgcaccattcttctcaagggtctgtgtgatgagaacagaagccaagaagctctcgagctgctgcacatgatggctgatgatcgaggaggaggtagcccacctgatgtggtgtcgtataccactgtcatcaatggcttcttcaaagagggggattcagacaaagcttacagtacataccatgaaatgcttgatcggaggatttcaccaaatgttgtgacctacagctctattattgctgcgttatgcaaggctcaagctatggacaaagccatggaggtacttaacaccatggttaagaatggtgtcatgcctgattgcatgacatataatagtattctgcatggatattgctcttcagggcagccaaaagaggctattggaacactcaaaaagatgcgcagtgatggcgtcgaaccaaatgttgttacttatagatcactgatgaattatctttgcaagaatggaagatgcaccgaagctagaaagattttcgattctatgaccaagaggggcctagagcctgatattgctacctatcgtaccctgcttcaggggtatgctaccaaaggagcccttgttgagatgcatgctctcttggatttgatggtacgaaatggtatccaaccggatcatcatgtattcaacattctaatatgtgcatacgctaaacaagagaaagtagatcaggcaatgcttgtattcagcaaaatgaggcagcatggattgaatccgaatgtagtgtgctatggaacagttatagatgtactttgcaagtcaggcagtgtagatgatgctatgctttattttgagcagatgatcgatgaaggactaacccctaacattatactttctgtttcctcagtcttattctaaaaataatttatactttctgtttcctgttagtgatggctataaccattagatggctttttacaaatttagatgataattatcattgttcaatttattgctgaaattcttatctgtatgcatcattgttaacacagcgacaaccaggaaattagttcttcttgagctaatcatttccctccctagttctgtcatacctgtgcggctatattactgtcagctgcttatgatggctgcaaagctatttcttttgtaggatcctgagttctacaagtatttggagaagtgagataaagagctcttgggatttgacgatgatgactttgatgtaacacaaaactatttaattaattatttttcatttttctggtgtcttccctgctgcttgatatgctggaaatggaagaacttggagggaaaccagatgctgtaggcaaagctgtgaatctgttcagtgttaaacaggtatattttctcgtaatacaacacttcctttcggagcactactttgaaaaaccttttaataggtacttttttctggcaggtagataagaaaacagtgaagacgcgtgcctttcaggaagcatgcatcttttccgcggttgatgagttgggctaagcatttggcccaatggagagagatcaaagatcttatccatcaggtttgtgcctgttttttattctcttttccaagaggttttccaccggtttttggtgtaaatgttagcatgtttctaggtgtaaattgattcccatgcattgctatataatcttggccaatggtttttagtgcctgttttcaaatttggttagctgtcagtcaggaggtgcatgctattaaatttacttttgccgatgcaaaactgtccattttcagtttttgaattcataaaactccatactagcttgaagaatattagcaatactagctttcttccaagctaaccattagttgttagagaagaaggcaacgctcaaaatgtcctttttagtttttatgtttgttctgcagacacttgtctgtaaatttgaaattaattaagcaggtttggataagctgcttacttttaatatgtatagacttcaaatatcctttggctgattgcatccaaaattgctacggaaagtctgaaattttgtttagatcatgccaataatgcatgcagaaaagtttattttggttttataggcaggctacaggcatgacattgctgggtcaatggcttgaaagctgaaacagtaacctacaatatggaagtaactaaaacgctgggcattttgctttcaaatttttgaatgccagttatgtttgacagtcctttgcactttgcatttaatcaagatgtccatatctcgggtagataaattgtttatcttttatgatatcaattggatattcgaagtcacatcctactactactaatttgatgatgcattagtttcgatcacaagcatgttttttggcagattgatatcagaaattaatgggaggatggtggtgtgcttgcaaggctggacgtttgctaccagaggagtgtcctgtaatacaaggcatgcagttcagtgtcctgtaataggagtgaatcggtgtaatttctgaagaaattacgcgtttgcttccctctgatttcgcgttggggggcaacatggctttgcgcctgaagattagtagtattagggtaacagattgttgagctaatatttggtgccgcatcggagaaactgaatagtatatgttgttaacagagaggctcatagctgatatgtgctcttgattgtgtgctcagtttaattactgtcaaatttaacgagagtaaattcatcccatcagtgtttgtaatttcagcccaaatgcacctgtgagttaggcccaaagtggtcccaaaatctgcctaaacctggcccaaattcggtcggtagtgtcacacagtttcacttatcgcgcggcggttatcgcacttaccgcgggggtacggtaggagaaaccggtgatatggtttagttgaattttgaccaaatttaaaattccagaaaaaataaaaaaaattgaaaaaaatcatggatgttgttctttaattgtacctgccaatggtgaagaaattttttgaaatagagtaagttaaattcagatttgaggataaaaccaaaaatagtttacaaattggaaaaaggaagacaatattaggccttaagtatcctacatatccttccaattattctcaatttctagttttctacacatatttagccatatttttgtttttttcctatttatttttcatttacatgatttcagctatacagcccgcgataaccgcgaccgtgcgatgtcacggttatcgcggtaaaccatgcggtaaccacggtgaaatcgcgaaaccgccaagttttgaattcgaatttttggatgtgatgtttgtacaattttagatagttatcgcgctactgcggggtggcggtaaccccggtccaaacgataaggtaaaccctggtcgcacaaatttgacctaaaaaccaaccggttatcgtgctaccacggggtgcctcagtaggaccttatgtcatgggttcaactcctcatgggagcgaattttctaggaattagtggcattgtgcttttcaacggtaggcgacgtaccggttgacaacgaggcgcctgtgatgacttcgtcaatttcaaggatgatttgtcggcccaatcttcgaagattataggggtagggtttgcgcacgtgcgttcataagggtgagtgtgcatatgttatgagtgtttgcgttatactgtataattctaaaaaaacaataatcatcccataactttcgacccgaaaacgaacgtcaattcgacccaaaagtgcgtctaaagttatcccctttcacatccatggtaaatttaaagtttatacattaatgtgatttaaaatttaaaattatttgaaatgtgtataaaataaattatctaaatattgtcaaggtagtcatagatatagatcatgaatttatgttgctagaaatatccagcttataaaaaaaatcctagatacatggctgtagcaaaagagatttagattttatctcaatttccgttagcattttttcaattaataatttgttaagtttgtaataatttaaatctaatcaattatgtgctaatgaatttctgttttacgttacatctatttcaaacatcaccttagagcaggtagaatattgaattataagtcagctataaacatatatcgaggagataaaagaagagagagataagtagcgggctacagatttatagccagctgcagcacagacttcacgatgcaatgtgcgtacagtctaacatatacctttacatataactattgtatgaattgagggtgtgttcgcagttgctagttcccaactagggacagtacgcacgtgattaattaagtactactccctccgttttatattataagtttttctagcattgctcacatttatatagatgttaatgaatctatacataatatctatataaatatgggcaatgctagaaagtcttataatataaaacggaggaagtattagctaattttttttttaaaaaatggattaatttgattttttaagtaacttccgtttcgtgtagaaacttttttaaaaacacaccgtttagcagtttgaaaagcgtacgtgtgaaaaacaagaaagagaggttgggaaaaggggcatccgaacacagcccgagtataaatgatttggagctggtaccagtaccggtcacacgcggacgcggtgcgccgaccgtccgacccaaccccagccccagcacgaatctcaacgcgacgccccccccccggcgggggcgcccgccccgacgcggcgaagcaagcaatcctcctcctcctcatcacacaacacaaagacgactgactactcctgtggacggcttccaacttcccccaatttttctctcttttttttttcttcctttccttcgccgcgaagcactccaccgccgccgccgcccccgatctcttcctccggcggccgccatgtcgtcggcggcgaacgtgatgctggcgatccacgagaagaggaccacccccaccgacctctaccgcccgctccgcctctacatcgcctccgcctactcggagcgggaggcggccgcggccgacgacgacctcgccgcggtgcgcgacctgcgcgccgacgtcgagcagccgtcgctcccggacccgtcctccctcgagcgaaggcgggacgcgctcctcgcctacgcgcgcgccctgtccctcgtcgagccccgcttccccatctcctccgaccgcgcccacgtccactccctcgccttcacctggcacgacgccttcaagaccggcaagaaggccagcgtcgcctccatccacctcgagaaggccgccgtgctcttcaacctcgccgccgtctactcccagatcgcgctcgccgcggaccgggccaccgacgtcgggatcaggaccgcgtgcggctcgttccagagcgcggcgggggcgttcgcgtggatgagggagagcggcgtcgccgccaaggccgtcgcggccggggccaccaccgtcgacgtcacccccgagtgcgccgccatgctggagaagctcatgctcgcgcaggcgcaggagtgcttcttcgagaaggtgatagccggtgggaagccgcccgcgctgtgctccaaggttgcccggcaggtgagcctcttcttgctctgcctcctcttgttcaggttatttcgatgatatgagctgataataatgtagtgagggagcttatttcgatttatgtggctagtattttggaatgctttttgtggagtcgtttgatggggatactgtctgtaattaccatccacaggtgacttaacatagcaacttgtagttttgggaatttgtctaaataagtgctcctttagatgctatctttagtgttgataataataattggactttgctatggtgattggtgaaccattgggcatgaagtctgtcttgatagcatgataaacttgagttgtggcatcatcccatggagtgatcatattttaaatgaaactgactggttacaatatgattgatttggtagcattcatgtgtctctcctggtggtaaatagaagctagattaggtcttgcagtttatttgattaaataaagtacaatttgcagggtttactgcttttacaaacattcaagatacaaatatttcttcacctttttgtaatattggtgtcagatgtgctattggattgatttgtggatgtccctttttcaggtgggcatattctatgaagaagcctatgcagctcttagcgcagctcctctcagtcagcactttgataagacatgggtttctcatgtccagctgaaggcagctcagttctatgctgatgcttgctataggtgttctttggatcttcacgagaaagaagaaattgcacaggaaattgcacgtctgaagattggaattagcgctttggcagatgccaagaaggtggccaggggagttgctgccccacttcttgattctgttaataagctggagagtaatatgaagaccaacttggagagggctatgaaagagaatgaccgtgtttatctgatgagggttccggatgctagttctcttggcgcgctccctgcagcatcacttgtaaagcctacatctttggctgaagttctagatgctagcaaagagaggcttttttcatcacttgtgcctgatggaagcatgaaagcactttccaagtacactgagatggtagataacatcatcaggactcaagcggagaaattacagcaagctagtgagatcactagagttaggttgaaggaaatggacttgcccgattccattctttcattagaaggtaatatcaccttacctttagatttgaaggaagacgttgaggctgttcagataagcggaggccctgctggattggaagcggagttgcagcagcttagggatttaagcagagtcaatcaggaattacttgttcagaccgaagagatgctgcagaaggaggcgaatgaagatgctcagtttcggacgcaattcgggagtcgttggactagacctcaatctagcaccctaacaaaaaacattcaagaccgattgaatctgtttgcttctaatcttaagacagctggtgatagtgattctcagattgagcgaggtttgaaggagagctatccattgatatctattcttgacagaagaccggtgagagttaaaaatacattatactagatagtgttcttgttttttttttcttcaacttgtctttcttgatatgcttcattatgaatttcaatgatgttattcaatcctacactcttttttttttcatatttggtctgttacatattgctattatatattgcagatagagtctgcactaccgagtatttctaggcctattatgtccttggatgggaatgaggatgctattgttggagcccttaaac

SEQ ID NO: 6193 - DNA, 13729 bp, Oryza sativa
agatttccacagtttaagatttatcgatttcccctgaaatttttggcttttctaaatagttaacactgttttacgtttcattgatcgccatgatctctactttctatggaaaatggcatatacttccatcgtccaatattaaggatgctcacatatactccctccataaaaaaaaaactcaacctagtaaagaatatgacccctcttaatacaatacatttggactacctattgttcagattcgttgtcctagaagggatcacattctcttctatattgatttttttttacggacggtttttgacggacggggtataaggcaatatgctcgctgggatgcttgcatatacagggcctttttttttcaatgccacactttgacacccgaatattagaagcgccacagtttattgctgattgtttagtgcacgtaaggtccatttatatataggtttaattagatccatgacattataaattttaccgttttaaaatatatactccatatgtttaactgttcaactataaaccgtgaaactttatatatatacaaaaggagctggcaaaaccgtgaaactttatatatatactccgtatatgcaaaaggagctatatagaggcggtaatggacccaatattttacactagaaaattttgagggtttgatttaaaatgggttggactcaattattatacatttttaacctaaaaatatttgagggttaaatagggttgtgaaaggacccatagaccttgaaccatttccacccctcattgcgtttgaggttaacattcttttctttgctttgggactcagcacggtcacatatacggacgactccaaaacgtaaactaattctagcttcataaagactctcacttttgttccataaatgcaattatattttctatagaactatattgatcaatataaacagttacgatctagtcctacacaccgatctaacgatcaatatttttctctcttgatcaatgtggtaactttcatgtatatatctatacccctgtacattctctttctttttcccgttactctttcttttctgctttcctttatgtacctccctctctgtctctcttctctctaaccttaaacttgtaacctataaacctcatttctatcaatgaaatgactataaggtagagccttcttgcgtcaaaaaaatgtggtaactttaagcctccggagcaaacaatgtgtgcctctttttcttgatcccataacatgatcgattgcatatatattcttccctggcttttagtctcatttctcatcctaaataaaatacagaaaaactcacttagtgatcatcaagtaagaaaaatcccatcaggctgcaacgttgagatgtcattcataccttcatcatggcctacgcctaatctccttcggcttgtaactcattcaacatagtatctaggaatttatcgaatgtatcccttcttagccacatgttagtctcctcctcctcttcttcctcttcctcttcctcttcttcctcttcctcctcttcctccgattccacatcatccacttcaaacaaccccaactcctcctccgattcatcctccgattcctcctatacaattgaggaaagcagctcatgcaattagcaacaaagcagcaaaaagtgttactacctccgtttttagatatatggcattgttagctttgatacatgatgttcgaccgatcatcttatattctgaataagatgattgctcaaacattatgtccaagtcagcggcatcatatattattttaaaatggagtaaatgctagtcctgaaagtgaatgtccgtacatcctcggagctgcttgtcagtaccaaacgatatcgctctacatccaagtgaccaccagcgtatgcattagtattttgggggtgcttcataggaggagtccccttgtttctgcaaccataacagtgaccccctttacagagaaaaaaatgcatttgtcaagtaactgccaaatcaccaaccatgcacaagcagatgtacatccgagtaattgaaggaaacgaaaaacgacatatgcaaccaatatagaggcctgtacatgaaacagtttaagatattgtacaagcatgtatgacatgaactactgtaacgtaacataatgggaaagcaaaactgccaaattagtgtaataggaattgcggatgatgttctatattcagcagaaaaagttttgaaaatatatctaacagaagagttggcgcttcagcagccatgcaagaacagatgttaacacatagtcacaaagttctcaggttgatgaggtcgaggaatttgtacgctacttgctagaggtttttacactaccgcaagggtcatgaatgacactgtactcgaacataacggcaaataaactgacttcagtttaataaataattggaaatcatatcctacattcagcagcaaatatacaaatgctatcgtaaaaatatacattcaatgggtctaatgaattgagttccaacagtgtgtaatgcaatatatagagcataggtgctaagcaaaaggcagaatgcaacatatgaattcagtatagtctacagagtagataaacaaatattcctcaatccagatttatgtttgaggtaaactgtaagtgtaccaataaccactacaatgtgaatttagaagatagtttaagagaaaagtatgaataccattaacttcagtgtcaatcttgcagaaacagctgaccttccaggccattcttctttgcacatgtgtcacttcagcaaagaatagtttgccactgctatcgtcagctcccttttgttttgctgtgaaattgaaatgacaataccacatacaattctcacaaaataattgcctactcacaagatcttcaagttcatatgcatgattctacaacaataacattaccaaaaattgcatcagagagagagagagagagagagggggggggagtataccccaaaaagtttgttgtcatcattatactggtccaatatagcttgaaccaagtattgcttttcatcataggtagtcttgctactcggagaactgggatctctctttggtggaccataaagatagtgtttacaatcatgtatcatcctatccacacgagaaaattcacctgattgtgtgcacctaattcagatcagagcacgccacactattagtacttagtggagaattcaaagtggggaatatagaagtgacactaagttgtctaaatggttataggtccaatgtagggttaggaagagtttgtgtagaaagttactgagcaaggatgaaactcccaggtacctatgttatcactgattgagtaataaaaaagtgtccttgaaattataacaagataagagaattgaacatgtacaatctccatgcctataagttatcaatcaggctaattgatacggttatcgcaattatttgatacagcagacaacagaactgtgtgtgtttgtaatcaacttacattacaattcagattaaaacataccttaaacaaagcatagtatagtatatatttactttgtggacttactgtcatgcctatgggttacgattagtactccctggcaaaaataataacagaggatagtttcgctaacttcatcattgtcataataggaccacatattatagatgcaacctggtttttttttttatcaactcttaggctttctattactccaaagttaagtatatttgctgcgttcttaactaatttgatgaaacaaaattaagactgtaaagcaatacctttatatgaagagtaatacatgagcaccatgagtagaaacaatgcatgcaaactacctagtcaagttaaagtacactgaccaaacaccgttgcttactgtggagaattaaatgaatgagctacaacaaattcaagaagaaactttaccttgctccatgctgcagttcatcaagaaagcacttgatagcatcgtcagcttcatctactctctgaaacggtccacccacatcagggtaagtccagcaagagcccctggggtctattctaatgtagaacagctggtagcaatttacaaaactgcggaccaaaatgctagacccaacagatgaggaagctgattgcagatagccatcagtggtggtgttatctggcgccgttcgtggattatcatcgaaaatttcgtccaagagcgaaagggccacatcttgcagagatgtggacagtgtagcatctgccacaggcttgtcaattctggatgggcaagtgctagatgagccatcatcaatgatgttatgactggcagtaatcaaatcttgtgatgatgtggtgtcaaaagactcccccaaggatgaaacatctggctcttgtaagggtactagaggtgcagactgagcagcacctgccacaagcttgtcagatctgaatggagaaaagcacagtgagtacatagtatatcctacaaaaaattcacatccaagaacaatcgatcactgagcaatgcctaagtaaggccgagtttagttctaaattttttattcaaacttccaacttttccatcacatcaaaactttcctacacacacaaacttctaacttttccgtcacatcgttccaatttcaaccaaacttccaattttggcgttaactaaacacaccctaagctgagtaagaaatctgtaatgaactggtagcacaaattcgatagaaatccatactgatcccccagttttatttattttatgtcccttatctcctgctgctgctaatactagaaaacaagcctttatagcaagtaccaatccccatcacctccaacgaatgaatacccaaatattgccgagctaccaatcccaattccctcccaaggaatgaattaccaataccgagcgtttatcagaccaattcgtaacctacttttttacaaaatgggataatcccggcctctacatccaatcgcaacctaatactagatcgaccaatttgtaaggcctaattggatcggtcgcaaacagaaaaaaaaaaaagaaaagcgagaggattcatacgatgatgaaggcgaaggcgaaggcggaggcggagggaccatcgccggcttggttagggtttggcgagggttcgcactcgggaccgatgattatgttgggggatttttggttcgtgcgcgggacggagacggatttaccggttttgcgtgcggcggctgggttgaagacggagaggagcgttcttttattttattttatttgcttttcttttctctttgtgaggactttcgaattttttttcatttttaatttttaattttttaatatttacagaaatattataccatccaaaatatttacacaaatggccccttccacccaagtggagagcgataaaggtgtgcgcattttgcattgaggtcattttgcaagagggtaaatacaattttcgccttaccaaaaatatatttttctagtttttttttttcaaattatccggccctcaactcaccctgccgccctaaatattttcaccgtacaatatttctataaatattaaaaaataaaaatttaaagatgaaaaaaattcaggactttccgaatcgtttgtgggccgagaccagagaaacagagcaggctataagtctatttgccctcccccatctcttgctctgattgaatcacctcactcaagtactcgtactcaaccaaaaatcggggttataagtcgtaacacctcccccatgtttaagaaccggtgcaaatcgaaccctttcagtggtttgggaagcagttttttttgttgacgtgaggtgggattcacatgtcagtgactcttctatctattctctctcaaggtagaaggagggttcctgaggcgaagggaggcgatgagaatcattgacaacactataatttttagttgaaataactatagagtaaaattcacaaaactacacatatgttgatcaaattgtcacaaaactacagatttaatgcgttgtatcataaaactacagatttaacatcaaatttataaaaaaactataaatttaaggtcaaatattacacaactacatatttaatattaaagttattacaaaactatatattttagagttcaaaccctaacactaccattatgttagagttacaaacattatagttttgtgattaaattggtactatacctgtagttttgacatatatttgctacttaacctatagttttgtgacttttcatatcttaaatattccaattttgtgacaattttgacactgaatatgtagttttatgatacaacactttaaatttatagttttatgatattttattcaaaatatttgtagtattgtgaaatgtactcatatctataccatgttaaagaaaggtccgagggtccgagggtctagcttcgagtctcatcccttaataaatttcaatacaagagtcatacccaatgttttgtttaatatctatatcgtttaaatttcaccataaataacctagttgaatttctttacatgggagcaatcaaaggtgatcttgtatgtatagatggccaaatgagccgtctggtccaggcacgactagatacaggcctaagatcaatctggccggcacgggctcacttacacgctgggccgttggtgccaaaaccccatgtcatggaccagatcatcggccccagaccatttggccatctatacttatctgggagcggctgctttttcacgagaaaaagaaaaatgaaaaactgctgaaatacaaggtgaaaactgaaagaaaagagaagaggatggatggaaggcgagcaaagcaaagaagctgttagtgggcttccttcttcgtcctcctacattccctcttcttccctttccccctccattagtactaagtactaactctagtttctctctctagttagttagtttggtagaaaattaggtaggcttttagcatcaggttggtagaaattcgaatccctctgcgtggacacgtagcggggagaggaaaaaaatcgaagcttttcatgactgcagccatcgccgcagatggccaccaagcgcgcgtacaagctccgtatcctcgattcttcttgccgcttgaatcctcggtttgggagttttagattaaatttgagttctttttttgggtcgagttgttcttgccctgcctgcttatcgttgtatgtaatctaggtttctgatcgagttggggggagtccgcgtgtggtgatcggtttcgatctgcgctcatgttattttctttgtgctgttcttggtttgatgattgggtttatcgcggtacgctgctgggattgatttggtacgaattccaatgagatgagacgatttgagaccatgtgaactctactgttcagctctagcagatcttccttttgtatgcgtgtgcaagtattatgtagttctctgcttaaagccagactaaattttgctgttttttttttttgccggaatgaccgaaggaggtcattcaatgtaattaagacggaagaaaagattacaagaaaagttttacatcgacagttggctgtcgagaaaggatgtgcaccagagcacacgccccgaaccatgtgccaaccgcctaaacacacgctacagagagggaagtccgttacccaatccgaatccaccatctgaacatcggcggcacatggcttccgccacacccgaactgacgcccctccgtcggccgacttcatcgaaccaccatccctgagagctgacccaggacccctccgttcaaccacccaccggcctcctcgccagatctggccgaaggagaacctgggactaggtggcattgcttcagcagcctgagcttcccccactgacaagctgccgcctcaatccagcttagaaactccccacaaagaaggggaggagctctaggaagggcgagggtgccgatcgacaacgaggaaaacgaccaaccgccgccaactccctttgcattgccatctgggcctgcaccaatgccagaaacgctgccgctccggctccggtgccacccgccggcgccccctttgtccggcctccttgccccacctagccgtgccgcgccgctactggccgctaagggcaccgcggcagcccagctgcccgaccgtcgaggcctagccacgccatagggcccggcggcagcgaaggcagaggcgggggcgggggaggcggcagggtgttgaccagcttccgccgccgctcccaaccgccgccgccgccgccgcacggttcggccgcacgccgccgccatgcacctcgacggcatccgcatccgcgtccaggccggcaccgccgccacgcaaccggagccgccaccgccgccgagctgccaccgtcgccgagccgcgacagcgccgccgaggcgccaccgccgcccctagccgcctcgcgccgagattcaggcgaggatggccggatccggacttggggactccggatccgccgcctccccgcaccgccccaacatcgacgtcgccaactccgaccgcggtgggggtcttcgtttgttttagttcgagagaataaagactattattagtgaagttttatttcaaaaataaatattagttagagcattgagttgtcatcttacaaaaattgactcctgtattatcttctgcttggatagtttctgctgcaaataggatcacactagggtcagatgctgacacttaccatgagaaaaaattggatggatgaattaatcaatacaaaatcttcaaatatttattatgtgtagctcttttctttaagaatttagatggtgagatatcatggataatacattcactgaaatgaacatggtttaacccgaaaagcattgttatgtcagtaaattgcgttaccttgttgaaatgtatattttgaaatacccttccaaaaaagtgattttctgaagcaacactgaaaattgcccaaatgccaaatggtaatctacaacagccaaccatgtttccttgacaatggccagaggagtttgttgcgcatgcttccgatgtcaactgtgtcaagtttgggaggaagacatcaagaatcctcatcactggtggggaggaccaaaaggtcaatctttgggccatagggaaacccagttccatcttggtaatattccactggcctctgaaaggtcaatcgttcatgtgtaatacttcttttttttcttccttgtctttgttactcagttttatggggtctttattagtcagtttgaaagttacatctcttcttacaagttaatgtcactatgaattgcagagcctgtcaggccttacgagtccagttgagtcagtgagctttgactcatctgaagctatgataggtgctggagcatcaagtgggacaataaagatatgggatgtagatgaagcaaaaggtacgaactaatatggataacaatttgctgcattattcatttaaagaaacacttcgctgcatttaaaccgaagtataaactgtagttgtatcacacaactataactttgttaatttttttttgctcagtcgttcgtacttttactggacatagatcgagttgtgcgtcccttgatttccatccttttggagaattcttcgcttctgggtcttcagacactaacatgaaaatatgggatatgcggaaaaagggatgcattcacacatataaaggtcacacacggcggattgatgtgcttagattcactcctgatggccggtggattgtctctggtggatctgataactctgtaaaggtacaattctgaatatgtctattaatacaaggcaaacacaatcacagcactggaaaagaaataacatgctatgctgattattcgaaccattaagctgtcatatgtatctctcgggtcactgaaattgttttctgatcatcttgctagatctgggatttgacagctggaaagctcttgcatgactttaggaatcatgaaggcccaattaactgcttagattttcacccccatgagttcttattggctacaggttagatagatgatcctttattataacacttgtagtagatgcattcactgtagtgtactagctggcagtttgatgacatgttttcctccaaaattatgctattatgaatattattatttctggcatggatcattgttgactgatgcttatttgtgtcatctagacttgacagcctatacattgctttcttgtttcaaaaatatttgcaggttcagctgataagacagttaagttttgggaccttgaaacttttgagttgattggttcttctggacctgaggtattgaatatattaattgttgtatatcttaaagcaattcaagttaatgttcagagtttgagccaatttagatctataaataccatcgctatgtagcgctctgtcatactatctcctatatatgagggtctcatgtaagtgttagatacatgtcatcatgttcttggcttcaaagagattcaattaaaaccaagttccagtaatctatttaagtttatggtaattctgcctaaacctggtcctttaaaaggggataaaagaacacagcaagtcaacattaagcagtacttctgtgcatatttggagtcactaaatggtaagatatcaatctgaccagtgattcaggcatccagcatgtcaaaccaaatgatataatcatacctgaaattctctctctgcaaatagctttcaagagcttatataatttaatattcatttatgcaaaacgatatgtcagttcaagtttttacccacgttccttaatttgtacctttggaccctaatgttttgtcagttagataatacatacccatccttaaagaaaagattgattgtaccttgagctataccatgagttatttcaatctccgctccttatcttcttgtttcgtggatgtaactaatatattctgtttcttgcagaatagccgggaatactttgtgccagtacgttgatccttaatccattctatctatatttttctactcaaatggatggcagtgctttctgtctacaaagttctcgatgtaaatgaaataatcaatacttatcttatctgcatgtactcttaattttcaggctagtgtagttcggtctatgacattcaacaaagatggtaaatcacttttttgcggattacatgaaagtttgaaggtaactgctctgttggactgtcgatatcctctgaagctttggaaaatgacctcacaacagattttatttatttattttttttacctgtaggttctttcctgggaacccatcatatgccatgatgtggttgatgttggctggtccacattaggggatctaattgttcatgagggaaaacttcttggttgctcatataaccaaagttgtgctggaatatgggtcgtggacttgatggtatggttctacactatttactttgttaccaattgggcagttctgatatgttacttatcccaaatttcagaaaattgaaccgtatgctgttagcattgctgaagcacatttgaatgaaagcgtaaataggtcaatacaggctgataatagcatatcatcagtgttgggaaggttatcagtttccagaagcccaggtaaacaattatcatttggcgtataacatcaatataatttttcttcatccattatccttgagttatgattcttcaccctaaaactatgtatattttgctatttctcgaaaccgcagccaaggaagcatcttccgatactttgcttaaactctcaatgtctgcttcaaaagaagttcctgttccagcttcttctgcagtgacaaagaaactaccaaaagaacctataacaagcaatattcggctcacaagatctgattctctaccagttgtttctcctagggttagattgaacccaaagttctctgatgaccagaagaggcagacagattatgctgtgcctataacaactccaagaattcgctccaaagtggatctctctataggtgctagagcattccatcgtaactcagtaccatcggttgctcccacaaatagatccaggtccaaaatatctgcatatagtagtgaaggatcgtcgttcatccctgttgttgtccctaggcatatccctaaagtggattctggtcccaatctcagtaaagttctcactactgatttaacaattgtcgagcctcaagacatagaacgaggtggtctggctgtggattgtggagaagatgataaattggtgtgtgtgattgattcaaggagctcaaatatgggtgtacaaaatggccgtagaagaaaagccggtgatattattacacataaagaaaccccagagactgctttgacagttaatatggatcgtgacttcagaagaaaggctcctgaaactgaaagtatgcaacaggacatatttcattcagagcccattagttcaaaatgtaaatatattaaagaaacttcaggtgctggagacattaacttgtctgggtcagccattactgaaagtgtcaagtctaatgaaggtggtgactggtataatgcatcttcttttgtaaaaccaaatttgactgttggaaggaatccagagacttcatacatcaacagaagaacaatgtttggattgagacattcaacggattcaagtgaaaaacacgctgttgaacatggtaagtgttcaaaccgatatgttattatttctctttgtttcccttcaacttaccttgctctttgttgggaggacagggccttccaatttgtctgcaagttatgagagaaatcagtatgcaccaacactacataacttggtatgcatactccaaatttccagattatgtcattcacgatgtatttattcttatgttggtaccaaatccatgttatgccctaccttattgtttctgcagaggaggcgctcttcggttgctagagaacagagtgcatcagctggtgatgaagatgatattgctgatctgatggaaaaccatcaagaattcattcatgcagtgaagtctcggctaacaaaactagaggttataacgagtatggtcatctatagcatctgctattttgagatacctcgagtaacggtaatctcaatgtgttatgtgtaggtggtttacaggtgttggcacaataacgatgtaaagggatctattgatgctacacgcaggattcaggatcttgatgtgtgtacttcttaattaccatcctgttctgttgaagttccatccattataatgtctgatgagttctaccacttttacaggttaccgccgatataattagtgttctgatggagaatgataattctatcacactagatatttgtacttgtgtcttacctcttgcctccagtgttcttgaaaaaagcagctatgacaggtacttttccttgaatatattcttgtagcatttctcttagtaagtatgcattgacatctcctattgcaggcacctgaaagttgccttggagatgatccttaagcttgtgaaaagctttggttctacaatatcttcagctgtgtcatctactccaccagttggtgtagacattgaggcagaacagaggtaacctttcttgcctctcattttcattgcatctaaatacattgctgaggcttcatgtacattacaatggttcaattcacacatgtgaatttgttgctactttgctaggctcaatcggtgcaatttgtgctttctagagctgataaaagttcacagcgttctctttgccctgacacggtaaattcttggtttagcttcaaaaagg

SEQ ID NO: 6194 - DNA, 36388 bp, Oryza sativa
tacagttttgaaatcctgtaggcgtaagtgggtccactcatgcgttgccttttggagaagagtagatttatgctgttcatatcgatttttgggagatgtccacaaagcacgtgggtcctccttatacatgtactccattttcaaatcctgacggatatgattcctcgttactttcaaggcggagtatttagacacgttagagggggcaacgttcccttcagctgtttcatctatacatctgtatagtccattggtcgacagatttactttgacatctatcgcccaagcagggattttggaaccatcaagagtgaggatatcaaactctttggttgctatctcacctacattgtgatagccaaaatttttgagaaattatggcatatttatgccattttatgtgaatttgtaaaaaataaagtgcgtgtaaaaataaaggacatggaaatgcatagagtgctgaatcaaactcatatttataataacagagagttacggggtgctgaaagcaaatgtatagtctctgattatttgcggaaagtaaattgaccaaagatcaggagctagaatgaaaattctggaaaaataaaaataaatgggcgatgagccgatacaatctcggtttcgacccgccgctgctttcggtccaggaagtcgggaggggaggcgcgggcgcataggggccattagttggcgccaccccatcctcccacttgaactgctgctgccgacagtacaccgttgctgccgatttgtgttgccgccactcgtctctgcagggacatgtccggtcttgatgatgcggtggaggccggggcgcgcgtttgctgccgcggctacagtcgggcggccggggaacgaaggggcctgtggtggagatggaggtgcgagcacggaaccgctggagccacctactgctatgtagaaggaaggggctccgcaacgcgcgacgatggtgcctctaaggaggagcttcggcggttcagcccgtattggagtgtacagcggcgtcgttggtgagtactccggtgaaggtgacggtgatatgatgtggcgagcgtggtttgtccagccgtggtgaggacagtatgacgtcaccatgtctggcacctcctgcggtagcccgtcgggctgtagccgcacccttgccatccatcgatgggacttgcagtggcgcggcgactccaccagaatgtgttatggcgtggtgcaggtgtcaggcatcactggaggcccatagcgagtcgcgagggtgctggagttagggctatcagctctggtggttctgcaggcagttggtccatcgtcgcggcgtttcctccatgtctggcgaagccagagggaggagaccgggggccacggccggcaaagccagcaccacagcccctgtcacgtcgagaacggcgcacaagagcccgaagaagcttgtcgagttgttgatgcatgaggcaacgtagatggcgagcacgaaggttgcgatgaagaggagatccagcgtcaagaggaatgggaaaatggcgagcaatcttaccctttgagttaccggtgagttcttcacctttgttgctcagtatcttagagctgctgacaacgtgttagaaaactaaaagtagaaacagtgattcatgaatttgcccatattctcgttgatcttaaggtctctttataaatagggagattacaaacctagttaattctaggcattagtgtaatacatcaattcttattctaaaggtagcaataaggttgattcatttccttgcaataaggttgattaatggttttaaccatggctattacaatggatttaaaaccatgatggctgcattgactaggtcaaataatgtccttttgtaacaatactgatagtgtttagtggtaggacaagtgagaatattcagatttgagagttaatagaactgtgggccgtgcaaaattagtcgttgagaatttagatgtttctacggttcgcaatggtgcgcaccctatcgggtaacaataagcatgttgtagcagacaaaagaatttatattttcacttgttgacaaaattagaatgaactataggaaaaaaatcattgcttacatggggcattgtactcgatgcagaacaacattaaggagagcgagtgccattgggggcagaagaacatgttgtatgaagactgatttccctgaaaaatactgggaatgacagattggttcttatacatggcatttgggctttttctgtgtttcgacttaattaattagggcttgttcaattttctaccattttcaaacttactaacattgggtaataccaaattttggtagtattagatgcgtttagtttaaaatcttacttttatgttggtagagtttttgagagtggaagtttctggatttttcaaattttggtatggtagcaatggtaaggatgtgtttggtttgttgctctaataaaatttgacgatgataaaatttggtagggttgaaaatagcaataaagaaaagtgagcagggtactcctaatgatgttgtactgttctattactgttctattaactcaatgttggtgattgttgtcatcatttaccttgcatgaacaggttgtacaaactggaccattaattaatattatatatgtagtatcatttagatgcagtaaatattcattcagtatgaactagccactttgtcacgcattgcgtgactttgatggccccctatgatatgtaaaagttctatgatgaatgtctgctagatatatgtgcggaatttcaatttttatatgaagaacttgataaagaattgctatggattttatttcattatataattttttttatttttttgtttaactagaaaaattgcccgtgcgttgcaacgggcgaaggttattttaatcttattattgttatacggtttagttaaggtgaaattcagtatgggaattcgcttgaatatataatttttttagaaaatcatgagctgcagttaggagtatgatcatctcaagttagcatgtgagtttttttaaaaagatttattatacgacttcttttgtatttaaaaaacaaacgaccttaaaaaccaactcaaatacggatatatatttcaaaagcgaataaaattaaaaaccgactcatacacagatggcgtaccaaagtaccgacaaaaacatctttattttcatttttataatagtagagatgtacctctggttagcttgcttccgtcagcggcgcaatgccgaaactctagatcatataggtttcatatgttgactcgaaatcaacctgccatgttaccaaaccaccgctgagaaagagtcgattagtacctgtttttaattattggaggagacgtacattgtatcaggttttacgttttgagaccttattaagagaaaagcaatatgtgagggaggcaaaatagacttactgttagttggacctgtgagtagaggcccagcccatttagctcctcctctcttcctcgcagtgcccgtgcccgccgccctcgcaacaacatctgtgagggtttcgactcggcagcaatggcgagggatgagatccaagccggcatccccaagctcaactcgacaactcccccgagaagaatggatcatccaagaagaagaagaagaagaagaagaagaagaaggcacaagcacaagcacaagcccgacgaggtgaaagaggagatggtggtggacgccttacccaaggaggaagaggaggaggagcgcgggaagaggaggaagaagaagaggaagaagctggtgacggtgaagctgagcgacgagctgatgggatacctgcggaccaaggaggttatggcctacctcgcgcgcgagacgcctcgcccgctcccgatcgatcccagcatcgcgcagcacatgttcgtcggccaagaactcaggcaggaaatcgctgcccaagttcacgagaacagagaattcgacgccttcgtcctctaccagtaccgcaccaagggctacgccgagatccagcaggaggtcaccgatgacgacgacgacgacggctagaatctgtatggtatgtttttgcagggatcgataagggactacctatatatttgtcgacaaattttctagtaaaaatttgacagatgtaattatagtacaatcatagtgtaattacactgtaacttgtatgtaattacactgtaacttgcatgtaactatagtgtaacttgtatgtaagtttcacgtaattttgaatcgttagatctattacaagatttgttctggtgaagaagaaaaaaatcatagcacacacatatgtgaaaggatttgttcccacgatctctattttactgaaataacatgttaccgagagattcttgaaagttacatacaagttacattatagttacagtgtaattacatgcaagttacagtgtaattacactacgattgtactgtaattacatctgacaaatattagggggagaaatttgatgacaaatatctagcaaaatcgtgtcttcatctattcatttgattaatcttcaaacaactcacaagtgtgaatcttctgcggtattgttcttttgttcatgtgccaatgcagtgtgatttggtgcgctctttttttcatattttagtagatagcactctcccttggttatacaatcaagggctttttagtggatggaaagaataaagaattccatgcttttgtacatttgtttagagaaacaatatacatgtgtttgcaaaactgtgagctttatgcatcgtactgctgactaaaagattatcttctcactctgttgagttggtttcacaaccctatcgaaccactttgaaaaaagtctgaaacaacggattgggtttgcaccagccaattcacctgcatctgttgcttaaacagaaataaaataaaataaattctcatgcatcttcatgacgattattggccagagctaatcatagatctttttcagtgatctcagtgacagaaaagatagcagggatttgtatgcccgtggttcgagggaggggtccatatatttattgggccgtaactgaattctgacctacgtgcagcccatattagttcggcctgaaaggacattccgatttattgcagcccattttgttgtcgggctggaacggcggtatcaccctagttgggctggacgtgaggcccaataactgatgcttaccagttgggccgacccgagatggatgaccccgttattgggcctcgtatcgccgccggcccatcccatcgctagtgctcgcggaggccggagcggaggaggagacggacgcggcggcggcgccaccggcgacggcctctccttcgtctcgttctccgctctgcttgacgggaggcggctcctccgcgcgtccccctctccgccgcggtgaccggccgaggggtgctccgccctccgcttctcccaaccccggacggggcgccgccgagccagtgctccccgacggcggcggcggcggcgaggaacccgtccccgacagccgaaactcggatcccaactaggaggagctgcagaaagccggcgtctcctacctccaacggtgggaaatctcaaatctctcaagtctcatctactgatttagttttgttcattctctatttctgctatttctgttgttattagttctcaaatgcctagatggatagattgaagaaattacagactaattgaaaatcatcaaaactttagctactgaatgagatgggtgatgaaatggctcaaccatcacatggtgagccaaagacatgtgcaacagccaacagtgcaagcattgaaaaaaagggaagatattttttcttctaacatgtaagaacccgaaagatgaagcttcctctcactattttaatttctcgttaagatgcgattttgtgattcatttatatccgtaggatcaagatggtgacagtgaagaagaagaaatctttgcctgctctggctcacaatacttattttcgtactgaagcttgttcattattgttaaattgagcaatcatttcctgactctcattcaggcttcgacttgactgcaaaatatggatctttctcctttcaagttggatattgatgagctactagcggattataccgaggtaattttgactatcctgcaatctctctaggtgtgtcacatttatatcagcttgacgttgctgtttttcttattggtaggcaaattgcactgcattcgctgatttcaagagattgtggatggcaaagaaattttcttatatctatgaaggaagacctaagacaaactctggcgctttcatgcagtcgctctttttgcattgtattggtaggctggcttcctggaaatttgcactgacatacccacaaataatctttggagtcatttctgatcaattttcacttttttactattacaggtcatatgacatctcagagttgtatgcctcaaagattggctggactttactgcctttactgtctttacgaatcgcaaccatacaagccacatttcaagatctatttgtctcttggtaatgcacttgctttcggtcactaatttggtgcttctgatatcactagccaaatgcccatgcgttgcaacggattactgaaatagtaaaaattaaatccttgttgaaaaataatgatcttttatttggttgaaacaagatctttcatctttaaaaaagaaatgaaaaatgccatacttaggattgtggttctcaatgtgagacataaacataagtagtttccagtacttgaatataaatcggtgactccaaccattttaactaaatgtcttttttcatatgataatgaaatatatattttgattaaagttcgaaatatgtactcgttaataaatatgcaaagcaatataagctgcagactgcatagtagtatagactatacatacaacatgggccacatgtcagtgatcgtggtggtggtggcaccgctactgtcttttagaagtagtatagacatactaatatgctcagtatttgtatgcaacagaggagttgaagaaactcaaggattttgttgttgaggctaagcaaaatggaatggctgttgtaccgtcacttgtcaaaagaatgctggacaaaggaatgattttgtttggattcatcaatctacttggtgactcaggggtgaagcaggtcaatgagttaactgcatctcagaataagagagtgaaattcgcatgtgacaagtatgtgttaaactgattctcattagtatttgtgatccattccatttactattgtcctattcaaacaagaacacgtaataaattattgcatgctaatattttgttgttatcctccaggttgtttatgaatactcagatagacagttatatgcacatggatttggtaaggtttagcctgttgacttaaataacttctttttgtttctttcatgcctttttacattataacaaatgacaatacatcaacatgaccacaagcccatactagaaatcctttcatttagtttctcaaaatattacatacccttctgttactgacaaattgatctacgtctagggttcggagcttgaacttgataagatcaagaaatcatcgttggattatgccaaagccaaggaattggcatttgcaggtgctcttagttgtttccattgcattatatagctttcagtttctgtgtgtactcactgagaactttattatcagtaacgatgattttgatcctcctcctactggttttatcctttttctgcttcacagaggcaagcaatattatcgatgttgaagatgctaggcacattgttcagaatgacaaactgctgggcgacagggtagatgaaatcgtcaaagaatgggatgcacagaaggaggccttctacgagaagacgggagtacgtcgcgatgaactagcagtagttgaacatgacgaatcaggagtactccctcatgaaaacgatgaattcgatgagattagacagctgctgctagagtgaaagtagtgtacaacagcatcctcctaaaaaaacagatgaaatcattcattggcttactggagtctctcagtttttttttccttttgtcactcatatgctctttttgagtgttttactgccctgctgtacgttgcaaacaaaaacaacttgtacatagtagtgatatgttggatgaatgttactattaccatattgcgtagttgtacattgcaagattcatttataagacatggatttcataaaaattttgcagaaatctcaacagaaagagtttgaattcccgtgttccaaatgagcctgtgatatgtttgatatttttttctccattatttgtgcagcaagttgatatcactcgatgttctgattggttcctgaacttatcagctcgaaccaaaatttatattttaaatattaattttagagttgatttcgatttttaacatagtttattttcaagcaaatgacttggaagttggaacaaatatataaacattttactttcaattttttttctagtaaccgttgtgggttttgattagctcgaggtgattttttttggactgtcagtctcccagagtccagaagaggatagtggaaaaaaatgtgtgaaagagagacacgtggcgcgcgcaaaagatccacgtccctcgactcgcccgcacccccgccactccccctctcccctctcgccgccgtctctcgccgccgccgcggcgctcgtcgaacacctaccgcccgccgcccgcctcgtcgccggtgcggagcgcaccggcgagcgagatgtggcccgccgcagccgcgtccctccacgtgctcgtcctcccgccactccctcctcccggttgcaggacgcgccgagccgcccctgtcctcgcgcgccgcggccgtggcgtgcgacatgccgcgcgccgcgacacgccgcctaacccggtggacgcggtcgactgcgtcggcacgggcgccgacgtcgagtgctacgtcgacgaccgcccaggcgcggaagtggggcccatccgccgcgaggcgacgccgccgccctccccgcaggacgcggtcgactgcgtcggcacgggcacggacgtcgagtgcttcgtcgacggcccaggcgcaggcgcaggcgtaggcgcggagcccctcctcgcgcgggtctccgaggaggaggaggatggcgtctcggcctcggcggcggcgctcgtggggagggagtggtgggagtgggcgtcgctggtgtcgcccttcttcttctggggcacggccatggtggcgatgaagggggtcatacccaagacgggccccttcttcgtcgccgcgctccgcctcctccccgccggcgcgctgctcgtcgccttcgccgccgcgcgcggcaggaggcagccctccggctgggccgcctgggtcgccgtcgccgccttcggcctcgtcgacgccgcctgcttccaggtgctcccccccgccatagctgcaaggtgttcgcttcttagctctagcgtgtggctgtgctgttcctgagctaaaagcattcgtctcatctcgcagggatttctcgcggagggattgcagaagacatcggctgggctcggaagcgtaagctgaattctcactgctgttcttcacctcctcatacctcgagcaagccattgatactgcccccattttttgtcaattgaactgatggccatgttttcaactgaaatctccattgcaggttatcattgattctcagccattaacggtagctgtccttgcagcgctgctctttggagaatcgattggcgcgataggagttggagggctcgtgctgggtgtcgtcgggcttttgcttctcgaggtttgcctttgtatgcagcatacatgatatcagtattgaacctaggcagataatgttgattacggtaacaggttgtgttaatataatattttctcgacggccattgcatagttatagcatttcgaaggcataagttccttgtagaaatatttgaaccaaacccacttatttgatttgtcttaattcccatagcaattcttacaggttacaacaattgccttctgaattattctattactgatatgtggcaactaattattcagtacatacatgctgtgttatccataaaatggtgtaagtggcgatcttagcttttccaagttatgctgtattttatcgaaatcaaacatgtgctgtgtgaatttaatgccttcttgtattgtgtgcttactcattgattgtgtatatctgtgctaggttccagcactatcagttgaagggaatgacacagcgatctggggaagtggggaatggtggatgttcctctcggcccaaagcatggctgtcggaactatcatggtccgttgggtgtcaaagtattctgatccaatcatggcaacaggatgggtatgttattgcagatgaataaatagttttttttttagtataagaacaaagtgatgcatgctctagagcacaattgatattctttagttttcttgctacaaatgtacctttttaccatgatatgttttgtgcaaatgattctgtatgcatcttggaagtgctaatttggtcatttttattatgaggaactcaatgtgtatacctatgcttttctgcattgtggatcttaatgcatatttctgataaattgtgagaggaatcatgtattggaaatgcattcatagtgcaagtctgcaacatcaactggaatatgaatgctcagatcaacctataactttcaactctgtaatggttctatcagattatgtatgttgatgtgattacagctgattgtcattccccctgttctttggatagttttgtttgtttttgcaattctgaaaagcctggcattacaccatgtaaaatgctaatattcacataattacagcacatgataattggtggccttcctttgttggttatatctgttctcaatcatgatcctgcgctgaatgggcatcttcaagaacttacactgaatgatgtattagcacttctctatacatctatatttggcagtgctatcagctatggtgtgtacttctacaatgctacaagaggtaagatcacttcccactcatgtttagcatttactggtattgtccacaaatatattcttttaggattcccatatgattatgttctttgcaggtagcttgaccacacttagttctctcactttcttaactcctatgtttgcttccatttttgggtaagattctttccccaacatgtcaagctaaacatacatgacaattgacaaacatgtagcacttgttttctaattgctcttctgcctcacctttccttctcaggttcctctatctgggagagaccttctcgcctgtacagcttggtggcgcgcttctaacattggtcgccatctatatggttaactacaaaagcatcgtaggcgagaagtaaaaggccgttgcaagattcttctggagacactggcacagatgaatgctgtactgaagcacctgtaacatttcattggcgcaaaacagcaatgtgaagatttaaagtacatcccacggtcccaacatctcacacagcttgaactgtgaaagaagacagggatatggtggtataacctctgaacatagttagactggtaatttgggcatcagtgcatacttccgaggttcccaagttagtcatctacttcatttcggcttgcattctgaaatggataaaacttgagtgtcatcagatggttaaaacatagttgctatgaactgtgttgtggatatcaaattgagggaagttgcccctttgtacaagtagtttggagcataaaaaaatagttgatcgaaaggaagcagctgtatatgttgagcacaagcttcgtctatcgatctaagttcagacactttccctgataaatacgaagcatgtcccttttgtgagaaaaaagggaactgtgaaactgtagttgatggtgcatgtatatatacgtgtatatgttttccaactgtgatatattttacaattattttatattttaattttttttaaaataaacattttatattttgcattttgagaactagtaatattgtcgtttgaaacatagttttccaaataccaaaacggctaaaagcagtaccaccaccaaatcgagattatcaaaatctactgcaattccaaattcatcaactttaactacaaggcaggtaaaatacagtatgaatccaattccaaccacgacatatattggatatcaaaatagttccaaaactttctgtacacggtcggtttacatcttcagccaagaaaaacacaaaacctataagtcctgatatattcggtatatattcagctgcaggtaaactctcaagtctcaagtctcaagcggtataaaactctatccggcaaatgtcagtgtcattttgacaaaacggtaaaacgtttgctaccattgtcgctggggtaagtaaaaatctgatgcctcctctccaaagtctgcagccatggggtttctttgcaagttgcaacctactcttctcagatgacacagatcagctgttcagatcacatggggtgagtgatgaagtagttgtagtcatggtgctggactccgagctgcttgagccaggaatccgcggcgccgaagagggagaccatcctgtcacggtcccctgttctcgggttggtccagagagaaccctgcagcttgtgcgccgcgagcccgaacggagcaagatgagtcttgctgaccttcttctccgtctcgtcgtttcgcttcccgttggccatgctctcgagcgcgtaatctgtggatgaggcggaaaatacaggtcagcacggttcaaaattagtgccaagaacatcattaccgcaacgcgttgcagttcaaaaacagaactaaggtgatcatcggtgaagtttaataaaggaaaacagtgcataatatttttcttcttaatatgcatatcactatcaagcacactgggatggctcagtttagactcaagtaccattacccactgattttttatatatttgaaatggacagctggggtgcctaagtgctgttgcactcattgcaatccaagcaaccttgcaccaatattttatataagtatacaaagagctcctaccactgtggtagaacatagatatttctagtttttaagaaacagctgcatgcctaagactaagcactaaaagtcatggcatgtggcaagacagtctccttcctccgctttatcgggcaaccaaacttctgccacttatcctcttttttaagtgacatccttatatatgcacttaaaagctaaggcatgagaccttttgaagctgaagttggaagcttggatgcaaaatagaaagctgtacaatcccttgaagaaaacttacaaactcttgcaagctaagcctgtgttttaagctaacatagcatgctaatgtgcagtaaaaaacatatcttgacattaacacaaaataataagagtaaatatattttctaaatttagcatctaaaatgaagaggataaaagcatcaatgtgcttggtctgaactctgaactgtaaagaccaatcaatcgatcagtcgcaagcaaggcgactgttttctagctacataagtccacagtctgaacactaaagaccactcatctgaccagtctcaagcaaagcaactattttctatatatatagttcattttctgaacattaaagaccacttgatcaaacagtcccaagcaacactactgcgaaagctacactgctacagttttgagtgtcttagtcctgggatagcatgttgccatttaagcatagtttaaacatatactgatcctgaggtttttttccccacaggaactgattattcttgtgtaatgtatatcatcatgagatgtaacaaagaaaaaacatatagtaagctataatatttttgaattgatatgcctgcctatggcaacactgtaagcacacaaaggggcaatatcatatccattattttcatccagtaatagaatagtaccctagaatatatatatttttcgactctatcacaagattcaatcaaactagtacttgttaatgtccctaatgcaacaaatagcataccttgaaatgaagaggaaatggtatgataagttaggaagcatgcagataagtccttcacattgcgctggtagggaatatggtagatgggatacctaaatatagcaatataagttaatgataatgtttagcgtaattgtctctgggaacagaattaacaaccaataatggattcaagctcctggagacatcagctactatttagaaacaaaagaattataaagtgccaaaattaacagaaatgcttcaatcaactaccaaaccaagcaacaaggcgattagaacaaccatgaatgcagaaacaccagatttactatagctgtttataagccagattttatgctaattgccaaaaaaacagcattaatagaggtaagcttgatcaataccaggcaactgacatccaactagcaggcgaaaggtcaacacttctcagggatgtcaacccaggatagctctgggatagttcatacacctgtagaaaaacgatataagcataggaaaaagaaacagctggtctaaactactatcacataggacataaaaatttaccttgtcaatgagtggaatccttccataaggagagcaaacctcgaagaactcaaaatacatgtgcccgtggcgttttctattgccacttattgcatcacagttaaataatgagtcttcagatgttgaactccaagatcttgacatcttctcattgtcctcatcatcgctccaatagtccatgccattatcttcaccaaaactcctacagaaaaaaaaaacagagagagaaccgattcacaatgcatccagaaatcggcacagactcaaaattcacgcacaagaacggatcttttgtgcagacctggatgcagtctgggctttgttggtatatagctgtatccctgacaagtagggaacatagtattggactactctttcccctccatacagctgcaccgtagttccagccccgtacgcgctccactcatagtactgctcccataggtccgcgaggttgaagtactcgacgctgtccatctcggcgtggtgccaagaatcgctcgaaaaccggccattcgcctggatcaaaacgagcaacatctcactttcagtcttaagttgacaaaataagcacagctagtggtagcccagcttagctaacccagatcgaaaaggcactcatatacagcagctgatcaacatgcggaaatagaattgacaatagcaaccgggaatttaagatggcaaccgtatatcgccacaggccgcagctactttcgtcccaattaggcagcacggcagcaagcacagagcttgatggtacaattgtccttataatcgtaccaaggaaaagctatatacaagcatggacgcactatcaattaatcaatcaatctaccattacccacaccccccatccttttcacggatgcattttgcaatcaggaaacacgcagcagcatgatcaatctctgacagaaaaaaaaataaaaagaaataaacagagagcagtaactagaataatcgagtaatgggcaacagatcatgtcagccacatccacaccaaaaatctcgcaaagaacacgaagctttaatcaatcgatcaatgagagagagagagaggaggaggaggagggggtgaccttggggaggaggtgcgtgtcgacggcgggggtggtgcagtccaagaagcactgcaggttggacgacggcgacgacgaacgcccgtactcctccacccacctcccgcccgcgcccatggcggcctcctcctcctcaccactcacactcaccgccaccgccgccgctccaaacgccaacgcaaccaacaaacacacgaagaaaccgaaatccgcccgagagagagagacaaagaacccaccgcccctttgctgctgctgctgccaagattggagaggaggaggaggagggggaaggggaggagactttatgcggactgatgcgaggaggaagaggaggaggagagagaaactgggcttcggtttgctttggcttctgtgtttctctctctaggtgaggtgaggtgaggtgaggttagttttctctctctaggcgtcgggggaggggttgccttgtcgggcgcagcaacaacgcaatctcatccccacgtcacgcacccacgggggaggaaggagggaatgggggagaagagaaagctacgggtactgacccggtagcccgataaggcattgttcgcctgttcagttaatccctctggtaatggactgataatttgatttttaatctcaatatcttgtttggtagaggggatggaaattgatagggagtttagttagagattagatcattaataaaaacggatggttgagatttgattagacaaagtaaaggaggaattccctcccaattacctgcccctacccaggtattgaaaaagagggagttccttccttaattcctcatcccatcccactaaaattctcatatcttctaaccaaacaaaacacttaatagcatcatccctctaaactcccaatcccttctaaaaactccctccaaccaaacgggctgtaagaggatttgaaaggaatgtatttcatgtctattgtagtatgtactccctccctttcaggttataagccgttttgactttaagtttgaccaagtttgtaggaaaaaatagtagcatttttaaccaagacaaatttattatgaaaatatgttcaattattgatttgatgaaactaatttagtataataaatattactgtaaatttagttaaacttgaaacagtttgactataacctaaaacggagggagtaattattttttaaaaaacatctctattttttttcctactcggaattaatcgaataaggcctacgggagtagatcgcctgactcaccaaactaagatggtgttggtatgaaaattggaatgtgagtttgattttgtttttttttcctttagatttgttttgtagtttcttcattcatgaaattattctttgtatctgtgtaatcttcttcttaaatgaatgtatttttttcttcacttgttattgtttcaacattatattaggctgaaaacatatggttactactcgtatttacggttatttattctttcgatgctatatgatgtgcctacgatggtgagacatgtatgactttatatttactttatcaatctcaatatattttcttcaagatataggatagggcgtgcgtgcacgttttaagggtaactgctcgcacgtgcatacgtgtttatattgtttttaaaaagataaaacaaaagggacgcgccataggataccaacgtgcacacaagaaagactacttacgaaaaaactagttacttggttacactaactaacgaatttagagtgccacataataaaaacataattttacacataatctatgtgagctaaacactctgttctactcatattttttttacatgtaaagttctttttttccctaaaagataaagggggcagacattctctcactacactcctacaaactcaccaaacccgttaacccgcaaaaacagaattggatcagttaaatattgctttccatcttttggaagcctttgactctttttttccaccttgtcatgcagccgggcccactctcctgtatatccaaagccaagccacgaaagtgtaaagccacagcaatttttcttttctatgagccctttaaataaaaaggcaaaaatattttttgtggatccgatagcccggtagatggtgcacgccctcccatcatacgtttttatgcaaaaatctttgtcctgttttgtgagtcacactggccttcactttgtgccttccatgctcttggccctactgtgccacaccctctagcatgcaaccaatttaagccccatctggccattgcaaagttgcttggcttttcttgcaactaattttgtagccttttttttttgctattatatgttgcttcttatcttatcctttctctttttgatgtacatttcgtagggttatttcggttacactttatccttttgctttattggtcatactttggtgttatgtattgggtagaagttttctatcttttttttagttttcttcatggatgtgttttaaggtttagtaatgggcttcaggatccatgtgaaaaaaaaagtgaagcttgtggattagaattcgagacaatatcaatttgactgcttttacataaatattttgcatgggtacaatgtaattaatttatatgatactttgaagatatggatcttaattaaattgattgaacatctattttttgtggatctttcagatatagtttgttaataagtgattctcattcgcatatggctttatctaattattttgtcttgcaatcataaacagtgaacatatccagcttcttctatttcgggttataaagatcatgctccattcagacatgagtggtctctcctaaattcaaatactatagcgaattcaaatatggcacaaataggatacaagcataaccgtgcgaatttagacaatgttttgcttttatagatgacaatgagaagatgtggattttaattaaaacaataggacatccatttttgtgcatctttaagatagtaatttgttaataaccgattattccatttaaccatttcattgcgtgttcatgagcatctatttttattttatgaaatctgtacatcattctagcatgagttggctttcttaaatccaagtacttcagcaaaatcaggcacaaactagatacaaccgtaaccatgtgacatgagttggtcgatgtaagttgccacctggccatggtccacataattagcttgaacatataagttttgttactcttcatttaaaggtccaaaactattagctgtctcaaccataattcgatagaattttttttggttggatggtttaggttggggcatgcatgagtccctcaattagttggcagtacactggccctattctaagcttacctagctggaacttgaatcttgtccaaaagaaagcacaagaaagtattgtcttgtgggtagaattggaattcttttttctgtggaagtcaagtggaacctggcccacccattaatttgatcattccaactatgagagatgatgtgatattggacaagggtatcttcattggggaacacttgtttcattttctttgagaaaggcatttgatcctgaattcctcctagcctacatttgcaaagtgtagcagagatgctgccatccacaataaatatagtggtggtagtgtattgtagcatctttgtttgcatgctctgcgtatttggttattgttttccgccgtgtttagttccaaagtttttcttcaaacttctaactttttcatcacatcaaaatttttctacacacacaaactttcaccttttccatcacattgttccgatttcaaccaaactttcaattttggtgtgaactaaacacagccttcatctcactgcctattttgtgtgtgcctttctggcattccttttctgtgagagcttgcttggagaatgatttaaatagtgtctgccattagtccaatatatagaacaataatccaatcaccaatgtgatgtgtgtacttagggttacacatataagccactaaagcagcatcttgataatactagctagtttctagttttgtagctgcatatatagcacgatggtgcaataaatatagtgcatatccatttttattatgatggaaagatataaaccataagggcatgtttggttcgacgtatcagcttgtcgtgggtcacgcagtccaatgacgtcctagacgaggcaatccaccaaaatcacatcatatgaagtgatggaaaaaaaaattgcgaggttttagcacgaacaacagacgatacaaacccatgacacaaatcaaacatgattgttaggggatcgaatgaacctagcatagaccggtttcatcaaaccagacaacatctaaatttctttcttgtaaaacatgcaagacatggataaccgtagttctcttttgtcaaataccgatgcctacaattgattatttgtatgggcttcattttcatattaattttataagcttcatggatttatttatgacatccctctattcgtcatatgttaaaagagtgtgttactgggtgtggtgtcactactgaagaactgatctttactcggatgcaaaaaaaaaatacatttatcctggttcgaataggaaccagaactaaagatcatttctagccacggttcaatagttgtcaagccccaacgatctttagtcctaattggtgttaccaatccagactaaatatactttcacggtcagatgtgtgcagtaggtgggatgataatgcatgtgagggccgaggtgagagatcttgagtccgaatcccacatcccacatatttttttacttggtatgcatctttagtcccgattatttcaaccggaaaatccctttctccagtaatgtgtgtgtgttaggtacatgtgcataggtgtgtagtgtaggtcttcctcataaccgaacaaactaacagttcgcaataatcggtttcatccaacggttaattactcaattttccaacatatccttacatttctatttcagttatgtacaaattaactcatgcaaatctgtggaatttgcattttttttccattgcaatcccctcccaattcagtttcaaatctgtggaattcacattgtgcctaactctgcttctagaactcttgctaagctcgagcttagctaccatccaattccaattactgtccagcatccacaacaattgacctgtcgtttgaatcatcttcgaattccgtgccacttgacagcgagcatccgatgctaagctagcttaaagataaattctactactactcctcgataaaaagaattagcttacacggctaatgcacctctggttaggcagctgattaagctaagctctgagagtgacatgttttacagtgacgtggcactgagtgatccccatcctaatccggattatgcgaagaatagaccatggccgccccccgtgatcctgtccatgtcatcacagctatgcactgacagtggatcactaattatttgcttttttaaaaaaaaattgtggggattggtttagtttaattttccgccattccacaggggttggtggaatatttaaaaaggatacttgtttgtgggaaatccgtatgaagtcgacttggatatatgtttggtacatagctttagatccaagatttttttagagctatgttatttaactcatgaaatatatggatctagatatatgattatattgatagcatttcaatgaaatattttgttcatattttataaaaacacagaattttaaactaatagtataatttaattttctagtaagaatataaaatatgtagagttgtgccaaataggtttgggccaggcgattttggttgagagagtgcgcgctttgtaattttagtggatttggattgtttccatgtagtaaggttgtggtttttaatgattgtgtgttttcttttcgtgtgtgaaatggttggtgtcttttttaaaaagtggcgaaaatttctagcgtacatacgaagagatgatgggattacaagaggaggggcaatggagaggccgaaagtgaccacactaagaaatctgagaagaaatgactaatgagactgatggctttagtcatttcattaatgaaacgtaggtgataattattgatatcttggcacgcaattgactgcccctcatcttggtaactactgtctccgtcccaaaataagtgcagctgtggatatccgtgcccaacatttgaccgtccgtcttatttaaaaattttgtaaaaaaattgaaaatatttagtcacacataaagtactattcatgttttatcatctaatagcaataaaaatactaatcataaaaaattttcaaataagacgaacgatcaaacgttgaacgtgaatagtgcaaaactgcacttattttgggacggagggagtagtccatttcttcacaatatcaattgttagagtttagttcatgagaatatgaagtataatctttttaattagatctaggtagtcgtctaaaattttaattattcctccttgtttgtgctctggtttgatctcatattgctaaatcttgcatcatatacgactaacatgaactgtcacttacacacaattaataacataggaattaaatcgattgttagcaatggacaagtaaggctgaaagtaacgtaacataaccatttgacacactccacgactcccatatataacaggacatctcttcccttttcatcgtcgtgttttctcgtaactacattaaatagaggataagaattatcgttgttgtacactgtgccaatattcaaaacgtacccaatggtcgaaagctccgaactccaaaacaaatataggaatcttagtcttaaaagaaaaacataaagatgcatggtgctgaagttataagtacatagctttcacccactaagaattaaaatcaaatcctagtgcaaacaaatattacacatatacgagtatattttcaacaaaaattcaacaaagtcaatggtaaattgttgccttcgcccctttgagagtgcattagataacacatgtattcatgggatataagcgtaatgtgtttgtgtaccgatgtataaatctacgtgtgcgcgtctttcgtgtaataaaagaatacgacatcgcatgtttggaaccgcaactcgatgccgtgagagcatgcttcgatcggtgttaatattacaacgtcttcagacacgcgtagcacggctgcacattcgagccatatgtatcaccagtttagccatgcatccggccggcatccgaggccaatggaagcagaggaggaattgaagaaagggacagtgggcagtgtgcatcgctacttccctagctttagcatgctatgaattgtgatgtgtgtggccatcgttatcgttatcaggatctaattagctagctattccctctgtctcgtattataagggcacctgtagtcctggttcgattagtattgtcgagcaaaattttgattcgtcggcggcaatgtgtgacatcgatcgtgggacccacgtataaaaagaatctctaatcacatgcgtccatccctctcttatgcagccaaccaacggctacagatcatcttttcatcgctgagttcgactcttcttctttggtcgattttttgctctgaaacatctaaatcaagtcactgtgtagtgtgttgtattcaattttttcaaacatggttcggttttacttatacacgggagatgctctaagtcgttttgatttttttcctagtcaaatttctttaattttgaccaaatttatagaaaaataaagtagtattttcaacaccaaataaacatattatcaaaatatatttaatgttagatttaagtttaactaggaaaaaatcaaacgacttataatatgaaacggagggagtagcacacaagatgacttcactggactatttgaaacagattatttgtgtcacgctccaaacaatatatattttttacaaactttttcttagtaaattatttagacaactttttatgctatttattaagtttattttcaaaataattaatttatccataagtcaaatacataacctacgtacaacaacagtgcactcaataatttgtttcaaagctatttgttagatgaggcaggaacgaaggttaggttggtgtcatgtgtggattcggttagtgatgactgatgagagggatagtatttagtgccatgtcattagctttgccaactttgcacgtccctcggggacatggcaaggcacagtagaagtgtgatttctgtggatgcatggatttcaaggggttgcataaattttcttgtgtatttagtttttttttcctctcgtggggaagacgtgtttggtttgcagccaaggagtgaaatgcgttgtcggtcgatttttttctatgttattagttttgtggtagtggaaaacaatatgatagacatgttttgtttgaaaaaaatgcagtggtcttttctatgatgtgtggactaggttaggaagaatttggcacaccggtggcaatgaaatattttattaaacaagtagaatttgcttatgagaattacattaattgtgggagacattcttttaaaaaaatggaattggccatgaaccctatggtaggctaaaagaaggaaaacagacacgtccaagtcagtcctaggacatcaacctatggatgccaaagttaaacaacctccccactgctatatgcagcttgcctattcccatgtactccaaagttttaatattattctcaagtactacaaagtttgcatattaaagttaacaaaataagctagtatgccatccttgaccttttggtaggaactaaacaaacgctcctacagctgttatgctccttatcccctatcctacccatacagtcaaaatcaatctagatatttttaagagaaagccaagtactagatatctagacaaaattagtcacctttgaccttttgaacttgcctgatccactcaagctgcctagttgttaatttggcaataccctacctttgtcggttacaaacatttcatgtttacgatcatattcagtcaaaaatataaaatttagcactcaattttacatcaaataaatttataaaacctaataagtttgtgacgttactagtatttttctaagcatatctatttatagttttttaaactaagtgtctaaaaaattattgattattagtactataaaattatatctgaatcttatcataaacgttaaatatttttgaccgaaaagattaccactaccccttaatattgttaggcattccatgagatgagtttctatcttttaacatggttcactgaaatgtgaatcatttggtcgtagggttcatatactagccacctaagggcatgttcagatcccctatcaaaattttacaccctgtcacatcaaatatttagacacatgagtaaagtattaaatacaaacgaaaaaaataactaattatatagattgcgtgtaaattgcgagatgaattttttaagcctaattgcaccatgatttgataatatggtgctacagtaaacatttgataatgatgaattaattaagcttaataatttcatatcgcggtttacagtcggattctgtaatttgtttcatgattagactatgtttaatacttcaaatgtgtgtccgtatatctgatgtgacacgccaaaactttacacccctagatctaaacacaacctaaagtttagataggatcggtttcccgttccatgggcagtactgcccatactgtgcagccggccggcacagctaacctatccagctgcctgaatcacctggtcaaaaatcatcaactgcttgttattgttagctgggagtctgggacagcttctgcttctccctttccatgtatctagtgtgccatgcttgcaagtaattgtaaatatgcaaattgcaatatatgcagtgtgtgtgttgatcttgatctagctgaccttttctttgtcaaacccgcagcaatagctagctagcccatgtgattggtcctgactaattagtcagctcacagtaattaacacggttggttgattgattaatcggtttattaatttgtgttaacacgtttgctgacctgtgttgtgtgactgacctagctaagccttgcacatgtgatgtgttgatcacttctaggctctagctagctacccattcctgtgttgtagcacattggtttttggtagtttattagtactttgattaggttggttgatgagttgatttgggctttgtgatgaaggatgggttatgactgattaagctggctgaatgcttttaggagttcaggtttagaactgttcaaagattgatttgggggtttctttttttctttttgtttaagaaaagaggactcaagttgttcaaagatatgagagggcatgtgcaattggggaagcattcctatggtttctattttctttgaaatttggatgtcctgtagagaagaattgaaatcttctattgcttggaacatttctgttccattatcaggtaagcacacggtaattttatcactagccatggtaaccgtgtaaataagtaatgaggtctgaaaattgggagtgtatctttcctacattgatgtagtaattgtgtacgatttcctacacaacaaatggttaaggcaccgtttgattcagcttattgactgagctacttcctactcctacttgctaaattgtcgtaagcatatttctccgcctgttaattgattttgtcctttataaaactttatgtatttaagtttcttaaaaaaaatcaaataaatcttttatgctagtgatctgccatattttcaagacacctatcactctatcagctcagcctaccagctgaatccaaatatgcttaaatccttctgcaaatagaggggtgtattctggtaaaaacacatttgtgttcgttcgtcttaacaacttttaatagttcagattcataactataactataaatgcttatatcttatgacagagagagtgtatattagtatatcactacttgttacaaattatacatgccatgtgtgtattagtcatattatatttttcatagtacttcattatttgcatatctgcacatgaagttgactaaaacaagacatgttatatatttatgggtccctatatttatttatatatgtaagatccctagaagtactgtgtcggcacaatgctgataacaagagaccatccatgcagcttgagcatgaacatgagcaattgacccatacagaaattagaaatagagaaaaggaagcggcaattatttaggaaaataaaaggggaataattgaaggtttggaaattgtgatgcgggcctttctgggactggcccatctcgtggagggagctctcccttacattgtgcatttgagcccaactattctattccggcccagaatattttcccacctctaaaaaaacgattttggacaaattttctcctctaattgctaaatgtaaatagattataattgcattataacttgtatgtaactataatataatttatgtgtaacttttacataattttaaaccattggatttatttcaagattcgtgcaagttgggaagaaaaaaaattatagcgtacgtacaattaaggagattcggtctcacaacctgcttcgtgaaaatggagtgttacagtcggattttttttcaaagttacatacaaattttttttcaaagttacatacaaattatattaccgttacatgcaagttataatataattatactatatttataagaaattttgtctgtcaaatgtatatagctataaaaaagggtgaattggatttgtgtgattgcaaatgtacatattcagataaatgtcattacaattcgtctattcgtagctaaaccactgaaattttacaaaattggggatcgtgtcactgctgtcacatcatccatctccttcctttttcgtcttcttctttatctcttcatctttttcctccttgtgggaaaaatggtgacggagctcgccattgtctgataatctcgccactgccatcagaaaaaacaggaggacaaatatggcgatggagcacacctccgtctcctagacaggacgagattgttgtcgccagaaaaatcacaaggaggaaaacaaattgacgatggagcactccgccgtctgagacctcatcaccgccacaacgagcttgccatcatcgtcgccacctggggccacggaggaggtggtacactctagggtggtgcgggcttgccgggggtagatagaggaggaagaggatgaggacgagcatctcgctgcaccaagcaaagaggagaggtgagggaagaagacgagagagaatgtagaaaatggaaaataaaggatatgggtggaaaatgtggcgtcactagcacagttttgattttataaaatttcagtggcacgactacaaatataaacgaattattatgacatctatttgaataatcacatttacaatgggatccaatttacaatggggtagatagaaaagggaaagtcactggctcgatctaggccgtcggttttgatcgatcggacggtgaagaactgcgtctcctccgacgcttcactcctctcctcgcttcgccggcggcagcttcccgtgcgccgtgcccgccggcgccgccagccaccctcgcctcgccgacggcgcgatgggatgttagagacccactcaacaatataatttcagaaatagcagtgccaaatccaacacagggaacaaccaagtctgttacaatagtggagtggttttgaggtggaagatggaaggatacaagggctagaaggttctagtagcttctagactagtagagaagaagggagatagaggagagatcgacaaagagaccagccagcctctaggtcgccgccgccgctattcgccgccttggtcaaatgaatctgttcgatcgatctcctgtaagctgctgctgctcatatatttttcagcttgggcttgcttgggcttcttggcaatgggctgaccaacccgtggtgtagccagcggcccatgtgcagcccacccgagtccctgacaatcccctcttcttgaaatttggcttgtccccaagccgatgaagaaaacctcctggatcccatggtacctgtagctcttgtatttccttggaattgctcacctgtagcttgataacttgctctgtatttgtctgtcttgtactgaatgtctcacattgcagcaattgttctttcttgatatcacctagtaacaagtggcgtattgggcacccctcttttatgaccaccaataatttaacagaccaataatccctgtttgcaattgatgcatatatcatctctgaatctgtcccgatatcaatggaaaaccttgctgcagcactaccatcactaggattgttctcacagaaatcaaaaatggaatcataaccacatgtcttgaccttcctgttctgattctcagcagcacctctagcaataatcccagaaatccttctgaccccaaaatgtatccccgctggacagttaaacaactgaccattgtataatatgtttgttgggttctgtagccagctctcaacatgattaagtgtcatgcgcatggacttacaaattttgtaagttcttcccttagctatatcatttaacccttcttgagcctccaaccaacaagctccatatatattttgagtagaagatggaactgacagaaatgttgttgtcattgtagcagcaggaatgatcaagtagttgcagcttattgtacttaggccatataacattccctctgtaactttttcctcaccacccacataatggaactgttccaagttaaatattgccaccaatgtatccttatgagctcgattagatttttcatgatttaaatctcctttaggtgcacaatatagtgcaacagaaggtgtttggtctcttatgcaatttgcactgcaaaaatcatatcccatcaaatgtgcaaaaactggtgcaggccatgggacttgctcaccccacatcacgcctccgttatattgacttggttgtgggtcaggccacggtttcagctctacttccgtcaaccatgtgtttaccaacagccaaagtattatggttccaatttgatttggtggtggccatggtggcatgaaataaaatattatccccaaataattgcccgcagcccagggcacataccactccttccatcttctaaccactccacctgagcaaggaggtggccatgggtttctcttgggatgactcatcaacagcttcttgtagcccttggagcatttggtcgaacacctgttgagcgccacccattttaggcagaaattggagtttagcttttgtgccatgactagtgtggcctttcccgaggatgctattccttctggcgcgccaagcaatagtgagtacgcaaccccagcctggacagtaccggtgttgacgttggggcccaacatcaaatggcttgggtgcatcaccttgggaaggtgagtggtgtcagtgcaagttgctttctcgtcaaccatcaactccatggactgacttgatatcggaacgaccttgaacacacccatcctactttggaacgcaatcacacctctatcagtgacaccgttgacatcggggccgaacaacaaacacttggtgtgcgtctccttggaacaaacacgggggtcaatgatggtggtgccggttgcgccatcggtggctaccaactctttggagtccacggcagtgttggaacatgtaaccaccgcagccacggtgaaatcaggctcgacgtcgaggcttgagcattttgtcaaacacatgataggcgtcaactcgggaaggtccttgctaatgatgaagggcatgcgatccttcccctcaccatccccaacctccaggatgatcgtcggagtagccccctcgtcgtcgtagatggatctcgctattgtgctcgggctgctgccattggagcactccatcgaacaggtggtgggcgtcaccttggactgctcatcctcaacaaaaaactgaaggtcttcagctttcttctattcttggggcatccacgagtctattgctgccttgagagacaggaaatctgctctccttctttggtctgcctcctcccgccttcgctcgcactcctcgagcatcctcaaaaagcatgtcaaacttgtcctcacttcccatggcagcttgcttgatgagcttcgtggggattggctctgataccaaattgttagagacccactcaacaatataatttcagaaatagcagtgccaaatccaacacagggaacaaccaagtctgttacaatagtggagtggttttgaggtggaagatggaaggatacaagggctagaaggttctagtagcttctagactagtagagaagaagggagatagaggagagatcgacaaagaggccagccagcctctaggtcgccgccgctgctgttcgccgccttggccaaatgaatctgttcgatcgatctcctgtaagctgctgctgctcatatatcttttagcttgggcttgcttgggcttcttggcgatgggctgaccaacccgtggtgtagccagcggcccatgtgcagcccacccgagtccctgacatgggacagcggccgttatgtctccgcggctcacgccggacctgcatggggtggtcgacggcgctcggtggcggcgccgcggctccggcccccaaggtggtggtgacgatgctctttctttcttctttcttggtttctttgtccccgcgagacccctccatgggtgtccctcgagatggtgatctcatggttgtctatgtggagctttacctctttcttcttcttcttttttgtttcctgttcggggatcgtggagcatctacctaattggctaaccaggctattagcgtgtataatggggttgagttgattcgttgaattgattgctcttagtgcgattgtgcgaatttgaaatgtaatatgacagctgaaacgaaaaggaagaatagaatcgagattttagcaatgctgattaatttcttaggcagtgtgtggttacaacttacaagcagtgctgaatttgccgaggtgtggattcttacgaacgttggtgtttggcattctacacgattagattgatgtatcagtaatttggtttttacatgttgctatattttgatataaacttggttgaacttgaagaagtttgacttagtaatctgccaccaccactgcatcttgcatctggttggtcataaagagtcatccttgttccaacttatacgtgccatttcttcattacatatgttttaattataatcaaatgagttttttttcctgtcattctgtagaagggagtctgtgggcttaatttgaagtcatgcagtggtttcatgctcaaaacgactccaaaggtgatatgtttttcatcccatttttcaaaataataagtgtagtgccctgaatactaatacaaatggttctgcaatgtaggtcggatgcccttcgctccgtgtgagggcatctgtctcttcaccacagaaactatactcttctaagacaacacaagttaaatcaggggaggaggtgcagattgcggttctaggggccagtggttatactggagctgaggtagttccattttatcgtgttatttccaattgcgtttgttgttgttatcttatacaagtgggttcctttcaacgaatgtacttgtaattctgttcttatgtttcttctatccggctccgcatttattttctatgactatatcctatatggagatcttcgacttcttttttgtttctgtttgttaattattgaagtacgcttgcattgacagattgttcggcttctggcaaaccaccctcagtttcatatcaaagtgatgaccgcagatagaaaagctagcgaacagttcggatctgtatttcctcatttgataacgcaggtaagattttttcttgatccatgctccttggtacccgagattgcctacacttgtttcttcaaaaaattaaaaggaagaaatgacctgagttttttttatccttggcacatcaagaatcggttgaaccttttggtagtacatttatttttattagaatttctgggccatattgtagtcattttgctgatcaaaattgtaagactctgctggttatcttttgatatgcaggacctcccaaatttagttgcaataaaagatgcagatttttcaaatgttgatgcggttttttgttgcttgccacatggaacaacccaggttgtctattattgccatgcccttctctgaaattcttcctaccaattcctgaatcatttagaggtcacaattacactattctgcatattggaggaatttttaaagcgatacctgcttgcaatatttttatcaggaaattattaaaggtttaccgaagcaactgaagattgttgatctttctgcggtatgcttcacaaggctaacagtttatttgcatagatattgtctttcatgctatctaatatccattcttactacgtctaattgaccatctttacaggatttccgtttgcgtgatatcaatgagtacgctgagtggtatggtcatgcacatagggcaccagaacttcaggttttcctggctacctgtccctacatacttgtttagttattggtgttggttatgcacttctactatttataagatctttagttctcagcgttgtttatgagcatttgcttttagtaagatcttaagttatgtatcattaaattatgtttgtttatgaactcatactctgtggcttgcttctctgtttattcagcaagaggctgtgtatggtttaactgaagttcttcgagatgaaataagaaatgcacgacttgttgcaaatccaggatgttatcccacatctattcagcttcctcttgttcctctgataaaggtgatgagggaagattaacagaagttattagtcatatatggttctctgatttctaatgaaaccaacaaaatataatcacattgagtgtacaaaactaaccaattttggtagcatataaaggatagttgccatagtgtaaagtttgttggccatgctcctctaaacccttaactctatgcaaaattttaaaatgttatcagttgaatttacatggcattgatgtatcttttaccatttgtttttaccatgcaggcaaaactgatcaagctgagcaacattatcattgatgcaaaatctggggtttgtggagcaggcatgtaacttgagatactgacgtactgtactactatggctacaaatttagtggttgtatatctgccatgattactagtcaatctttctctctaatgcatgcatttgtgtaggacgtggagcgaaggaggcgaatctttacactgagatagctgaaggcatccatgcttatggaataaaaggccaccgtcatggtaacccttgttttgccattttccaaaaagctggaatcaacatcagtgttgtagttactgtgttatagctctttaacgaaattgtttattctcccttggacaaacaaatagtcgataaagtggttacagaatgtttacttatatctggctatctgccctccaagtgcttttaaactggccctactgacacattgcaataaaaccgtgttagctcccgagattgaacaaggactttcagaggctgctaaatctaaagtcactatcagttttactccaaatctgatctgtatggtaagcacttactttctcatttttgttgacttaataactccaggttctgcagttttgtactgtattgaacgcacctggagtgtgtgcattagttaaatcaaattcttcatatttacgttgaacagaaacgtggaatgcaatctaccatgtttgttgaaatggcacctggagtgactgccggtgatttgtaccagcatctcaagtctacttatgaggtttgtttgtctgaccagtggctaaattatctgtctgactatttgaatacagacgttttctactgaaatgaattcatcaaaatgttttgagattatgtaatgttgtgagtgagagcatctcctcttgttagcatcacaattttatctacctgtatcttccccagggcgaagagtttgtcaagcttttacatggcagcactgttcctcacacgcgccatgtcgtgggatcaaattactgcttcatgaatgtcttcgaggacaggattcctggaagggccatcatcatctctgttgtatgcgtcttcaaccatctttatgcccattgtcaaactagtttcttcagacttaaagatgcgaaattcttattttcttgttcttcaactccacagatagataatcttgtgaagggagcgtctggtcaggctgtccagaacctcaatctgatgatgggcctgcctgagaacagagggctgcaatatcagcccctatttccatgatcctttgcatcggtacgtttccatttcatatgaaattctgtcaagatggtgcttctgagttcattgagccatgttatcatcggagtgtgaaaaaaccaagcttgctcaaatgcattgctcagtttgtgctgttgtttttgtagagattagctacagttggcagttcagtagtgagagcattagctgagtggctttctgccatggaaaatcctaaggctatataccatgtgctctcgtgttgtcatcagatcaaataaaattcaataaagcaaggcctttgtttgtcatttttacacctcaacaaaactttcttttttgaaagtaacctcagcaaaatatgcatttgtacacatagcccttgcttaattggcaaagcagaacaactacatcaatctcacttgtacatggctcctacccaaatatgtcggcctgagcatttacttatcaaccataatctgacttaatttcctcagtctataaatatatctttttttaacgaaccggtacttagaccacaccaatttcattgaataaagtaggagaaaactataaaaagggagttttacaaaggaaaaggaaaattgaggcaaagtttgtctaaaaatataagagatttatattcacactctccaaccatctcttgtctaataaagggtatcatagtctttacttttgatccttaatttgtcaaaaaaaaactataaccttttatatttgtggatagagagagtatatcatacttgaatctagcttggttaattaatccaaaattacatcgaaacataacactaacccttttgtcctaattactccaacatccaatcgatctcttcctctgatatgagtgatatcatctcatctgatgtactatccgcccaatgaaatgatcaacgtgtgatcaaggagggagagggacatataaaaggcattactacgtacctagatagcgagtgtggcagcacatcaaatgtacggatgagatctgagccgttcgatgatgagaacggacggccggatggcgcctgtccgcggtccacccccacacacgcctcgcctgctggcagttggagtggcatccttgtgccattgctgtgtttttgcatgcatggtcctctgctcccttctaggttctagctactcaaatttatttgtttggtccctgatggtgtctgtccattttgtgcaacattgaccattaccattttcctagtaactatgtttagtgaaaaaaaatgtttgagaaaatagtacaagagttttttagatgttttgtgatggac

SEQ ID NO: 6195 - DNA, 11266 bp, Oryza sativa
  unsure (1)..(11266): unsure at all n locations
tctctcaactttgttcagatgcatagttgcagcaatgaactccccataatctattgaaccactattatcaatatcagcctgcaagtcgaagaacatatgcatttattatatcttggcccaaaaatatatcatatattacagctaacgtgcctcacaacaatactttcttagaacataaaaggtccattctcacgtactgttaaacttatcagaaccacaaaatttggatgagatacaatagatttacaaataaccactaccaacgtcagaaaatctttgcaagctgctaaaaaaggatgtcaaatacacatattttaacaactatcgtcaagtttggtatttgaatacactagcttaacagagtgtttcaagatagtggactcagaaacaaaaaacaaaggtttgttttagcatatattgaactggaaatagaaggggcatagtcatgttagaaaattcaccgcttccattagggttgtaatttccgaatccttcaaattagcaccaactctccgcaagccagtttttagttcctccaatgtgatctgaccactattatcagtgtccaacattttgaacatttctctcaatcccgcaatttcatcttccgataaattttcagcaatgacctacagatgccacacagaagtgcatcagtatggaacgtaacttgtactttggtagaaaatcaagcaaaaatatactcaatattcaccctaagggccatcttctttagcttgttcattgctgaaaattgcttcaatctagttaagacagcagaatcaagaggtttatcaggagcaactccatcaacacaaacccaaggatgacctgccaacataaagatgggtcactagagaaggctctgacatgatgctctgcaatgtgatatttatgcttacatagagcttcatgtgcagtcaatctctttctgggatcacggtttaacattttcctcaccaaatcctttgcactgtctgagatagcaggccagggatcagatgaaaaatcaagatctcctttcaaaactttttcaaatatcccttgttcagattctgtgcaagcaggccagcatccaaaagaacaaaaaacagaggaaaactgtcagcatcaagcagaagcatgggtttgaaaaggcagcataaagggtagacatatcccaccatcccaaaatggaggaactccactaagcaagatataaatgattacaccagcactccatacatccacctcgcggccataatgcttcatcagaacctcaggtgcaacatagtaaggacttccaacaacatccgaataattttcgcctgtaaagtcaatcttaatgcattagagtttggaaaagatgcacaatcagtagtatttcagtgttctaaaagaaggggacagcagtgtattagagttcatattacagtactagttaagtacattaaggctctgtcacatcaatgcattaattgacaaacaaaatgaaaaggaaagatggaatgacatcccattcccttggcattttaagcaacatgaatttcaggatcaccgcaagtacagcatgcattcaattaagaagcatatatcatagtgaatggatatgaaagttatgtgcacaagagtttgattgcagattttggcaatttgtgataaaaaaaatcagtctctttctttgtaatccaggaaataaaaaaaacagtttcacaatactactgggaccaaaaaagggtttaacagatagtcaaatacacatctatctgaaaaacaaacgtatccattgcaacatatgtgcagttatgcaagaagtccatctagttgtaactagaactcaatcgagaaatcaaagctatagggggtcgcaatgcaccaccattacctcgctaagcttgcaaaatcaacttaactagcattgcctatggtgggggtaaaatccgcaattgccaacaaaatcttgcatcttacaagacaacacagcagcaaggatcgagaccggacctggcttgaagaaaatggaaagcccaaaatcgatcgtcttgagtggcgagtcctccttatggttgacaaacaagaagttctccggcttgaggtctctgtgcatcaccccgagcgaatggcacgcctcgacgacaccgatgatcacccgcgccagctgcgcggccgccttctcggagtagtgcccgcgctgcacgatcctatcaaacagctccccgccagcgcagagctccatgacgaggtgcacggcgacggcgtcctcgtacgcgccgacgatggagaccacgctcgggtggccggcgaggtggtgcatgatctggatctcccggcgcacgtcctccacgtcctcctcgctgaccagcttccgcttggcgatggacttgcaggcgagcaccttccccgtggccttctccacgcactggtacgtggtcccgaactgcccctgcccgagcttcttccccagggtgtagaggtccttgagccgctcggagtcgcgcttgaggacggagtcggcgaggagccccgcgctctggacgcgcctcaccttgggcttattcccgcccttgttgggggtggaggaggagaggtcggagtcggcgatggtgacgcgctcgggcgccgtggacgaggtgacggaggagtggctcgactcccgaggcgggtaacccggcggctgcgacggctcggcgcggccaccggggcgccagagcacggcgagggagacggagtggaagaagccgtggcggtccgccgcggagctggggccgacgcaggtgttccccatcgcgccggcgaagtgggggggagctgcggccgccgtaaccctaggcagccggcgacggcggcggcggcataggcggcggtggcggcggcggcgagggttggtggatttggatcggaggaggattttggtggaggagaggggagatggccggagggggacgaggtgagctgggccacgtcccactgacatgtgggccacctcagccttgctggcccacttgtcagtgggagcagcggcgcccgcgggagaggcgatgcgatgcgcgccagatcggacgcttacgtgaaacggtaagtgattggataatttctttttgaaaaataatacacctacaaaaaaatatttacaaacagttttagaaactgatagtatgatttttcataacaacagtacctattagtaattaaatccaacggttaagatttttattggtaagagtttagtgaagattttttttttgcaaaaaaaaatgacacgtacgatactgatgtccgcaacaagtcatctcgtctataattttgtgcagaattttcttctctaccgaagcgatctcccttgtccgatctctcttcatttttaagccacttggcatgcaatttgcgatgcgatgcggccgcgggacaggcgatgcgatgcgtgccagatcggacgcttacgtgaaacgtaagtgattggacaattccttattgaaaaatactaatacacctaacagaattatttaaaatattttagaaattgatatgatttttcataacaagagtacctattactcactctatcgtaaattataaggtttataattttttttacacggtcttcaataatatactttgataactaatttattttatattgtgttatcaataactataaagttaacataagtgaaagtattttaaagtactaaaatagtgatataacactcataatacttagcatagttattgttagtataatgattagtaaaaaaaattactagtttttccttaaaacaaaggtttcttataatttggacggaaaaagtagttaagatttttattagtaagtaagagtttcgtgaatattttttttgtttgagaaaaatggtacgtacgaaaaaatgagattaggaggaagagttatccatacaaacaatttttaagaaaagattatgagcatgctgacatcggtgccatactaccaagatatgtacgatactgacggctacaacaagtctataattttgtgcagaattttcttctctactgaggcgatcctttgtccgatctctcttaatttttaagccacttgacatgcaatctgcttcatgatttgacatttttgactgggtttttgtattttgcgtatcatcgtgaatgtgatgattcaagtgggtctgtgggtgtaaatcttggacgtggtcgtatcaattttactacgtgcattaacttaattttgtaaactagttcctacgttaagcaaagctcgctcgtcattcgttgaggtgagaattgtatcgcagaacgccaatgctaatggggtaaggattatttctacggctaatccttttatgtgtttgcgaaaaaaattatactgctaataattgacagaatcacattaaaacgcaattgaatctgggccgcgcgcacgccattgttaccgttccgcacttatgggctgatggcccaactagtttatgggctgcgcgtgttccgcagcgacgttacagcccatgttggcacgtgctccgcgatactggtccggcccaactgaaatggctttcaagtaaggagcggggcccacttgccagtcatagagaaatcgaagaaaaggccatgcacaccaaaaccggaccggtagacgacccggtcaccctgctggttcaccggtttgacggtccaaccgtgaaccggctggtcgaaccacggttcactaactacatgtagcatatgtgtttgcatacaagcacaaagatctgtatggtaggatggctacgggaattggcttgcaaacaatcgaccaggggtcgactccccacaagcgcgcgcatttccttcaatttgtgctaaaaatatcaagcccgcggacaagtctaacacaagtccggtccgaccgaaagcagtttattgcccgattcaacacaaaaccagccggttcaggttgaacagttgcatgtccggtctttctatttgaccaaaccgtgccaacctctagttccggttgaacagccggacttcaggttgaacagttgcatgtccggtctttctatttgaccgaaccgtgccaacctctagttccggttgaacagccggtccggtccggttttttacactaggcaccaaaccaacgaggattcctgccgttaatttataaactgtgtccaaattttctactccctccatctcatatttaagtagtgtttgcaacacaaaacaaacatattatcaaattatattcaatgttagattaataaaaactattttcatattttagatggtgttaaatttttatatgaagttgatcaaacttaaaaaagtttgactagaagagaatatcacacgacttataatgtgaaatagataaagtatattatatgtccaattctatcaaaatatgttttaaaaaaaatgtcttctggtacttgcatatctgccatacttcatatactccttgtaggactataatcttacagtttttttctctactatatcaatatataatacttcaattggtaaaaagaaaattctacgcgaataatccaatcaggatcgatgttcttgcctttttcttttgtctccttttacaacatatatacatatatacacacgtgtatgcattatcttttatgaactgctgctatatattagatttttctcaccacaaatccacaatagtatggtcaaatataactatcttgagctacctggctatctccttcctccggccggccgatgcatggacgtatatgcatcatctgcgacgcanaagctcacgtggcttgacgacttcctatttttattagcatctatcgcaaattaattcaaagtttgtcgttgtgaattcgtgtgtttaaacacgcatgcataccgaagcagagaattgcggctgcaactgatcaatttgagatttgtgaccacctgaaacgaagcacccatgcagctgcgtgtgtccgggaagcatgcatgtatgcactgtaattaacaagtatttagatcattaaactaatactaactatatctaacgatagatcttgttaaggttagcagtagtgcttactccctccgtcccaaaatacttgtcagttttttttaacgtttgattatttgtcttatttaaaaaattatagaattattatttattttgtttgtgacttgctctattataaaaagtacttcaagtgtgacttatcttttttatatatttatactaatttttttaataagacaaatgatcaaacgttataagaaaaaatcaaaacgatatctaatttggaatggaggtaataattagttgtgcaggaatacatgtgatatgtatgatgatttgatctgcataataaatacgcagcagattaattaggagaaggctgcttggaacaatatttaaatttagtcagaaaagaaaactccatgtctgaccttttcgcgcgccttttgacattatataagcgtatcttcgtgtgttggtttctactactccacgcagcaaaaacatctgacaagaacaacgtctcgggcacgcagcgatcgatcgaaccatgtcgtccacgtcatcgtcgccgccgccgccgtcgaaggcaaagaggcgaggctgcatccatggcgcaaggccgcagccgctgatcgtgtcgtcggcgccggcggaggcgagccggccgtccaagaaaccccgtgtcagcggcggcggcggcgacacggggccggtgatcgtgtacgagctcacgcccagggtcgtccacgtcgagcaggaggagttcatggccgtcgtgcagaagctcaccggcggcaagcagcagccggcggcggcttcaaccttgacgacattgccggcggctgatcaggtggccggaggtgatcacgccgctgcagcggcggccgccgccgacccactggtgctcacgcttgggcagcagcgtcagcctgctccggcgccggcgatcgacggcgaccatccggcggcgccgcctcattctccaccggcggatgcttttcttctgtcgcccagtagtttcttcttgtcgccaaccacgatgcatgcgttacaagagttggctgctttgttctaattagctctgaacttctaatttttggatcagaatcacaacagtttgtgcaaaaaattttcctgtaattagggaaaaattagcacgaacaggtgctctgcgctcagctcgccgactgtatgcattccttccgttcttcagcatctgtacatttcttgatctcattctgataattaacaaaaccaatacaatttatttgttgattttgtttgattaaccaatcagctttgctcgttaattagtcgttactactgtattgctaagtagtgcaatcaaataattaacccaagcacacaacctcatgcgcaaagagaggcacgatccttcactctagatcgtctccctattgctgctccatgtttgtcaatacaggatggacggcatttgaaggggtttttgttgaaggcatcttttccaaaacaacctcaaaatattcctccctaaggcgattttgataaacatctttttaggcgtttttaaaaagagtcgtgcatcactttttcctgacgcaagtaaatatagtgtttctcaaactgcctctgaaaactattcatgttttttccttatcaaagcattccaaatcgcctcctaaattatatcatttcgtactatatattactgtcaacaacagcggacggtgatatacaatggagaagttttcactgttagctttcatcgagcaaatatatgggcccaaactttagcctggaaattctgagagttagagctaaaaggttgacctaaatcttgtaaatgtactttaggataaaacaaaaaatgacttaattaggctgtgaaagggcatgtggactatggttcattaccaccctagctagcgacatgtgttctacagtactatcccggcccactgctatgtaggtcgtacgtactctacgctatatatggttccgatcaaatagtgtatgggctatattgaccacattgtcatactggtccaactgaaatagacactgaccaagtagttgtgttggacatgttatgtaatcgacatagccataatcacttcgtcgcggacaacgacaaggaatgtgactggcggcgaaagcaacccagcgatgaacagttggagcatgttgcacactaggtgtgcctcatgacatgttgacgcctgcagccatgcgcgaaggctccatagcttattgtcacacaccatcgtggcgcccacgccgctagcgccaacgcttctttttgttgtttttgttcttcttcttcttcttcttcttcttcggaaccgagccaacattgttgctatttatattagggaaaagtccattttacacccttgaactcttatgcttgtctaaagtacacccccgaactacaaaaccggatataatacactctcaaactggcaataccggacacttaacgcccccgggctgtttttaccgtggtttttgacacgtcggctgccacgtcggatgccacgtcaaccctcgccacgacagcgcacaacataatatgggccaagcccatattctctccccctctctctttctctccctgccctgttcgctctcctgtctctcacgaccgttggcggcggcggcggcacggagctgcaagggtgacggctacggcggcggcgtcaaactgcgagggccgcggcggcggcggcgtcgacgacggcgtggagctgcgagggctgcggctgccgcgtcggtgtggagctgcgaggcggcggcggcggggagctactgcgagggcggcggcgctgtcccgattgcgcggacggtcgccggttgaagcctctgcgcgtagtcgtcagcggaaggttcgggcgtcgtcgtcgccgcatgcgcctttggatttggcttagcagggaagaagcagctcgacgcgtggtggaagcaacgacgagcactggtcttggtgtacaatctgggaagtcttcacaagatacagtcaatgtaggttaattacatcatctgaatctgatacctgaatttgtgcatactaacattttgctcttctctttttgcttgacatcgataagaggagagtgataaggacttctccccgccaccaccgccgcctcgcagctccacgccgatgccaacgccgcagccgccgcggccctggcagctcgacacagcagccgtggccctcgcagctcgacgcagccaccgtagccgttgccctcgcaactccgcgccgacgccgccgatgcagccaccgccaccagtcgtgggagagaggagaacaaacacggcaaggagagagagggagagagaggggggagagaatatgggcttggcccatgttatgttgtgcgctgacgtggcgagggctgacgtggcatccgacgtggcagccgatgtggcaaaaaccacggtgaaaacagcccggggggttaagtgtccggtattgacagttcgagggtgtattatatccggttttgtagttcgggggtgtattttagacaagcataagagtttgagggtgtaaaatggacttttccctttatattactaggagtggcgggtatgtagttgtttggagttagcgtaaggcagttcggttgtggctcctttgtaggtcttgcgtcgtccagttttgcctcatggccgtcagccgggtgctagttccttcgacgatgtgtacagtttggcattttgttgatgtatggtggcttgttttttttttcatgtacggctgtacaacctctgatgctataatcttttttccctactacatcaatatgaaactttgtgctgtttgtgcgaattgtttttttgaaaaatatcatgagtgaaaaaaccgtaattcgtggtttttaagggaaagggaaatgcacgatcaaggagcagtgcccacttggcaacgacagagagatggagcaacgggatgagaggcaaagccgccaaggatcctgattttcttcttgctccttattatccactaattgcatccagattttccaaattatatccaattttattagtatcagtaaaaacaaatgtgcctcctgcaatcctgcatgcatgccttacattatatatttagggattgtttaggttaatgtcatttcaaatcatatataccattttttaaagctattaaatatacatatcaatttagttttttttaccaaactctggtaaatacataagaaattttgctaaaacttgataatattatcaaattgtcaaaattttagcattgctaaaatttaataaaatttattttggctacaatgccttagcattcgtatacatataaagtgtaaacacaaatttaccatacgacaagtacatatgtttattgcctttgtttctctcttttgcagcgtataaacacatatctgcatgcgttgtttgacctgcctacatatatttaccagcgtattagcatagtcaaataggagtaacaccttgcagatattatctgcctccttcctccggcctccggcccgtctatgtacgtccgtgcgtgcatcatccaatacgcatagcccgctcagtctctctctctctctcgttgattaatcgctggttaattttaatcaagcgtctcattttgaaactcattttaaacaagcaaactcagttactagtagtactcctagatgcagctgttgacgatcaaattaaactgactttctgatcacctgaaacgaagcagcaatgcaggcagcaggcagcaggcagcagctagcgtagacgtggtagcgtttatcctggaaggaagcaaccatccagaaaagtaatacggataggcggatagctagtctatacaaatgcccccttcattccaaataaattcaatcatagctacaaacattgacatatatttatctagattcataactaagatttatctttttttatgacggagtagtactcctaagtaattaaatcactaaactaacaccaaccacatctaagtgacggatctttgttaatgttaaggttagtatacgtagttggtgcattattatattgcacaagtttgataattaatttggtctgcgtatagtcaaatgcgcagcaggcagattaattggagcaatatattcaaaccttttcgcgcgcttttgacatcatccttttgcttggcgccattatataagcatctgccttcctgctggcttctgccacacgcagcgagcgaaccatgtcgtccacgtcatcgtcgtcgccgccgccgtcgtcgaaggggaagaggaggccaggcggcatcatccggggcccgaggccgcagccgctgatcgtgtcgcc

SEQ ID NO: 6196 - DNA, 5308 bp, Oryza sativa
aacataatttccttgcaaattctacaggaacaatgtatgaagaatagataaaatatgtataatactataacttcgatttgaaggatggaataacagcgacttcacgctccacgtattgctgagaaaagaaaattagaaacgttgttccttcatgaacagaaatgcacaatcccctcgatgaaaaaattgagcaaaagaaaccgaggttaccttcaggtcgatctggatggtgtgcttgtgtgtgtcagactcacacacatcaactatattgattgacaagaaaatatctggcagtcggccgccgccggctggggcggatggggcgaggtcgtggggatttgatgcggagtcgacggcggcggcgttggtggcgaggtgaggaggcaacgcggggatctggagcggagtcgacggcagcggcgttggcggcgaggtgaggaggcgacgcagccgcgagatgagttgtgggtgggcagcggcagcgtcgccggctggggcgggtgggcagcggcaacgtcgacggcggcggcgttggcggcgaggtgaggaggcgacgcggggatctggcagtcggccgccgccggctggggcggatggggcgaggtcgcggggatttgatgcggagtcgacggcggcggcgccggcgaggtgaggaggcgacgcagccgcgagatgaggaggcgatgcggcgctgccgcgatgcagggaggagggcgaagaaggcggcgagaaggcggcgtgggagaaggagtgggcgtggggagcgatctcttggatcgagagaggagcgagcgtggggaggagatcgatcgttggatacggcaaacggatggttgagattaggcgtgtctgtcagatgcgtctgctgtgtcaggaatcaagaccaccactacgaactttttaagtagtagagattatttttattctggtttgagtaaaaaaaatacagttaaagttttattaactgactacttagtactacggagaaaaagtgaaaacgcagcatgtgagatgggccttttgatgggccaccatggtgagatggcacgcgcgcacgtgggctgccgataaaggggaaggagatcaagagggttggacccaccgacatgtagctctatatatctttatatactacttaaaaaattcgtaggggtggtggtgagtcctgaacgatcgaatggttaacattcatcagaggatcctctcacaggcatcagcggatgagattttctcccacgatccacccgtcgcaccacttctcatctccctgatccgcattgcgctccctctctctccgatccgtaatttcgcatcgcactccccagccccccatccttcctcctcggggcgccacctcctcaccccaccgacgcgccgccttcccatcccgcccaacccgcgccttcttctccggttgtcctccctctgtattgtgccgtccctcgctccgccccctccctctccatcacgccaccgccccctccataaaccataacctccctcaaatcccgatcatctgcgcagccgtcgttatcgtcggaccgagctcttcgatcatcaccctccgttgccgccgctgcatcagacccatcggaatggtggataggaatgcggacctaagtatgggtgaggggtaggacgagatgatggcggtggctgcaggcacgcccaccagcacgctcgctggagtgtggagaggcgcgcgcccgctgctgcgagtcaccggcggtgtcgtcggcatcatcgtcagctagctctgcatattaaaactataacatgagttgtcaagtaaagttagtgcaatgtaataagatgtttttaatttacctatgagaatcactattagtatttccttttgcatcaatttagtggaagatatcaaaaaacaacagaagatattcaaaaaggaactatttggatggaaatatgcatatattgatggattatcaacacctggaagctaatggtaaatacaatttatttttctcgatagcctagcaacataatttcattaggataaaacctttattcgtacctaatatatttccctcttgctaagatttagctcagggtactcttcattcaatggcctagccagatccatgctgcatgttaattatgacatgggttgtgttgtttcttggtggagaagatcgttaagtatctcctggcatgcatgccactgccatcaacattctttcttgatggctgtgagcatgtcatattttatctggtgttatcccggctgatgagcatcccattcggttttttttctttgtttacattggttaagtttgatgcatttttcagatttgcttccacggatcagtttggtcaggtagtcttgttgcaatgcagagttttagatatgaacggttcatatacttcatatcatagttgtacacagtggtttgttctaatcattcccatctgattcttgggagtagccaaatcagtacatggtcagatattaggaaggaagagcagtataatatctatgtgcagtttagttctaatttactggctattctcacacgttggcttttttattgattgagatatcatttttcttctgttttcactgcagtccaaatgtgctggtcaattcataatcgatcatcaggcctggaatttgtctcaaggtatatacatggaatagtgttccaatatgagtagtgactaaagcagattaatttgaattgtgaactcttttaccaagtgaacagagactgtcaaataatcaggtaagtactaaaatcctattgatcactataaaattacaatctcatttgatgttgcctttttcctggtgatcataggagtgaccctttttttcatgcttcaaaggtatatggtttttgtataaaattccatttctcagtatagaagttaaaactctcatttttgtctgaactaataaactattgttcttctccaagatttgttcactaagttgcaattgatagcacatttttacattttcttggcgcgtccatttgtgcctccacagctgcctcatatgctaccactaacatttcttattattcattcctatttcttagagaattgtatttatctatgcaaaattgcaactcgatgtactgaggattctataagcttttaaagattaccgtgaacacatagtgtactgtccagagaattactcagattcatttatgtctttaatggattggattccatgtaaattcagttgtaatcctttatatatatatatatatatatatatatatatatatatagtctgttcaaggtatataacttgaaatttagcatgtaccagaagatagattattatcagtagaccccaaaaaggtcacactccaattttgatttatcaagtgcatgacccttgataaatttactcatgtgtgtgacgtccgtgactgcttcccgaagcaccaaccaattttgttttgaggaaaacatcaactaactatgtatcacctaagagggtaatattcagaacttgtgatcttagaaaatgaaaccatattcttctatgccaatgcctaatggttagagaaaattcttttcaagtatacctgatagtctgatacattaaccatattcctttgtttagagaggaacattagccacattctatcctcttcatttgccagtcataaataacaggcgagatgctttaatgcatacattttttgccgttgcaacgcacgggcacccaactagttttgttttagttttattttgtgacctcaacgtcacatggaataaggaccaaattaaactagtcatatcatctaaaaccgccgttcaaaccgtcttcatacctcgtttaaattggtttcattgagacgaggaatatgttgcactggttttacgattgagtgacgcgattcaaactccacccttaggttgagttcgtttgcaggggttctcaaccttccctccctcgttttctctcgtgcatgtgtttccaaactgttaaaaggtatacttttttacaaaatttatatatgaaagtttctttaaaaaaaatatattaactcatcttttaagttttttaacctaatagttcctccgtttcatattgtaagactttctagcattgtccatattcatatagatgttaatgaaacggaagaagtacttaattaattgtatgctaatctattgcttcgttttccgtgcatgagatttaatagtttccacaccaaaggacacacccttagagcatcctaaaatttaactcctaaaaatcttggattgggaccatcccataggaaattgggcccaaaaatcacctcatacttaaagagtgcccctaattttgatttccaataactttaaactatgccacatcatctcaagtaaatcttgcttcaactgtttatgtctttccatttttccgataagagagagatcggcgctgggcgctgccaacctatggcgcactagcagcccagctaagttgtgcagcagggtgatctttcgagttcttggcagctgcagcagtggacggcgagggtgtcggcaagtttgcaaggcacgtcgagggggcaggtagggcatggccatctcacggcagggcacgacagggggaagaaaaggcatgagcggcaaaaacctcccgcgatttcatcaattgggagtgtgtggagatgcccaaaattggttcaaatagagtatggttctgggtgtgggtaaatattgggatcagctttaggcatctcttggagacatgattttaggactctatcgttccacttattggcataataagtaaaacgatatatttgcaacttaaaacttttatatacgttttcttagcaatctagaagcgaagcaaaagctgaaaaataaactacggtgaaaaacactaaaatcaactttaaatttaaggttaaaaatttaaattttgacttatataagcataagtataagccaaaagatgaggctttcaaactagattcctaaaatttatcttctggacctagagtcccaatttacttaaattcattcaatctccccgtcttctcggccgccgactcccgtctcctcgcccgccgcctgagccgatctccatcgtgcgagcagcgtcgccggtgtccccttgctgcttccgccgttcttctggtgagcatccatccattaccgacaatctttttttgtcgaatttatgttaaaccctagcgtttcttcctgatctgggatcttttttctttgcccttaacctcagtaaatccagcctaccctgagatttgatttgaacatgacgagaaaaccagaggaatccttggattgcgcagctaagaacagacaaggg

SEQ ID NO: 6197 - DNA, 3073 bp, Oryza sativa
gggactaaagtcccacccctatatatatatatatatatatatatatatgtctttttcctcctccagcccgagcaagcttcaaaatttcttcaaaaaagaggggaggtcatgccaaaatttctagtgaatttattttggtgattatatacaaatcggaggtgcctaaaaggttagcaacttcatcctccaatgttttttttgtcatattacatttggagctatgttttgcacacttttttgtctccaaaattttgttgtaagttgatgagagagaaaatttgtgtggggaagaaagaatatatagaaatttagtttatttgctaaaaaaggttttataaaatagttgagaaggaaaatatagtgaaagttaatcttgaataatagaaaacaaactaaaatgaaaattaaaagaagtacaacacattaatattagtttaaaactttagaaatagtaaataagaattatttggtgcaatatttcataatttttgtatgaataatgatatgtcactattgtgtgactgttgaaagagtttgtaattattttataattattgtatgaataatgatatgtcactattgtgtgactgttgaaagagtttgtaattattttataattattgtatgactgtcattattgtacgaataattatttgtgtacgattttttttcatgtcatgtagatggatcggcaatggatgtacgctgaccggcggtccaaagagtttattgacagcatgcattattttttgagagtggccgaagctaacaggcaaaagggttttatttgttgtccatgcaataagtgtaagaatcagaaggagtattctgcatccaggactattcatttccacttgtttgagtcggggtttatgccaagctataattgttggacatcccacggagagcaaggtgttgaaatggaagaaaatgaagtggaagacgacaatattctggactttgctcagtacgctagatttgaaagaaatcaaacgggcgaggaggaaagggatgctgatggtaacgacgttgtggatgatcttggtcagatgttgcaggacgccaaggaggactgcgaaagtgaaaagggggcccataatttggacaagatgttagaggaccacagaacatcgttgtacccaggttgcgagcaggggcacaaaaagttggataccactctggaattcttgcaatggaaggcaaaaaatggtgttagtgagaaggcatttggcgatttattgaaactcatcgagaacattcttccggagggaaacaaattgcccgagacaacgtacgaggctaagaagatagtctgccctctaggactggaagtttagaagattcatgcatgtccgaatgattgtatcctatatcgcggtgaggagtacgagaacctagaagcatgccctgtttgcaaagcactacgatacaagattagacgagatgatccaggagaagttgacgggcagctaacgaagaagagaattcctgctaaggtgatgtggtatttccctatattaccacggctaaggcgtttgttcaggaacaaggggaatgctagaatgatgcgatggcacgctgaagagcgtcaacaggacgggatgctgagacaccccgccgatggttcgcagtggcgaaacatcgacagaaaatttaaagacattggaaagaacgcacgaaacatacggtttggtttaagtacggatggcatgaatccttttggagagatgagcagcggccatagcacttggcccgttacgatgtgtatctacaacctcccccctcggctatgcatgaagaggaagtacataatgataccgattattattcaaggccccaagcaacctggtaacgacatcgatgtgtaccgaagaccactggtcgaagatcttaaactgttgtggaagaagaaaggtgtccccgtgtgggacgaggacaaacaggaggagtttaacctacaagtgctactgttcgtaaccatcaacgattggcctgcacttagcaacctatccgggcagtccaacaaggggtacaaggcttgcactcactgtatggatgaaacagaaagtacgtatcttaagcactgtaggaaggttgtgtacatgggtcatcgtcgattccttgcagcaaaccactcggtacagaagaaaggcaagcactttgaacataaggtggaccactgtacaaagcctaaacatcgcagcgggaaaacagtgtttgtatggttaaagatcttaaagtagtgtttgaaaggggcctggcagccagcctatagagagcgaagatggtcacgccgcgatgtggaaaaagaactctatattttgggagtactctattgggaattcttggacgtccgccacgcaatcgacgtgatgtacctcactaagaacctttgcgtaaacctttttggcttcctaggtgtatatggaaagttgaaagatacactggaagcacgtaatgatctaaagcatatggaacaacgcggtgaccttcacccggaaccaaaggagaaaggaagccattacttgagtccagccagctacactcttagcaaggcagagaaggaaagtatgtttgaatgcttgtaaagcatcaaggtaccgtctagatactccacgaatataaagcgaataataagcatgaaggagaaaaagttcacaaatctaaagtctcatgactgtcacgtgttgatgacacagctgctaccaattgtaaaaaggggtatcctcccaaacaatgtccgggcaacaataacaaagctatgtgctttcatgaacgcaatttcgcagaaggtcatcgatccgaatagattagaagccctgcagaatgatgtggtgcaatgtcttgtcagttttgagttgatatttccaccttcatttttcaatataatgacgcatctgctttgtcaccttgtcaaagagatcggtattctcgatcctgtgtaccaacacaacatgtttcctttcgagaggtacatgggcgttctgaagaagtatgttcgtaaccgtgctcgtccagaggcaagcatcgccaaggggtatggaacagaggaggtcattgaattctgcgtaga

SEQ ID NO: 6198 - DNA, 3056 bp, Oryza sativa
aggtgagcactatgaacactattagcatgctagttcatagcaaaaatatgtattgtgtcattacatggctgtaactggtaatatttttaaaagacataatggacaagtactagcattcaaaacacacattgtgttgcagagtttgccatttaggaagaacaagcattaggatggagggttgatcactggtgagctgctgaactgggagatctcgggatggtgctgagtgattaagttgtgctcgctgaataccatatgatgaaggatgcttgagcggagaatcgttgagtcgctctgtgggaaaaacaaggataatgttaatgctgaaagtacgacaaactatagatgcgatgcaatatgttggaggtttcatacaggtatttgcagtgcctcaatgggctcccgtttaccgtcgtagacctccatgaacttcattatgtataatgcacattaattcatactcaggatagaaataaaaaaacatgtccggaataacagtggtcgaatacttaagaaatgaaagtgttgaccggtgaaaagagagagaatgtgcttaccaccaagcataccacacaagatgctattgacgaccccggattttgtcgccaacatctgagactgtgacttagtgcttggaacactgccttcgaccagtcgatggaagcaacccggtccagatcggcggcaacccaaacgtcgctcttggggatatagaagtcagttgttgggagtaaaagcttggacatgataaccatgacaaagaaacaaactgcagtagggtcgtcctccctgttcttgatcacttcaataagcattttagaagataactgagcattccgttgaatccccaattcttcggtgatcctatcgtgggtgtttcgcaccaccttgttaggtgggataacaatatccttgccgcccaatgggttccccatgacaagatggacagtgcggggggtgatctggatcttcctgtcatcatcaatcaaaatgcacatagagttcggacctgtcctgtccattagccactgtatgagatctggcttctcaaggctctcaagtttcatgcatgccacggcatctaatccaatttcttctaacttttcgtggtgcgtctttgacaacgcacgacaagcctccgacgccaacgcggcgctacaacgtgtcaggttgggtcccttgaccataggatcctgcgaaaaaaattgaaaaatgcatgcaaaggtaagcaaaaaatgaacatccaatagttagaacaccatgatttatgtttgaactcacaaaaacatatggaatgaccacacagttgcacaccacggtattatttgcaaaagatagtcatcaatggtacatacataggaaaaacactataacccatcggtggatcgttgggagagcaaaacgcaaacgatagatactaacgtacacaccatagtcaaaaatccgacagaaaaaagagatgccaccaatttgcctgtaaaatatcaacacattcgcattcccatgttgagatatgctctataaaaaacatcctcatacagagaaaataatgtggcaaatcccaaaataggaaaaatttaacttatactgtaatactcaacagtgacatcactcacaatgttctacaccaggattagtgctgactaaaagccccaatagtgacagagtgagcaaaacctcactccccaaattagttggggttgtaccctagaaaggcaataaaagattgtagccaaaaattaactggcaaaaacgtatgaggaaagtgacaaaaaaaatatgcagaaaagggtgttctcacaatgtcggttgttgcgcccctgcttgctgactaagcccgcctcctcattttggcctcgtctgtgctgtttcatccacggctagtgatgaggaggttgcgccgttggtcatggtctggggcaggacaacctcgcaccctgtttgagaatcggcgaacctgatcctcttcaccttggccgacattttcacagtgatctccatgtgtgcactaatcgaaacaaaaaagatttcgctgagagcaaaccctatgttggggatgatttgggatacagaaacaaaatgagggaaaaataaagaaaaagaaaaggggtagacatttggggggagtgttgcatagcaaaatacctcacacccgctggggagcaacttgcggcggcgccggcgacctccgtttcacaagcgacgatagaagggaagacgaatcaaaatatttaaataaggaagaaaccctaggttgtgggtggtttgggatgtggaatcagaatgagcagcgaagaaagaaataaaaggggaaatggatttgggatgggatgtggaatcagtatagcacgttacctcacagccggtgtgagaggacccccgccaagaagcgccgtgcggcagcgccggcgatctctctttcacgagcagcgagatgagagagggtgctccctgacgatggtgagaaaaaaagaaactaaccggaaaatatgggggagacgatagcgtcgacggtttgaaatgactagtccctaaagattcgctgctgcaaagactgtgactgataaaaaataataaaaaagggttcataattatcaattcatcgtttctcatagttgaaaaataactcagtattattgaagagttggagaatagataggcggagttaaagtttaactactacaattgggtggtgcgttacggtaacagagttaaaacattacttgcaggggttgaatcctgtccaagatgtgttgagtctggacttcgatgacagttaaaaagtaactgagtactcattgtgtgtttgttgacgaaaaaatcgaacacgccggcctgggagatctgcttagctcctgtgtaggtccaaaggttgatgagatgcgggcgtgccagtcagtttgatcctgcaactgacaagatatgcaaatagtagatcaaaacagccgatcggctgataagccgatggagtagttccagccgatagcagataatagccgatgccgataccagccgatagcgatagggtttaagcaatcggctatatgtccaatgta

SEQ ID NO: 6199 - DNA, 6722 bp, Oryza sativa
ggtgtcgtcggcatcatcgtcagctagctctgcatattaaaactataacatgagttgtcaagtaaagttagtgcaatgtaataagatgtttttaatttacctatgagaatcactattagtatttccttttgcatcaatttagtggaagatatcaaaaaacaacagaagatattcaaaaaggaactatttggatggaaatatgcatatattgatggattatcaacacctggaagctaatggtaaatacaatttatttttctcgatagcctagcaacataatttcattaggataaaacctttattcgtacctaatatatttccctcttgctaagatttagctcagggtactcttcattcaatggcctagccagatccatgctgcatgttaattatgacatgggttgtgttgtttcttggtggagaagatcgttaagtatctcctggcatgcatgccactgccatcaacattctttcttgatggctgtgagcatgtcatattttatctggtgttatcccggctgatgagcatcccattcggttttttttctttgtttacattggttaagtttgatgcatttttcagatttgcttccacggatcagtttggtcaggtagtcttgttgcaatgcagagttttagatatgaacggttcatatacttcatatcatagttgtacacagtggtttgttctaatcattcccatctgattcttgggagtagccaaatcagtacatggtcagatattaggaaggaagagcagtataatatctatgtgcagtttagttctaatttactggctattctcacacgttggcttttttattgattgagatatcatttttcttctgttttcactgcagtccaaatgtgctggtcaattcataatcgatcatcaggcctggaatttgtctcaaggtatatacatggaatagtgttccaatatgagtagtgactaaagcagattaatttgaattgtgaactcttttaccaagtgaacagagactgtcaaataatcaggtaagtactaaaatcctattgatcactataaaattacaatctcatttgatgttgcctttttcctggtgatcataggagtgaccctttttttcatgcttcaaaggtatatggtttttgtataaaattccatttctcagtatagaagttaaaactctcatttttgtctgaactaataaactattgttcttctccaagatttgttcactaagttgcaattgatagcacatttttacattttcttggcgcgtccatttgtgcctccacagctgcctcatatgctaccactaacatttcttattattcattcctatttcttagagaattgtatttatctatgcaaaattgcaactcgatgtactgaggattctataagcttttaaagattaccgtgaacacatagtgtactgtccagagaattactcagattcatttatgtctttaatggattggattccatgtaaattcagttgtaatcctttatatatatatatatatatatatatatatatatatatatatatatatatatatatatatatagtctgttcaaggtatataacttgaaatttagcatgtaccagaagatagattattatcagtagaccccaaaaaggtcacactccaattttgatttatcaagtgcatgacccttgataaatttactcatgtgtgtgacgtccgtgactgcttcccgaagcaccaaccaattttgttttgaggaaaacatcaactaactatgtatcacctaagagggtaatattcagaacttgtgatcttagaaaatgaaaccatattcttctatgccaatgcctaatggttagagaaaattcttttcaagtatacctgatagtctgatacattaaccatattcctttgtttagagaggaacattagccacattctatcctcttcatttgccagtcataaataacaggcgagatgctttaatgcatacattttttgccgttgcaacgcacgggcacccaactagttttgttttagttttattttgtgacctcaacgtcacatggaataaggaccaaattaaactagtcatatcatctaaaaccgccgttcaaaccgtcttcatacctcgtttaaattggtttcattgagacgaggaatatgttgcactggttttacgattgagtgacgcgattcaaactccacccttaggttgagttcgtttgcaggggttctcaaccttccctccctcgttttctctcgtgcatgtgtttccaaactgttaaaaggtatacttttttacaaaatttatatatgaaagtttctttaaaaaaaatatattaactcatcttttaagttttttaacctaatagttcctccgtttcatattgtaagactttctagcattgtccatattcatatagatgttaatgaaacggaagaagtacttaattaattgtatgctaatctattgcttcgttttccgtgcatgagatttaatagtttccacaccaaaggacacacccttagagcatcctaaaatttaactcctaaaaatcttggattgggaccatcccataggaaattgggcccaaaaatcacctcatacttaaagagtgcccctaattttgatttccaataactttaaactatgccacatcatctcaagtaaatcttgcttcaactgtttatgtctttccatttttccgataagagagagatcggcgctgggcgctgccaaccaatggcgcactagcagcccagctaagttgtgcagcagggtgatctttcgagttcttggcagctgcagcagtggacggcgagggtgtcggcaagtttgcaaggcacgtcgagggggcaggtagggcatggccatctcacggcagggcacgacagggggaagaaaaggcatgagcggcaaaaacctcccgcgatttcatcaattgggagtgtgtggagatgcccaaaattggttcaaatagagtatggttctgggtgtgggtaaatattgggatcagctttaggcatctcttggagacatgattttaggactctatcgttccacttattggcataataagtaaaacgatatatttgcaacttaaaacttttatatacgttttcttagcaatctagaagcgaagcaaaagctgaaaaataaactacggtgaaaaacactaaaatcaactttaaatttaaggttaaaaatttaaattttgacttatataagcataagtataagccaaaagatgaggctttcaaactagattcctaaaatttatcttctggacctagagtcccaatttacttaaattcattcaatctccccgtcttctcggccgccgactcccgtctcctcgcccgccgcctgagccgatctccatcgtgcgagcagcgtcgccggtgtccccttgctgcttccgccgttcttctggtgagcatccatccattaccgacaatctttttttgtcgaatttatgttaaaccctagcgtttcttcctgatctgggatcttttttctttgcccttaacctcagtaaatccagcctaccctgagatttgatttgaacatgacgagaaaaccagaggaatccttggattgcgcagctaagaacagacaagggagaagatcaggcctccaacttaacgatcttcccatagtacgtgatcgtgctgtcaaactgaaatcaagttacatatatatacatatactccttgtgcttcagcatgatgctgaataattgtgtagtttgctagtgtgatgctttgcattctctgactccaaattatgatgcaggatgttttgggcttgatcatatcgcggctgccaattggagatgctataaggactggacttatatcaaggcaatggaaggatctttggcgtgatcatactatgctaacattcagtcgcgccacatttcctagttgcagaatgcttaaccagcaaaatttcataaggagagttgattcaatcctgcagcaacatagtggtgtaggcgttgagcgcatggagatcaagttcttattgcgcaatgcgcggcgggacatagatagatgggtgaaatttgccgtcgcatccaagacgaaagaactcattcttgatctatcagatcttactaggttcttcatgttgccagttatggtatttcacccatatctagacagagaaggattttatgagtttccttgtcagcttcttgatgccaacaatggtggatctcatttgcagtgtctgcagcttacctctatgtatctgaaaccggctgctgatttcactggatttctgaaccttaaaaggcttaacctgataggtgtaaatatcacagatgaaggggttcagaatttgctgtgcaatcccaatgtcctggagttccttgagatctccttctgcagaatgctcacaaagattcatgcacctcattttctgaaccggctgaagcatctgcaagtggattgttgccctgtacttgagaagatagagatgaactgtgatctggcaacacttgatttcactggttcatcaatgacacctttgatttttgctacaacttccagcctgacaaatgtgcgtttaaaaacgatgcctttttgtactggtcttgactatattgtcacaggattcatcagtaatttgccggttgttcgaatgctcgaatttcatgttgttgaatataaggtttgtgatatgaccacttagtttgtttctgtagcagttcattttttttttcatgcatataaattattgtcaactttctcattagctttttttttttgttctgatgcacgccagaaagctatttctcctcagaggcttcccaaattaatttatcttcgacatttgaagttggaaacgattgtttttggatatggcaggaagactgatatccttgactatgcatatcttttagaaattgctccttttatggaaaaactggaactacatgtaagtttttcacttccaactgacaaataaaagtatatactcatgaattagttttagccaaattttggttctgtttgcttggccgattgattaaatgcgatgtgatgtctattgtgcagtagtagtaatttgtgtttttgaacttaattaaaacacaaaacctgatcctgcattgtgcccgaacgcacgtcatactttgctatattgaagtataacagctaaaatgaaatgaatttttcattcttaattaaaacaattgggtgcacatcttatagacttcctccattttcaataaatgtcgtcattgatcacttcctccatttaagctattcatgtctaatgttcaccttatttaaaaaaatatgtaaatatcatttgttttgttaatttatttaaatttttgcatatttgtattaatttttttaataaggcaaatgggtagacgtaatgcctacagtcaacgacatcatttattagaaaaatagatggagtattttgtttttcattccaggggcactcactaatattctggttttctcatatttatagatgtggatagacgctcctcacaaaccatacagtgaagaggatggtgatctaagaagccttccattacaccatcacaataatctcaaacaggttcagatcactggaattttcggtcagaaagatcaggtagagctggcacttcatatcctttgcagctcaaccgtgctcaagaacatggtgataaatccagaaattgcaatagtgcctcacgatgcttatcgaccgccaaaaagaggggcacacaattttgtggatggtcgtgacgccgctatggagtttgtttgcaaagctgaccatcgaaacgtcgtcgaagttgtatgagcatcatataagatggagtcgattaaaaaatatatatatgtatttaaattttgagtaaatttcacagaactacatgttttatagttcaagttgcagaaaaccacaaacattttgacacttggcacttaagtatatatattttggtagtttagtttcacaaaaccacactatcgatgaatggattcatccatgagacgacgtgtcgttccatctaggatgaggacgtggcatcctattaatttcgtgcgatggctggtaataggatggcatgtccttgtcctagatgaaacagtcacgtcatctcgtgggtgaatctattcattgatagtgtggttttgtgaaactacactaccaaaatatatgtacttaagtgccaagtgtcgaagtgtgtgtggttttctgcaacttggactacaaaacgtgtagttttgtgaaatttactcttaaatttttggtgaaaagaaaaggtttgttctctttgaaacaaaaaggtttaattctgcatgaaatagggaaaaaatgtgtgttctcttgaattggacatggccattgtctaaacagatacttggagattgacaggtgatgtcacatgttcgccttgggtgtatcagttggaccagagacatggaggattagggcctcaattttttttcatattttaatcaattctaatgtgtatcttaataagttctaatgcattccaacatgtttaaaaacctctcattctattttaaatgagttttgcacttttgctcttccccctttacccatttttctagaacggactaattttcttcagctccttgatggtaatcataagcaactcattaggactatggctcatggctatgatgtgaacatatacaggcattaatgagtaggcatttgatatggccattgcctgaacatataattttttttttgc

SEQ ID NO: 6200 - DNA, 3877 bp, Oryza sativa
cggcgacgccggaccggtgatcgtgtacgagctcacgcccagggtcgtccacgtcgagccggaggagttcatggccgtcgtgcagaagctcaccggcaatcgcaagctgtcgacggcgacggcggcggcggcggcgccggtggattcaaccgtgagatctgcagatgatcagatgaccgccggaggcggagctgagatcactgacaccgccgcggcgacggtcgccgacgaccaactggcgctcgcgtttgggcagcagcagcattggcctgcaccaccaccggagattgatgatgacaattcggcgaatcttccgtcgccgggtagcttcttcttgtcaccgaccacgatgcaggccttacaagagctggcttctaatttgttctaattaattagctcgatctaggattgcaattttggggtcagatcatactcatacatttaacacgaagaacagatgcacacagctatgctgatgttgtatatgtaattaatagcttgtttcagttcggtccttcagatattttcctattgatcttgagcaaagtaaaattcatttgttgatgaattagttttatccaatcgaccctccaagtttgcatttttgttgatcggtacatatatggttaagtgacagactaataacccaaagaaaggcacgattatattaattcatcgagccgatatttcgcttgcatttgggcgttgcagcttccctccctcgtatcgtctctctgtttatatcgtcgttgatgacggcgggcgggtggtgacggtggagaagacttcgccgtgtcgccctcgagctcaacctccgcttcgtgcatcacggccagtgttttccattttggaatgcatgaaaatttcggtaagcaccgaaatttcggaagaactttttttaaaatttaacatagttttactcaatttaaagaaattatgaccaaattcacaaatatttgaaaaaaaaatccaaaaatttccctcgaaataattgcttgccggagggggggggggcgaaatttccgaaatttcaatctctaatcaccaccggcgactctttttttttaagataatggatattaaatttggtgtttacttcaattgaagctaccactatttattacattttttttggttcaaagcccaaacacgacaaaaataatcaaacatagatcctcgaaaaaaaaatcaaacatagatgaaaagatgacgcaaccataactacgtcaaccaaagaaaaatattaacttattcaaagttcatgtcgtcttcgtcatatgcacgttgccttactcacagtattcatggcgtcgcgtcggtgtcgagccgcgcttttcgatcccctcttgctgcaatgttgcggctcacatccttgacagcgtcggtgaagttggagttggaaactcctcgtcacacagatgatgcaattgcacatgtggacctcatgtgtgatgcaatcgacgtgccggcccatatcgatccatgggtctcatcggttgcacatatttcctaataagccgttttggcttatatgtaactcaagttgcacaaattaatttatatgtaaaacttttatatatttgttcgtagagatttaaaagccaacgctaaaaagaaattacgctgaaaatatcttaaaatcaactcgaaaatcaaatttgaaaattcaaattttgacttttgatttggtttattagactaaccgatgggctccacgacttgctaacatatactaatttttttcttgagcttcgtgtctctcccaattatgtatattctatgtaaacactttcctaggaattacacgactaaaagtatactcctctggttatactctttatactcctaggagtataattcaagatcaaccctttatatcttttggttatcaatagctttaaaaaatatttagtttaaagacactagaaatatatatatagttatcttacttagtataatggaagtaaaaaaaacatatttatgtattatatatgttataataaacaaatataattaaagatatattttagagatcatatcatcggtgtatgtgacaatacaagtatatgttgttgttccttttgtctgtcaattttgctccgcgtataaagacgcatgtgtatgcactggtggagaaaccgtttacagtcccggttggtaaccctcctttagtctcgattgtctaaccgggactatgaatccgggactaaagatagctatctttagtcccgggtgaaataaccaggactaaagatcgatctttagtcccggttcgtgttaccaaccgggactaaagatcggtcagccacgtggccggcttaccaaccgggactaaagatcggtgcaccattttttttatttgcatggccctgtttgctgtatggttgattatatatatatatatatatatggcaccttaaggtgccacgaattaaatggcacgtgacacagtctccacacccaccgcctgcgcgtcccacccccatcccccttcccgtaccaccaacgatcttaccggtagttaaatttttacttctatatatccacatgatagcccaccacatatagacagaatgtacgttgtaaatttttagctgaacatttttttatgttcaccactcgggaatacgatttagtgtatggagcttacatatcccatttgcagggaatatagtcaattagagcatttttttatctacaagtatttttcttttaatcataccttattttttttattatttcttatttcttggttcaagtttagcaaaaaaaaaaccattttaatttatttttaggacaatacaattatttttttaactgtcgtctatatatcgctaatacgtcattttttatttgaattaaatgttctcatctgcaatgtttgttacgaatcaaatgttcctttttttcaacactgttaacagtgaaatttggtaatcggcaaagacattatcggcttagaatcattatcgactgcagcatctcggaatcagccgatgggagttatcaagtcgccaatagtcggattcttgctatattcggttaaggaaatcaatctactaaaggaagcttatccctaagtgaccgagtttaaagaggatgcggcatggcaatttatctattaattaggaatagtttgttagtttccttttatttttaggaaagtgtgtttagtgtccgataaggactttatgttttccttttatctttaggttagtttctttcttgtccgacaaggacttgtatcaaccaatgggtataaatatgtacactcggggtctatgtaatctatcttcatcatcaatacaattcggcgcatcgccaccttttaccttttctactttattttatcgtccggcgggacttggcacccgacgcggggctgcatcgtcttcgatctccggcaaagggataagtccaatgttccgtcggcccaggcaattgtctcatctacatcggcatcgttcaaggctgcattagtacatttgacctctttgattgctctggtttggatgatatatttgcctacctatttattatatgtctctgttaatctagtcttagcatatcaatttagctctatcggctgcttttcgttttagggtttctgccggtatcggctaaatcgcggtgctagattagattagcctaggcatctaccaccctgaaaactcagtcaacggcttgattgtctagatattatgtttcttttcatacttagtgctgcatcagttaagtttgatctactaagtcgtgcttgaccgctaataagggtttcatcggggtttcagccggtgagttatctagacgttgcatcggctcataaggattgcacatacatataagttgaatttagccgatgacaacaaaggtttca

SEQ ID NO: 6201 - DNA, 39076 bp, Oryza sativa
cttatcaatgcatcagttgccttcaccttgcgggagatagtctcatggttaaacaaaggtcaggccaattccatcctgcggtggagcgctcggacggagaggacttgaaggacattgacccgtcgttgaaaggctgggcctttggcttctcccagccaatgcagggggctggggcatacgcgcgggtcgcagggtaggccgtgcgaggtggagccgaagcagaagccgccgccgacgacccggacgtgttgtccatcacaagtgagccggagatagagagaccttgaacgctgccggcgtggcggcggacttgttgggcaacggtccatcgaaaggcatgtccttccgcgtttccgatgaggaggacgcagtgtaagcccaaggaatgtggcaccgacgccgacgaggacccgttgcccgtcagcccaccagtggggaggtcgtacgctgacgaggaggacggtgagaccgacgggtaggcggaggagcgcggcacccacgaagaagctgatgcagacgaggaccggttgcccacatttcttggtcctcctcgggggcgttcatatgccgatggaggaggccgacgaggaggagtgcaggtgcgacatctcgattgcggcgacaagggcacgttgagtgaccggaggagcactggactctgaaggcgcgcgtggggagttggatgcttggagcgtatgtgcgtgtgttggggggatgactgaggagacgatggggaggaggcgcgaagtggaagaagagggggagacgagtcgggggctcgggccctttttagcgtgtgctattgcattccttgttgcgatccagtccgcttcggtgttagggtttcgagtcctatgcatccattggtgcgggtgcagacgccgcagcctctgcaccaccgccacgcatctaacgacctcatcttgtttatgcttatcaaccaaaatttaacttttcaataaagttgattttgagatttttttaatcatagtttatttttcagcctttgcttgtaggttgttaaagacatgtatataaaagtttcatttacaaatatgtcatttcgctttttcctcaaattagtcaaacgatggggctgtaaataatctcaaccggtcaatatgccagaagcaccacatcctaatagttgatccgcccatcgttctctcaattggctgaagatctggcaattcaggcggtgtttgagatgaaagattaagttgtcgcttgtaaaacggaaaacctattagcacatgattaatttaagttttaattattgcaaacttgacaaatagatacatttgatattttgaaacagcttatatataggaagttttcgcacggaacgcaccatttagtagtttgaaaagtgtgctaacgaaaacctagataaaatttgaatcttaatgaggaaagtaattatgtttataccttgtcttgctcatgacaacctttttctgtacgcgagtacgtcgtgatattggtggacaggaatcaagctgaacacaacctgccgagtgtgtaattggatgagaaccacgtacatttatatactttatatgcaagaaggtgatccatggatcttcatcaaacccaggtagagttagagcaatgtatgtcatgtaggggagacggtaaggaaaatttggggtattgatttcaaattaccgacaaaaatctttgtttagtttggagatggtggtcggctcgtaacaaggccaattcccgaatgagagtggagagtacaaagccgaagttacttatcattatgtgcaagagtttgacaaggtttagttgccggttggattccttcgacgcttgatacatatagctgaatgcgggtggatcattccacatgactactagaagaggaggacggggtttcatggcgtgtgaccacaagcgccaatttttgaaagccggtgttggtaacgtccttagagcatctatcgttctacacgccaatgctttgacaacgcctattatgattggaacaagctgcagagtgggtatgcctcgtggggtgcttgaaacatattccctcctgtatcaaatatattgatgtttgtgggttgtgccctttggatgcaaattattgacgttttggtatttgattgtcactttggactgctatatccttgcatgcatgcaaggcttgtcttcagtagctcatcaactatagcaaggctcccaacttcccaagcaatgacacattaactccagctttgaaactaaaggctatagccacacaggtcgtatgggagtttttgataaaagagctacacagaagtttttaataagggtaaaacaagaaataggcaacctaattgatcacttcttggtaagtgagatctgtccaaaacatcaataaaatcgaaaccggagagagtatgttgctaatatggaatgaactctcacatatgcagagaatccagagatggatggaagtccaaagcgatgcctttgccaatacaaatgctaaaattcaaattttagcaacgaatgataaggcaacaagcatacagtggttaaaaacatattatttggcaatgcaaaacaattgacagaagatatataccctaagttacgttcagcgagatttgttgtaatggtcaactaaaatttggatcacctaatatctaatttatctggataaaaaaagtgtagtagacgcatacacatggtgatgggatttattcggacatgatttgatcaattcttttcaaaaactgaacattacaccggtcgggtcccgtctcttggtcggtcgttcccgtccacgcgcgcaccaccgcaccacccagacaggcaactgacggaggcataatatcctagccgtccaatcatcccgaaccgctgcatcctggccgtccatccggacaccgtccttgtccctgcaaagcttcttccgctcaagaccaactttccacgacccaaaaacctcctcccccccttctcattctctctcttctctctcctccacctccccacctcctcgcgatctccacccccacaccccacccccaaccccgcgacccactcccaggtgggccccacatcgccgccggcgaccgcgactcatctcctcggctcccgcgccgccgcgtccgcgcggccatgacgacctctcccccgccaccgccgcccgccgaggtaatcgcgcgtggggttgcccctgcccttcgccccctcatcctccctccgccttcgcgcttcccgctggctcgtgtgtgtcccctcgccgccgccgcatcggacggcgatgcgggtggcgtggtggacgcgggccggcgggtggtcggctgctgtaggtcttcgggttggtttctttgtccgggttgtgatgtggaatgtggggatgggcgtgtccgcatacggaattctagggtttgtggttttgctggctttgcctcgggcttggtagtgtggatctgaggcgagtctcccatgtttattttttgcgcagcagcagcagcaacaggaggaagaggaggtgctcgtgccgcgccaggagttgcccaacggaacgcagccaatggaaggttcgattcggtcatttcgcctcacgattacctgtacatgcttttgtctttctgcgtataaggattattatttggttagtattttacgttctcagaatttgtactgtgtcaaactactgatctatgttctccgcggatgcacaattccaacatgtacgtttgtgcacatacatgatatatttcttttgctatgtcaatctggttttatatgagctttagggtttgctaattttgtttgtttttaatgcaaacatgacgacctcaaagcttgctctcattttgtgtggtgggttgcattttactgtatctgtatgcagctgttggtatgtgtaggttgagtaaaataatgttcagtaatgccctttgtttgccatatctgctgattacacttaatggatctcatgttgctctgaattgtcatgccagttgtgccttctgagccagccgccactgtggaaaaccagcagattgaagatccaccaatctctagatttacttggaccattgagaacctatcaagagtgagcacaaagaaactctactctgaaatttttgttgttgggggctacaagtggtgagtgcctactgcttcttttgtctgagtttgcgtgctatgttgatttctgcccatcgaaggggttactgtcgggtgattgatggaaagtcattttgtttgcaggcggattttgattttcccaaggggaaataatgttgaatatctgtctatgtatttggatgtggctgattcagcagtcctgccttatgggtggactagatatgcgcagttcagcctctctgtggtcaatcaaatgcacaacaagtttacaataagaaaaggtgcattcatcatctatgcctttttctttatttagtcaattgggttgcgaaaagtattttaatctgaaattctttcagaaacacaacatcaattctctgctcgagaaagtgattggggttttacttcctttatgcctttgggtgatctctacaaccccagtagaggctatcttgtaaatgatacttgtatagtggaggccgaagttgctgtatgtaaggtggttgattattggagctatgactctaaaaaggaaactggttatgttggtctgaaaaatcaaggtgctacttgctatatgaattctcttcttcagactctgtaccatattccatatttcagaaaggtacaaaatgtagttttactggttatataattttgtacttaatatatttgtatggtgctaacagtagatagtgcttgtcaggctgtttatcatatgcccacaactgagaatgacatgccttcgggaagcattccattagctctgcaaagtctcttttataagctgcagtataatgacagcagtgtctctacaaaggaactcacaaaatcttttgggtgggacatgcacgattcattcatgcaacatgatgtgcaagaactaaatagagttctttctgagaagttggaagataagatgaaggtttgacatctgtaaggtctttccttttatgtattcggtgttgtttttcgagtagtgtaactctgactgaattatgcttgtaaattttgattcaagggaactgttgtggagggcacaatacaacaattatttgaagggcatcacatgaattatatcgagtgtatcaatgtggatatgaaatcaactagaaaggaatccttctatggcaagtgattgtgttatcgcatcatggtcattatgtccaaacatgcccctttgacctgattggtgtacactccaatgcagatcttcagcttgatgtcaaaggttgtcaggatgtctatgcttcttttgataagtatgtagaggtggagcgcctggaaggagataacaagtatcacgcagaacaatatggactgcaggttagatttttgggagcttctgatagctaaaccaatttacgctagagctacactgtcattctccctctctcacatatatgcacacagacagccacacatcatgtatgttatagtacaatggtatctgtatgtgtatgtttaggttctaggacagatgttgaaatgaaaagactgttaaccagatgaacatacatttttttatttcatagcaaaattagaatctcggtaaccttgtttgaataagaattaacatggtttcggagcaactcattgtgctcaacttaatagcacaaacatcaaactcgtgattaatttctcaaagcatagcatggaagttgaaatgaacactattctcaatatggattaaagggatcttgggaatttcaaattcaaagaaagaacatgatgggaatctatttagtgtttatacaatctttgggcgcatttggaggcctgtctggatgaacaattcatgttatctggcaacagagaaaaacatggtactgtatgggctttttattcagattttttttcttggtttcaggatgcaaagaaaggtgttcttttcatcgacttccctcctgttttgcaacttcagctaaaacgctttgaatatgatttcatgcgtgatacaatggtaaaggtttgtatcagtgccatctgctaagaagttcccttcatccattattgttttagtggtgaaatgaatgaacagttttgtggtaaaggaagtgcgttcttcttgcttccttttaatgcttatccttttgttcctaattctctatcctgctaagagtgtttatgctccattctgaacttcagataaatgaccgctatgagttcccgattcagttggatcttgatagagatgatggaaagtacctctctccagatgcagataggaatgtgcggaatctttacactcttcacaggtcagttagatattaactattatttcttgtgtacctgtgttccatttcgtgatttaaggtttcaaggttcttcatggctgaactgccaacaattatagagatggacttctggcctcaccattttacctatcctggactttatttaataatgatgcaattctattacaatttttatgtcactgctgtctttaacagttaatttcttgcagtgttctcgtccatagtgggggtgttcatggtgggcattactatgctttcatacggcctactctttctgatcagtggtatgattattttggttatcattggttcttttgtatataaacaacatgatcttatgtatatctgtgtcattggctatgcttttgtacaaaaacaacaatatcttaggtatatctttcatatgattggtttgtaaactttgttagttggtactaactgttatcaaccagttgctgcttacaggcttacagctagtgagattagccatgactattttagtatttttctgtgattgtgctccttactaatcaaactctcatgatttgaagtggccctttgagtacttttgttaatacatttatgtcttcttttgaaataccttttcagttcactgtaaatgttaatttagaccttacactgatgggttcttagctgagttcggtagagcttcttagctctgctaatcagctacccacaaagcgagatgggtaattagtgattaattaagtataaattactataaatttgaaaaatggatttgtttgatttttttcaaaaaaatctttatatacttttctttttcacgaaacacaccgtttagcagttcaggaagcgtgcttacagaaaacgaggtagtagctcacctcataagcccttccgaactcaccctgagtccagattagcaagtaggaacaaatacttgctctataagcatgatgcatgtcagccaccttttcattacatatttgtatgcttcttggatggcttgttgctacttctatgtttattatttgctgaacaaaacgtttccaggtttaagtttgatgatgagcgtgtaacaaaagaggatgcaaagagggcattggaagagcaatatggtggtgaggaggaggttcgttgccattttgaagtctgagtgcttatgtttgttgccgtagaaacattgagctgatcaatttccttttgcagctacctcagactaatcctggtctaaacaatactcctttcaagttcactaaatattcaaacgcatacatgcttgtgtacattcgcgaaagtgacaaggacaaaataatttgtaacgtggatgagaaggacatagcagagcaccttcgagtaagttgctacctaaggttttttagttattcaattcttcattttagtttagtctaattcttctgccactttcagattagattagaaaaggatcgtgaggaaaaggagcgtcgaaagaaggagaaagctgaggcccacctatatactatcattaaggtgtttagtcaacacgctgggcatgtcgaattgattgtttttcctcctatttccgttggttttgttttactttctatttagttatctaacatgttttggtactgtaaaggttgcaagggatgatgacttgaccactcaaatagggaaggacatatattttgatcttgttgatcatgataaggtcccaagtttccgcatccagaagcagatgcctttcactcaattcaaggtaaattacatgggttgaagactatttgcttgttgtgatgatggcatctttccatattctaattgttggaattgctacacattgtttgttgtcctgtacaaaactatatagttcaaggacccaggtgtgcctattagtgtggcacgctgttttgcaaaatcaagcttttatttattttgagtagatcaattgtctttttgtattttacaagttgcaagaaatgcaagtaagcttaatattctgcagtctatttattctccaagcagtttgtttgcatgccttcttctcaccctttcatgattagctgtacatgctgagcatgtgtatcatgcatggtttttagtgatataaagcagggatttctttcttgagtcttgacgcagctcatgtgcacagctatgttttagtttttttctttgtattacttgtcggagtagagttttgcagttgccaaactgattactcatatatgaagtgctttacaggaggaggttgcaaaagagtttggtattcctacccaatttcaaagattttggctgtgggccaagcgacaaaaccatacataccggcctaaccgtccactgactcctcaagaagagacgcacacagtaagatgaattaatgacatattgcgttgattaaatgatgcacagttgtagttgatgctcttgatttctagtgctcattcgtgtctatgcattgtgctgtgataatctgatgacgaattaaataagcaggatacagaaaatacaatggcattttctgtaatttatgccaagttcagttgctttgctgatatattatatgcttttcatggtggttcctgtttgtatttgtcatggtgcttctcttggatgctaaaattgggaatttctaagtatgatacctttagtctgtgccctttgaactttgattgaaacatcccacaaatgatgcatatttgagtatcttaattttgttgatccagctaacttgctcatttattatttcatccgcatgactaacacaccgcagtatcttttatttttcctggcaactgctatgtaatttgttttttattgatcaaggttcaccgttccttgtattgttaataaggatctgcttattcggattcgacactgaagttaagatcatattattatgttgctgtccttgttaggccaacctgatctgttttgggatttcttgtcaagctaatacttccttgccttcagcatatatttaagcagtgatctaattctgtgtaatggtaaacatgtggatagtaaggtcaacaactttgtgtaggttggacagctaaaagaagcagcaaataaggctcataacgcagaactaaaattgttcttggaggttgaacttggactggtaatagccttttccctcgcgcttttctgcatttctttctttattttcttatgtttggctgccaatctgttcatctactttcaaattgtaaagggagtctgctttaaatttttactggcaatgtaggaccttaaacctcttcctctgcctgacaagaccagagaagatatattgcttttcttcaaactctatgatcctgaaaaggaacaactgcggtacttctcataatttcaaatagccaactgtatcatcattgatttgtgttgatgttcttacttataccctgaatgagttcttcaggtatgttggtaggctctttgttaaggcttcgggaaaacctcaggacattctgccaaaactgaggaaaatggctggtttttcacaggatgaggaaattgaactttatgaggttgctttctttatcatgtaaaaaagcttgtctctgcaagatatgcatatcattctggatcagcatgtgaccttttttcccctttcaccaatactaggaaatcaagtttgagcccaatgtaatgtgtgaatatattgacaataggcttctatttcgagcttgccaggtatggcgtgatttttttttcttgaaccaataacattcttgtttctatgatattatctttacctggaatcttttgcgtacagcttgaagatggtgacatcgtttgttttcaaaaatctccaaagccagatactgctgaccaatatagataccctgatgtcccatcctttctggtgtatatacggaaccggcaggtacttgagggtgccccattcaccaatcctgaactttatgctatttgttatttacatttcctcaacttctcgctgcaatgttgcagtgaggaattattttacctctttgtccatgtttaattacaaggaatttcattgatgacagttcaatatttctcttcccaaaaaggaatgttctgtgattttttgcttacttttcttgttgtcttgtttgccctatttcatataaattttcttcagtagtcttgctctatatgcattgtgatgtccatcttgacagcatcaccatataatatttttgcattaataacttctgtgtgattcttcaggtagtccattttcgttcattggagaagcccaaagaggatgatttttgtttagagatgtaagcatctcgacatgctatgattagtgaatcttaatattttgtattaccactgatattttttctttgctgttttctgtataggtcgaaggctttcacgtatgatgaagtagtggaaaaggtggctcaaaaacttggtgttgatgacccaactaaaattcggcttacatcgcataactgttattctcaacaacctaaacctcaacctattaaatacagaggtgttgagcgtttgctggacatgctgattcactataaccaggttgttactctgactctcatctttgtggtcatttgtcgtttaatcactaaagcgaagaactgaagtgtgacatagctgttggcatctcttgtacagacttctgatattctttactatgaagtattggatataccactcccagaattacaagctctgaagacattaaaagttacatatcatcatggcacaaaagatgaggttattttcttgataccttctttttgtggtggaaaaacttaacaataggttgtttttgctttttaatcttaaaacatgttttaccaggtgtcagttcacagtattaggttgccaaagaacagcactgtcggtgatgtgctaaatgatataaaatcaaaggtatatttttgtaccccttatttatggtgtgtattccacattctccagttattctatttgttggttttacaaagtttaacttatgccctatgtgtgccttcggctattaccaaaccaggttgagctgtctcatcctaatgctgagcttagactacttgaggttttctatcacaagatatacaaggtgacacaaacaacagttctttttaatgccctcttagttgcagttggttccacactatatcatcgtctaacttgtatttccttcagatttttgcaccgaatgaaaagatagaaaacatcaatgatcagtactggaccctgcgtgcagaggaggtatattacctttgtgtccggttttacaagatcaattttcatttgttaagaggttcaatccctcaatccccccaggaattgatggatgccattcctttttctttctaggttccggaggaagagaaaaatcttggtccttttgatcgcttgattcatgtataccattttaccaaagacactcaaaatcagacggtaatggaattctgctaataatttatctacatatatagcttaaatggataactgcatatgcactgctacaaaattttagccactttgttgcctgtaattttaaattagtcgctgacagaaattcatccgagttaggtgtgtttattggattcgactctcttgttttttgtttctttatttcaactgtttgccagcatcagtatcatgacctatacattttattcaagatgaacttgaactgtgttgtggcttgtttaattgagtgttttttattatatatctgtttactatctaaacttcagcaggctctctacatgtcaaatcatctgaacacaagtgtagccatgtgttctttttgtgtcgagctatggatgtttccctttttatttttaattgtttgtagtacctttgtggctttgcaaaacgattatattttgcctatgaacagcatatttttcatcttcactttgttatatttaactaatcttcactgtcaaaatgattaaaggagtccttacaaaatcaatactcctatatccgtaggtagcagaagcccggttaagaagtatttgtaagaagcagcatcaggctcctgtagtcctgctttcgtcatgtcatactttctgcttttgtgtcgagttatgcttgtattttccattttcatatccttaaatgaatttattgaaaagaatgttataggctttataacacgatagatagtcagcttttggacatgggcgtatttcacttgctacccagcataaatactggcactgatgggaacacaatattgttagccaattttagcagttctgcatctaacagcatacttctatatctagtaaaacttatgctgatatttatcctgatttctacagcaagttcagaactttggagaacctttctttatggttattcgtgaggatgaaaccctttcttctattaaagaacggatacagaaaaaactaaaagttccagatgaggatttctcaaaggtactctatactattccacacttgtagataattttaaatttatgatttcctttatgttatagcgttctcctggaatcttatagaagtgatgtaattggaacatgttacctgccagttgtttatttgcctaacaccataagaacatcaattagtgtcgttcccaagttctctgcttctatccctagttcgcctcagaagtggcgcatcagatgcatcacttggttttatttttattattttgttgacttccgtttgatcatgaaatatactgagtggcctacatttttgtcatctggcggtcaacatgctagtttgatctctctaatattcggtttaaatgttgcatagaaagaatatgtttaatgaaacactcaactgcaactgcagtcctggtacttctctactttggtgcattcagataatgaaagttgtattgcttgatatcacacaaacatgatatcactctgctcttttagaaattcctataatatgttcgtaattgcctctattggtttaactgtttaagagcttgccatcagacacaacctgctgctgacaattttatctgttagccaaatgaacaatgttagttaataggtagagcaacctcaaatgtatttggaatgactgatacttctctaccatcgttagtggttaattagtgggaactgagctctaaattgaatagtgtacaatatatatttttttaccaaaatctcttcccagggtaattagtagtccttttacgtatctttggtgctgattgtgattaattatttggcttgtggcgggtggtctatggcaaacatacatatgttatttcttgcgtgcttttgctttctgatggttttctgcttgtgaactgtgacagctagtgtaatgcatttccatctttgatgtagatttgctaatgattaatgtggttagatcggtttgagtaatgtgtttgcttaatgtaaacatgcactgctaagcaatgttctcatctccttttgtagtggaaatttgcctacatatcacttggtcgcccagattattttgaggattcagacactgtagcttcaagatttcaggtacaatattttcttgcttgctaaacaatcactgttagtgcttaatttggttcacatttaaactttttttgcttgcttatttagcgaaacatgtatggagcttgggagcaatatcttggactggagcatccagacacggctcctagaaagacacacaacgctaatcaggtacatccttggcagattaatacggatggtcatgggatgtctgcccctagttggacaaacccgagagagaattgtaacctaccactacaactatttcttttctgtttctggaatgtttgctaattgcatgttcttcatgcagaaccgccattcatttgagagacctgtaaagatctataactagacttgagaaatttgagtgacgtgccgccatccaacaccaagcaagggcctgaaaagtgctggcttgaataaattgtgtaccataattgatggtaggacgggttgctcaggtttttcgatggagctagaaagcatgcatggtgtttcctgaggagacgttttttagtatctgaggcagtttctcatcttccgcaacttgccccagatatataaagttgtgcagagatgacccatcgtctttcatcagtagataaggcggtattttccagtagtcatacagttaaaatagctcaagttttcttcgttgatcacatggttctgcagttgtactaggactccgagctgtttatacctgttgccctgtaaattatccatgtacaagggtttttcttgctctgacggcagtcaacacggtattgtaattccagctataaatatattgttgcctcttatatacttttatctgattggcagttcgctatctcctgagatcatttggagtacatgagagctttcaggaatcaggactggctattctgtgaacgaccgctttttaattaaacaaacatattcctaagcctcgtctttggacatttggggctttagtctcttacctcgttttgattgacctcaattccgactgatacacgtgtgacaagtttgaagaaacccacatttcggccttgccaaacaaggcttatgtggccttcaattcgaacgaggctttactcttatgaccttccaggctccaggctggacttgttttcttgggtataaagcctcgacacagcgtggtgagaaatttcgtatgccgttctcttatgtcctacactcctcgctttgtcatccacatttagatttttttttttttacggaggttgttaacagatcacatcgtagctgccgctcgtgttgttcctgaaattgaccaacgtgtactctgacgtggacgtgggtccaggattgcagctagagattgtctgctatggtaaatgtgactactatatttaaatttatccatattattcactaataaattaagagtcaactcatacaatatgtcacatctagtaaaaaataccaatatctctaatactttcacaccattcttgaaatttgtgtggaggttatctcttgatttagagatggctcatcatctctctcctcgcttctctccacctcatcactcaatccaatgtagcacccttaggggcagcatatgtagcattatagcacttgcccatagggcaaattcagtccacacactagttttgcaggacccatgcacaaatttttaaaaaccagcagcgtccgccctccctcacactgtcacacaaattgtcgaagctataataaccacatgcaacaaatattttttttaatggggtaagataactctttggctgaggtcggttttctgttaacttcctccgttccgaaaaaaggcaacctatgtggggatttgacaccacctaagacaaaatatgtccagatttattgtcctgtggtgtcaaatcatcacctaggtttttttttttacggagggagtaacaactaacggttgctctcacaatgtgtttagttcgattttttgggcgcatgcgtcgttttcacctcattggaatcgcccttagactcgaccaacgcactgactcggaaattgcacactgtagtattccctccatcccacgtgaccatcatatataattttttaggttatccctaaatgatattagtatttattcgctaaatctatggatactgatgtatgcatccatgcacatgcacataacgtgttacaatcaacatgcaatatcttggtttgctagtagctaggaagtagcgggtatggtgcatgtatcgagtttgttaccggagtaaatgtagtacgagagagttattagttttccctaatcttggtgcactcttataatgtgatgatcaattaggacagagggggtagttttatccttctctatctctacggattactttagttcccctttgcatctttgataccaccaccacactgcctattcgccaacttatcaccctcgtccccgagactactgctgcttctctgctctgtcaatccccaaatctctgtatcccttcacgaattcttcgcacattaagcaatatgattggggatgtaacacttgctctgtctgtccataacaaagtagtcatctcaacccgccaaaaccccatcaccgattgaacaaagcagccaaactgaccggcctctgtaatttagccccaatctgctcggccatgcttagcatgcccctcctccataccaccagcatgatctacacgaagaacctcacagccggcctcccggatccgtcgctggacctgctttaccccggtgagctcatcggcgttgccggcaactaccaccaccaaagatgagtgaagcagttcattgggtaaatgtaacatgtatagctgctagttggcactaaaagaatcaactgatcatttaccaatagtcaaggcaagagcacttcccttctttcatatgatggaacctactaccatctctcacaataatctccctctgaaaaaccattgtcaccatcttactgaactcatggcaatccccacagacacgaaggttcttgacgatacggattgggctgccagcttcaagaactatgaagccataagcaattgccaatcgctcgctgtgcaccttgaccgcgtgcaccttctcttcctccccaatgtcatgcaatacagatgacacatccggtacataccctgcctctgtcaaccttttgttgatcatgtcaagtgtatcatagatctgcacagaatccttgtgataagtgtctcctactagaaatttgtgcaccttcccatgcgcttccatcaagctccagccggctgacttgttggtaccgcgactagacatcaatttcctgacttccctgacttcatcccatttgtttgcctttgcatatatacctgagaggaggacataatagccagaatgagttggatccagttcaattagcttgttaccaacagaaacccccaaatccaccaggccatgcgtcttgcaagaagagagtattgtgccccagagaactggatcaggtgcaatatgcatcccttcgatcaattcaatggcttccggaacaaggccagcacgacccagaagatcaaccatgcagccataatgctccatttctggctcaatgcgatatttctccactatcagtttgaaatagcgtcgcccctcagcaacaagaccagaacggctacagccattgagcacaccaacaaaagtcacatttgtaggggacagaccctcactgataaaccgctcgaagagctccaccgcatccctccccaaaccatgagcagcaaggccacagatcatggcgttccacgcgaaaacatccctcctcctcatgccatcgaaaacctcccttgcaaccgccacacacccgcactttgcatacatgtccacgagtgccgctcctacattcatacacaccggcattcccgacctctgtaccacattatgcacaaacttcccatgttcaagcaagcccaaccgtgctgctgccgacaatgccgtcaccactgcagcctgattcggcctcacgccctgctccaccatgttccggaacactcccagcgccacctccagctcctctttcttcacatacccgcccaccagcgtgctccaagaaatctcatccctcactggcatttcgtcgaacacctcccgcgcaacggtcatcatgccagctcgcacgtaccccgcgagaacctcgttccacgtgaggacgtcccgcacgcgcggcagctcgtcgaacaccctccgcattgcccccacgtcgccggagacgccgtagaagtgcaccagcgcgttccgcacgaacaggtcgcccgcggcgcccgccttcacggcgagggcgtgcacgtgggagcccaggaaggagcaagcggaggcggagggtcccgcggcgttgaggtggttggagatggaggcgaggaggaaggtgaaggagtgggggttgcggcgccggaagcgggagaagagggtgagcgggagcggatgcggcagcacgcggaggaggttgttggacgcgaaggcggaggtggagttggcgcgccggaacagcgcgagcgggtaggcgtagtggtcgccatcgccgccgccgtcgtcgccgcggtggcccggcttgtccgggagaaggcgggggaggacggcgaggaggtggggcatggcgcgcgaggcggcgagcccgaggacggcgagtcgggcgtgcgcctgctggacttggcggacggtggggctcggcggaagcagcgccgcaaggagctccctcgcgtcggcggcgcggcgggcctcgaaggtgggggctcgccagacggcagccgccgccgccgccgccgccggcggtggcgcgccgagctgcatggacgaatggatgccctctcgatctacctcggcttctcccttcgagaagtaaagatgcttcacatttgatctggaccgtctgatttcgatcggacggtgctgattgacccgctcgggattttattagccccttgcaatttgtaaatgtgcagtttgaaccattcagattcattcaaacggacagacaaaatgcatgagaaacacatcgtcagttgaactgatgtccctttgaatgagaataaaaatcaaactagaatacttattacttatctaaaccaaggaattcgatcaaatctccacgtcaaaataagtctagagaaggacgatgggtctgttcactttgatgtcattttcaaccttaccaaattttggtaaagttgccaaaaaaagtggctacatttagtttgctgctaaattttgataactatataagaaatcctgccaaaattttggcaataccaaaacttggtaagttttttttttcatcaaagtgaacaggcccgatgatttggaaaagtttggagttgtttgcatattgaaccaaatttattaagggcatgtatctaaacaaaggaattcgatcaaatctctacgtcaaaataagtctagagaaagacgatgatttggaaaagtttggagttgtttgcatattgaaccaaatttattaagggcctgtttagtggatgcttcgagtagctacagtttctgatagaatcagaagttccccatacaatttctaagaagctatagttgtaaaatccagaaaatgaattagaaaccaaccgctaatcagaattttgaactcccccaaaagcccaaacaacccttaaaaggtgtgtttgaactctctagcacacaaagcgaagcacatattagcacgtgattaattaagtattggctaaaaaatcttaaaaaataaattaatataatctcttaaagcaactttcctataattttttttaaaaaaacacattatttagctattcggaaaatacgcacgtggaaaacaagattggtgaaattggcaacattgactttagaacacagcccaaggcattaacccaccaacatccggggacacgatcttgagttgagtttcctactgacgacaagttaatgccaactacagtactaatcagaatctccatctcagttacaagcatggtgaagagttaatagagttgtcgtgtctccctaccacaagaactcagtgagatggcaacgatgcatttggccattcccagagaagctcataaggttgatgcagctctccctcctggcaaacctcatcttgacccgacgccattcttctgaagacagcgatctgggaagcgaagcctggttcatcgcctgatccgccaacgccactgaactcgacgctgtagttgtgcttttctgcgagtccggtagcccagtgctggaactgggatcttgtccactcgaacttgtggtcatggtttcggaacttgcaaggaccagcgttttcttctggttcttcttccttgtttggcatagctgatctctggaggatagggttgtattcatagttgggtgttgaaacaatcagcaccgtagggcagaacgaactcaagacgacgtcgccacataaacttgcttggtcctcctctacgtgctcaatcacctgcaagtagctttggtcagtcgaatagcatgtccaactaaatctaacgtttgagagatcaaagagaaatccacatcagcatttgtaaggatggacttcccactgtactactatgaacaaaataatgaatccacatcagcatttctaaggatggacttcccattgtactactatacaaatgtgattaggctatgtgattcttaatccaatcaattaatcgtggtatccatgtactagaggcaattgagaagacagcagaaacagttcaggagtaactgacctcaagacaagtgccaatgtcaaatctgtataagcgagaatcaaaatccgttatagaaccatcatagagcacagccgttggaacacttgtctgcatcaacgatttcttgctcagcttctgatgaaggctctgcaaattcagagagatgaaaggagtcattgccaagcattggagagaacaaaagggatggtttaaagggtgaactaactatcaacagtcatcaaggctctgttacgtgcctttgctgctcgtgtgagacccttccgagaaatgtcaacaccgacaactttttcaagggttgttggatgctcaagcaatgaatcaagaaggctaccagatccacagccaaaatcaacctgaacaaatttacttcaatagtgataagctaatatgcttggcaaatatggaagtaggatgagaagaatatttaccaatgtggtagcatgcagctcattgatgtaccgaacagcgaattccactctttgtttagataaaggaggattaaacaaggctttttccattctatcttctaatggttcagttacctgcaatacctttacagagaactccaagaagcaattgtctgcaaggatggttaaaacttgagcatagtgcttcagccaaattcaagctggtaatgaaaattatcagactgaggtgttaagattggacctcacctctagatatcttggaaaggtcatgagaaaactcattagctgcagcaaggatcaaatccttaggaggcaattcagctatgaaacatgcgctttgattaactgacagctgactcacgcatgattcaatctgattcttaacagccccagtccctatctcaaactcaaactcattgttgctttctagcgtatatctgtttgttttgtccttcaccaccaaggaagcagtatagcttatgcaagtcaatgatccatgggatggaaaaacaccagaatctggaccatcaatgtgtgctaaaactgcattgttttcaagcttttgttttgaggtatccatagaaagcgatccaactgtactgcatgcacttgagtcatcacctcctctgttgccataaatagataagaacatggcaaattcatgcaaaaaattatctggacatattgtgaagccatcagtgctcttagaatgagagagcttcagtacatgcttgttcggttgcttgaaataactacagaaccaaatcaacaccttcaatgaagaattgtgaatggcatcagattccttgctccaagtatcagctgtcgaatactccaataaaagctcctgcttctttgaatatattttgacatcacatttgaacatatctgggttttccttgtcattctttccatcactagcacactgattttcagcattctttagcacgtccatctcctcggagcttacaggtgatcctaacactttacaagaggcacttaccctattgacagcgaagtagggctctgctagtctgtgaaggcgacaaaatgagcagagaagatctcgtggagagagacccttccaactagaacgagaatacacagatggaagctctgccaccagaattgaatccctggatatcttgtaattcccatctggtgatttgcccagaagaatcctgagttaccaaaaagcaagttattcagaagaattagaaactaagatgagaacagaaggtgtgcctaaacaatagagaaaatcaattcaaatgatggaagagtagtagtcgagtagatgacagtgtgaagaaaaatcagatcaagatctatctacaaccagatgattcttataaaaaaaatgaagtatgcatattgaattaaactaaagtcaaaatatatctcatacaagtgacataatcaacaaatcgatacctgtaatagttggataaggtaacatcttcagtatgaagctctgagtctctccttgtatatccaacattagccaaaattgcatctccataaattgtttgaccagaaatgaaggaagctcgcttatttattaggctctccatatagccatctccaagagaagaaaccacattgtgtgatatctcagaaacaaattgcacatttggagctgagaaatatagccttatctcagaagatgctttgccaacagttctgcagtgagacaattttaagattatcagcacaccaaaaataatgacaatggtcagaagagaaggctcggcacaatactgaccttgaaacaacagcgtgggaggaatcacttgcagagagcttagacactatatcacccatgtaatgttcattatgtgataaagtaagtcttattgtcttaggttcatcctccatcatacaaggaacaaaaatcccatctacttctatgggatccgttatgccagaccaatgctgaagtgccaaatcaacagcctcaggggaataaggcttctgactccaaatccagaagttgctatcactgacagagacaccaggggattttttggcagcattatagattaatgataaaaccaagagaggatcaaactccgctttggggtcaataagtttacacagtccaatgaccttcacatcacatgcagcaattgctgacataggaatcataccaaagcggtccccggttcttctgaatgtcacacacatgtggccaataagaggatgagatgacgaggggaagttctgaatagaagagtaggaaaaaaaaaagacagacatgttagaaaaggtcggttagaacaaattaattgtttttcagttacatctgatgctctgaataataatatgattatatagccgcatgcttcaactataatcctgtattcttgtgtacacaaaatgattcagacttcaatattggtatttggtgatcatgtgacatgtctatgtaaagaagaatgtgtaccaaagcaggttgaaactgcagaaacatagaaagcaaagccttaagggaaatgttttttgtagtaagctcgatggtccggtctctttaccacatagatacccataacctcttaattccagtaatacagagtctttcttaactccaattataagagttgcaatggttatgatcatgcaaccctacgacatacacagcccatcataaggatcctatatccctattacactcctcaattgccagcagagcatagcattccactcaaatatgtaacatcatgaatatgaaaacttccttttgctgtagccttctgttgtgtgcaccttaatccctgaactacaatgacacaacaccaagatcaagtggaaaatactaacctcatctgtaaaaaaaccagatatgcgagcaataagttcatcccatgcttcttcaggagtactgggagcatttgcagtgggctgaataccaagctacaacgaagacaataaaagaaatggtaatcaccataggtccacagcatgaacaacatttcacatagtaatgatatttcatatatcataggtacatagcttatccgatagagaaatacaaaggagctaggttactgtgcagcttgatcactaacgtcgatggcattggtttgtcagaacagaaaacagagggtactatcaaaagaaatggcaacaaagacaatgagcaacacaattaggtgctcactcaggaattgaataaccaaactaaggtgagatttgactatttgagacttgagagaactccaccttgcacttgtgacattcctcaattcctcataggtgagacacaattgctaactgaatcgtgcattgtgcatatcgccgtatctaatcacaaacttaaaggctacacgataaatctctatgtatatggaagatgattttgcaactacacatgtaaagcaaaaaaaaaaaggtgaagttgcatgccaccaccacaatgctcatcaataccttgtcgagggcaatctgcgcggcggcttgctcggcgtccttcttcctgacgaaggtgcccggggtgacgacggtgaggccggggatgtcgagcgagcagcggtagacgctcctggtctgctgcggcagcgcgaggccggggcagccgccgtcgacggcctcccgcacctcctccacgctgtagcacgccttggcgccgtacttctggtggatcaccgccttgggcgtcaccgtcggcgccgccggcatccctcgcttcgatcccccgccgcctctcagccgcaacggcatcaaacgcccaaaaaaaacaaacaaaaacaaacaaacaaatgcgattggtaacgaaggggattttcgcaatcgatcgacgcaggaactgaggcggaatcgggagggggtggtcgccgaattgggggaggcgctaaaccccccagaaaaatcggaagcgaggcgaggaggattcgaggagtcgggtgaagtggggtttagggaagggaagcgagggggagtgtgtgaagggggagagaaggttttgatggcgctgcatccaataatacgccttcttgttaacgttagcggaaatgcagaatctctttcgagggtaaagtgtcccttgagaaaatctcgggcctatgtcccgtaaaaatcgattgttatattattttctgaaaaatacggtcgtttcactcgtatataaatatttaacgcatcaaagtttgaccaaactagctgggttttttaatatatgcatttgcataaaatttttaaataagataaatggtcaaacattttttaaaagttaattactaagaaaagagggagaacattttatttaaaaatttagtgcaaatatgtaaaaataaaagtcatactaaactaattttaataacaaaataggttaaaaaagtgatatttacataaatcttttgaataaggcaacggtcaaactatatggtctaaaactattgtgtcaaatggccgaagggagtaaaatgttaaacactactctatatttcacagttttttttttcaagtggtttttgcgaatgcagtatgcatatactcttgcttgattggattttacattaacgaaactgaactaacgtgagtttaagcaaaaccatggactgagatgctattgcctagttgcacatagaagttaataatgaaatactccctccattccaaaatataaggcataaccaccctaaccaaaagatcaagaaaataattattattattttgtagtttcgatcattctaataaatacaatgcatgcatccaataaaattagataacataaaagtagaggatttaaaaaaataataatttaatggagaagggatcacagttaattacctatatacatacatgttttatattatggaacataaattatgccttatattatggaatggagggagtactccgtagttctactttatagcgctgatgaataggttaagatcaaaacaaactacagatggtgggtcagtgggtgagaggagccatcaacactgccctgatctgttgcagatcaagagcatgtttagctctttaatactcttcagttcacaacagaggatcctaaacagcttggactctgtgtaaagttagctagaatcccaaatctttgagttcttccctccatgagcaattgagttcctaatttccagtagagatgcaaaaaatcaatcaagctggtttgctaataccatatgctaggcttaacataaaaaatgataacgaggcaacagaaatgaagcggtgaaatgaacatcaggatcattcgacagacgacaggatggtaaacttgactctatttctaatacaactgaacatccaatacatgtcaacaaggttgttcacaaatttcacctaaaaacacgaactaccatcttaattctccagtcaaaatttggctcggtatatgcaagctacattcagggaaccccagtcagcccactacactatggatgttgatgagatcagcagtcaggcttcagcagcaacacatttagggctctgcttcatcattcaatttttctttgcctgtatccttggttttcctcagacagcggccctcaaatagcacttcgtacagtagccttttactcccccatttccaccagaagggtcctgcccctcctgcatgcttccttttcatcttgtttacttcagtggctacacatcgcaaaaagagattatatcaaaaaacatataaatcactttactgcagaaaacaatggtaagcagaacagtagtcctcagatagtttctagtgcacataagagagaaaaactaatctaacagtacaaatcagaacaagatcaaatatcaagttatctagataaacaagacacaacataagaaagaacaagatcaaatattgtctactaacaattagaaatacatgttcttttcctttggttgtctacgcgtgtacccaaaatagtatagaaggtgttgtattttaatgcatgctgtaaatttcccttgattcctcccaaccacatcattcactcactgtattacttattacaatatcagcataaagagctgcagcgcagctataaatatcagcacaactgaaattcgtaagagctaacatggctagtctaacatgagatcactcaatcttctatctttttcagcagtggggaagtgggaagcaaattgggcaaagccaacctaagagaacgcagtagaacctttgcaagggaaggtgaactttagcgtccgtttattgttttgagtctaaaagaaaatctattctcaagtaattctcaccaaaaggaacagcgcaaaacctctttggtctcagtgagactacacctttactataaataggtctctggcaagctactgttgggaacaatatggcagatttgggacctcacaactatagccagctgcaggaagaaatggaaatcatcggttgtttaacatggaactcaaacaatattatgagaatagcatctccaccggaaaagataaatttagaatggtcagagctaaagttaaaagatcaagcatgatctttaagccttaactcagtaataaaatctaacccataatctagttatgtgaagaatcagaaagttagcaccattgccccccaaaccatgtggctattagtgtccaaaaactagcacagaagtcaagagtctgattattctaatccttgtatccacaataaataagctactgatcaatatcttaatatatctagtttaattagtggcaatgttgattgcacttttgtcactcactatatctggaaaaaaccgaccgctgcagtgccagaactgatgcaaaggatggaactaaaactggccaaaattgctgctggatactcaggacttgtaagacagtctgtatgccctcctctgatggttcagttgcatctgtatcataaacaggactatccccaagtaggacctgcaagtgtcaaatatcatcaagatgggtcaacgacagtatgtcaacattaaaaccataacaactctcagctgaaatgaataaagcagctgcccgtatttcgatatctgcattatatcatatacataaaatgctgaattgtctgcaaatacaataatgcagttaattgaataaaaatggttatataactgcagaatgccatccatcatgttagaattttatctgcctagcactaaaagaaagaaaatcaaaccagttgcaacatatgtgttccttgagcttttgatatccatagggagttaggcaacaaaaaataaattgaatccttgactaatgccacaaacagaattttcattcagagatattgggacaattgctgccaaggagagttacgatgctaacgcagttgatcatacatagcttagttccttacctccttatggtatttataaattccattgaacaagaatgagatgttactgtgaagaatgcataccttaacaacttcagtagctgatgaggatatagaccgaagattgtatctgcaccaaaggtaggcaagacgaaaaaacattgcataagtgttgatgtggtattctcaaatctcaactaaatatacttgcacaaaatttagttagctgatcaaaataaaaataaaaaattaagatttagtgcctacaaatccaaaaactctaagcaggatgctgtgtatattaggtccaagatgacagcctacaggtgatcatctcaagcggatcaaatttctaggcattgcctaccttttgaatatatatttatcttaaattgatagaacatctgggtacctaccctccctcaagtataaccaacaattttccctgtgaacaagcagttagcatggacgccatcctagaatatccagcaggtgtgacctattaattaaagaggaagttggtcaaaattatcagactcagactgacatggagtgcattgaaatatcaaacaggacaaaaaaggcacacagacaagaataaattagcaaacaaacacgaatagtatcgaagttgagggttgcatggatgatatagttcagtctaacttgtgagaacatcagcatagttatcatcttcatatttgactaagctctagtatttacaaacacatatgacaaaccaaacagaacagcaatgcatctcacaaccataccagtgtaccactgactcaatgagtgcatccctaaagaagcaactgtgtatgagcttgaatggcgtttcaatgtggtccaagaaaaagtccatacatgagttgtgcagttaaaattagcttctaaaggagcccaaataacatgtaattttcctatatgatgtcatatgaaaggttagcctaagtttcacaagaagaaaatcctctgcaaagtctgaacgttcatctctaagaagccagttaggaggtacaagcgtacaccagaaatctagaatcatcaaagatttctaaaatgatgcaaaaatggaagtggaaaaaaacaggttcatgatttagagacaacaatcatgtgttagtcttacgaacttacatcacaacaacccagagggtcacccctcgctgcatcaaatcctgcagatatgatggtgatgtctggagcaaattctgcagctgcattcatgaaagaaaattcattgaaacgagaacatgcaatagcaatatacaaaaacgcaagcgggtaatataaggtattaaggtaataatgtaatctacataacaaggtgcctgtgacccaagtactttaggcagacatgttttacccaaatgaatagacaccctgtttgggggagctggagcttctgggagaagctgcagctgctagaagctcccccaaacagggcataaacaggtttttgttccaatgtgtcaatatattttgtctgtgccctttctaacaaggatctaaagttctaaaatgctaagtctcacagaagacgaagcacaaaaaaaattcaaaggagtccgcgtgagctgctcttgactttacaaattaaagataggtatgttccgggggacatgtccggtgaaaaccatcaaataagtgaaaactcgtgaaaaccatatctaaaagttttgtaaattcatgaaaaaaatactagagataggtatagacatgaaatacattcataccaaatctcaactcatttgaaagaaacaaaatagacaaatttgaggtgaatagtaacagaacactattcacccgaaatttgtcttttttgtttctctcaaatgaagttgagtttggacttaaaatttggtatgaatgtatttcatgcctatacctatctctagtaattttttcatgaatttacaaaacttttaggcatggttttcatgggttttcacttatttgatggttttcactggatattccccatgtttacgttgagaaaatattgttattagcaactttaagttgactagcacatatgcaaatgcccctattcaattattacctatcggaagcaccacatgcttaaaagcaaatatgtagtcattgtctccaacaccaccacggctccaaggtatattgactgagaatccttggccatccataactcccacctgaagtgatgcccatgcaagaagttacaatataaaacgaatcatcttagaactcaagtttccacatgctaggtcagaaactctgataaaaagagtcatgcaatctgtcaaaggagatgccccaaatactccagattcggttagccagcatcagttggctcaaataggatgtagttcactagttcagagttcagatgtagtgttgtataaattatcttcaaatgttaaagaaaatcacctcatttgctgccccagttccagggtagaagcttccatcctcatgccgatgtaatgatatgtacaagacctgaaagaagaagaagaaaacttatccatgtaagaaataaggactcagggaaagaaggtcaattggtggccatgcatatggaagtatagtaaaggactgcaaagcaattagcaacacaaaaggaagatgataactcacagaattgtccccatcaaatatctcctgtgttccattgccatggtggacatcctgcaacaacaattgagcaccactgatgagatggattaacatccatttgaggcactatctttttttgggggggtccatgatgccaacagaatgcaatggtataagttcaaatgcaaacttgtaactagcattacccagtcaactattaagactttcttggcaccagctctttgtgcagctaatgcagccactgctgcattattgtgaagacaaaaacccatggcttgtttcacccctgcatgatggccaggaggtctcacctgctctccggtagacacagtcagtatcaacatgcaaagtatatcaaaataataactctcaggtgtctaggtgtactgtgcaaaaaagaggtcgagaattgcaaatataagatgatatgcacagtaccattgcaaatccattgcgaacacgcccagatactatcaagttagcaagatcagcacatatccctgctgcaagtttggcagcacatgctgagtgtccatttgcataggtatctgaagtgaagtaactacaaatcgatcccaaaatgacgttatgacaatgcaaatctttccagcaagactagaacacacaagcagcaaatataatgtcattagcatgcaattaattatactaaaacaaacagtacagtacaaaactaaagcaaggtaattacaagatggcttttaagtatggaataaacacagtacctgtaaagcatgttctttgtctgctcaacactgtcaatgtgatctgaagtatggacctagaagtaagcacgattttgaatgtgttaggattatcgaaaagattgtactaaggacaagtatactgggggaacatagggcagcaaaaataattaacatgccaaactcttacatacccttaggagttcttccttagtgatttctcgaggaggtaccatgacacattttgaagggaagatacctgagatattggaaatatgagttaaagtaaaacttgataagcagtggcatagcaaggctatttcatcaacccatttcaattaacatggttgacaaggaaacagttttgtggatttgctacagcacaaatcaactattttcagtgtcgattacttgattagctaccatatgtgtttttggaaaacattgtataaatctgctagagcacaagaagtaacaaattaaagtctttgctttcaacaagatcagatacaccttttagattagctatccactaccatatatacttttgggttacattgggcaacacggttgcaacagtaagcaatcatcaaaacatagacagtctttgctttcaacaagatcagatacaccttttagattagctatccactaccatatatacttttgggttacattgggcaacacggttgcaacagtaagcaatcatcaaaacatagacctagattaaatatttaaacaagatcagacaatcacaaaagtttgtagaggtattttttatcacagttgctttcactgaataactaaatagaaaagatatctcaaagttaatgatagagtacctgcagcagcaagactggcagcgattgcacgaaggcggtcaggcctttctggatgtggatttggtttaatctctatctgataacataggaaatgtgagatgtcagtccagaattacagtggctctgtgctgatagagaaaattaggaggccaaaaaaaggtactttcaaaataattttttttggttaaatgcaactagttttgagaaagaattattttaatctatgttcaaagagaatataattagattatattgtttagaagcagatacagaaacaagaaacacttcaatattgtcatgttatacgaaagcacagaaaaggaatatttatttgattccaaattagcaatgtaaatgagcttgcaattgcaggtttctgttttgttctccaatgggattgaacaaatatctctcagatgaaacaactcataagcaatcaaacaagaaggttcactgagcacactaaggagcaattaagatttatgcgaatccttgctattaaacaatgggagaaagagagaaaagcaatggccaattttgatgtaggatgtcagatccaaacatgtcatatggtgctagtttatacaacataatcggaagttcattgcttacctcactatggagcaacattctttcatcaaaaccgacagctgtagatactgatggcagcgctgcataaaatagtgagattgtgacaaattaagaagttgttggatacacataacatatgaacaaccgatgtaatgggacacattctgtgcttcaaactgcaagtgtaaagatagctacaagtgtaaagaagaacctaaaccctgagtaaagaatgtaaagaagcacctgcgtcagcagataacaaagctgcctgtgcaagatgagctttgaaagcatcatatccaactaccacagatcccttaagctcatcgcaattctagagtatgagaataaacatcaagaaaaccaaaatcaaaataatgtcactggatgatctgaactaaaatttctaagaaatcatacggcattcctgattacactgacaaagtaataacctttacctgacaatgtgtaaacccctccatgtttggcactgtacagttcaagcaaaaccacctgctcaaagcaaggcgagcagagggttcccagtcactgtcatcatcctcttcatcattaaaggaaaatagatcctccagtgtacccccaggctgttctttgtcagactcttgaagcagatcatcacaagccatacagctttcattcttgacatgcagacaaccatcatggcctgaactgtcaataagttccgaccttgctgtagaaactttggtcccatctactgataaaggattggcatggtcggaatttaaattgcatgctccagagttctctttcaaaattttctcatcattatgactcccgctcaacgaggaaactccatttgctttagcatgtgatggttttccatcattgccgcttttgcttttgctgtggcaagcttggtctgaaactccacaactctgtcccttttggctgttgagtgacctcatatcagacgccatcagagcatgcaacgcaatctgtaattgtgatacgacaagatcagcataggaaacacaagagtggataagaatttggacttccgacagggagccctaagaattattaatagctgattatcacatgccaaatctcagtagcattattgataatcgattactacatgccaaacctactcacgccttatccaaaaaaattgccgttacgcacaaaaccataagaaagcagttaatgcatcaacatagctagccgccaaattcaacatctcctcatgaagcgcatcgacaatcctagcactaacgctcgcagaggtactttctataaatggggatgcggcgaaatgcatctcctgaaactactgcataatctgctcaaaacccttccaaaacctcagcgctcttccatcgcatctactgattctgcagcgcaatatcagtaccaaaacctcaccgcaaacctcacctggttcttcttcctcgcatagattcctcagaacacaaaccctcccaaccccatccccccaacaccagaaacaacccaaccgcacgctacggctaccctcgcagcccggacggcaaagctaccacgaaatcaccggattgaacatccgggccgcgcaaaactcggatacaaacgattcaaccaaaccctaacccccaccatccaaaacctttttctcagaaaaaaaaaatcctacactccccgactagctctccccggaacggtgaaaccgcgggcgaaaatcgaagaatccgacgagaaatcgccgtggcgacctcgggggcggaggcggccgtacctggagggcgatcccggcggcggcggcgctcgcctctcgcgattggatttttggaggggcgcggcgcggccacgggatgactgtgaagagcggctcgtgcgcttcgtgctcggctcgagtgggtccgtctctacttgcctgccatttttgtcacataaaccctaaactgtcacaaaattctatttagatccctaacttgtcagtttctgaactgggccagaacacttagggatcttattgataataacgttaattttaggggccttattgaaaaagtttcgcctaacccaagtgcgggtccataggttggcgagcaaacgcacgcttatctctatctggcatgaacacgatgataggcccagctccgtctccggcagcggccgccgccgcagccgtgtcgccgtcgtgttacgcgtcgccggcggcttcgtccgtgcgaagacgcggcgtcgtcggcgtcgtccggtgcgcgccggatagcgggcgaggtggagacggcggcggcggcggcgggaaaggcaagctcagggtcgggtctcccatcgtcatcgtggaggcaccggtgatgctcaagaccgccgcgtcggtgccgtcgctcaggcacaacgccggccaggtcaaggccggcgacgtcgggaggtagaactacgattccatccgatgcttattgtgatatgctcttctatgcattggaatttggaagtataatttcggaccaccgcttcgtccctgcttgggcggctcggggtgcgaaacctagccgccggagcgagcctccggccaaccgtgaggcgagacgggatggcggcggcgagttgtctcgggcgcggaaaaggtcgtcacaaggaaatcgtggtgacggttggtcaaatactttggctgatcagccaaagctacctccaattctgccaaaattcaatgcaaattggttagcttattttgcttaaatggctgatcagcgaaagcatttgccatccgatggaagtaggaaatccaatgcagtagtagtgatttatttcttgaagcttgaaaataggaattttgggcgaatatcaagagagtttcacaaaaatttgaacaaaacgaagaacatgacacagaaattcaatgcttagtgatactccctccattttcaactcctaaatgacaacggtgactttgttatttaaactttgaccactaattgctcttaaatagttgaactaaagcgaacaaatgtttcatgattatgactaggacataacacattttaatactataacatctcttctagtgtttgcaaatatttttaaaaacgaatggtaaaagtttgaaagcgaatagtgtcagttgtcagttatttaaaaatgaatgtagtttttttttgtttttttaaacattgaaaataggaatttgcagcgaacattaagagaattccagagaaatttaaacaaaacgaagaacgttactacaggaatttgaattacactgacatccatgtgcaattgtgcatacgtcgagcagggtgatggcgcggaagccgaaggacgtctgggccgtgcggctcgccatcggaacctacctgttggacggcaagtatttcaagacactggacgtcgacgacgacgatactgcatcaccagatgagtgagctgcaaatgcagcagcattacagctacggcatagcatgcaagattgtttgttagacagaggcacagctgcaatgttgtaaaagatccaggaattcacaatttttgttgagactgatgggaccattgtttcacacataacccctggcgtggtagattgcacaggaaatctggtatgaagatgaatcaacctgcgcctaagggcaaacgaatctcaatctcatcatgttgttttgttaagcatacgtacaggggtaggagggaatcggagacacaactacacatattgcacaaacagggaaaaaaatatatcccacgatcttctttttccaagttacaatcaagcacccttcttccatggctggatgacggcgacgacaatgatcaccactatgatgagcaggaggatgatggcgtagcacatccacttcctggagttcttctggagcttcttcgcgttctgtagagcactgacgccttgttgtatgtggttggtagcatttgaaaccttgaagcagagaaaacgaaaataaggtgaattcttggtgatatacagtttgtcttgcttccaagaacatgtataacttggtgcaagagtgggcaattcttacatgtgtctctatgttgttgatcatgtctccttgagcatcaaccaaaactgccatatccatgaatatctacaaggcaaaaacaaggaatggagtaattaggcacattaactcgagctcacaagcatatggattaaatcagattagtaaataagtgcttatgtcaaaaaagtcacctgctgcaactccagaagcttcctctctagatctcttacagcatcgtgacgttcctgtatctctgcaacagtgtccagtatctggaaagacaaatatggttgagattttagtactgtgaacaggcagaaccgcaaaaatgtagttggtccccaaaaaggcattatcccatacagaaagaaatgcatatattggataacatacttggcctcttccctgctgttggatagcttcttggaaaatttgctcacttcttccagtctctattaaattgtcaactgtctacatagtacaaagcaacaacatgagaaatagtgtaaatcgaagatcatcagaccacagatcaaaattttcactgtaaagcaaaggcatgaagaaaacaaatttaaccaaaagtcagaactgcagagatcctgtcattgtatacctcttcatcaggacgactaccagttactgtaaacacccttctttcaacgacatcacgatactcctgccggattgcttctctcaaaacctacatcagagggtaaaggggcattactcacaagtcaccactttaggggcattgcactagtcctagcaggtgttcatagtgactaagaattgaatcatagcagcagagacagctgatgaaagtacaaaccataacatatttcaccaatgtatttttttcctttttacttcaagtagatacaggtatcagtatagacacccactactcatgaaatgctatacaataaatcttatacttggatagcttctagcaatggaaaaacaatgtgttttttctctgctgctcaaagaagcatgtctaacagaccgagaaaatgaaatatggcagtagtttaactgtgtaatgatcgttgacggaatagcagaatcaccccataaatggcaagttaggtgttccagataaggaaactcagtacctgaaaatcatccatgcgctccttcaatttctttttcactgctctgtagaatttagcaagcatagtggatgaacaactattcatggctttatgcactctacagaaccaggaaaaaaaaacaaatcgccagtaaatttacccagtagtctgttctcttgatcgatctaccgcagatcctttcccacatccaggcttttgtctgtttgataagttctgtttcacatggcagcgaacagtgagagacaactcaatgttgctattgacaaatgacactagcacgtgagatggcttagtgaaaagtatagcaaatcctacaatttgttttaggggcactactaaatcataaccttgtgatacaagttgcagagaatgctcttatgaaaatataatgcatacgttggatagacatggtcaatttgttacttactgcagtgctatatgactgttgatgatttatatatattgtatatagagtgcagacacatgaaataaaaacagaatattacgcagatatggcaaattaatacaatgccattagctagcagggccaagtgacatacatctttttccaattcatcaacttttgtctttgccatgcgagcgattttccccacttcatcaatatctttctccatcctctgtttaattgctatggaaaaataattgttgcatcaacaataggtaaagtgggttatcaaaagtgtacaagaactttttagacaaggttaaatatactaaactaagtactcacctttcatgtcccttgcttttgtaaccgctttagattcctcatttgcagtctacaagcaaaagtaaggtgtatatgaaaattcaagatgctaaatgaattcatcaaaacttagacacaacattatatttctggtactacgaaaatcaatatcatcagaacaagacaaggaccagaaacagaaagaaatgaatggaagtgtgagataaataaacct

SEQ ID NO: 6202 - DNA, 34278 bp, Oryza sativa
cggcgtcatctattaaaaaacggaggtagtacatgatttgataatgtggtgctacagtaaacatttgctaatgacagattaattaggcttaataaatttgtcccgtagtttataggcggaatctttaatttgttttgttattagtctacatttaatacttcaaatgtgtgtccgtatatccgatatgacacgtaaaaacttttcacccctggatctaaacagggcttaagtttatataggacaatgtgtgtatagcgtctgaattcaaatgaggactcagaagatttgatgtagctagctgacatagttcagacttcagagggtcctaactgtgaaacaaattacagagcacttacttctctagattccaatcaagccaaatcttgatcttattatctaatttaattaattaactgcagctaatccaatctaatagtagaacctattcaacttaggaatcaagaatcatggtacaagcagatgcgaaaggtttaccttgggtctcttggggaggaggcgggaggtcccctgccgccgccggcggcggcgagggaggctgtgcgccttcgacggggacggcggagttgcgccgtgctgacgtgctcgccggagtggtcgcggtgccacagggggggggggggggggcgttttaacgggctctcgttgacacacggagtacctaaatcctaatatgatacgaaaaatcagaaattagcctagaacctgctttatctgaatttcagcacgttgcataaggtaaggaaaagccaaaacttttccaaaaaagaagcaccaaataatctaactctaatctaatactccctccgttccttaaatatttgacgccgttgactttttaaaatatatttgaccgttcgtcttattcaaaaaatttaagtaattattaattattttcctatcatttgattcgttgttaaatttacttttatgtatacatatagttttacatatttcacaaaagtttttgaataagacgaacgggcaaacatgtttaaaaaaatcaacggcgtcaaatatttagagatggagggagtataatctggagtatctatctattactccctccaattcatattataagtcgtttaactttttttttctaatcaaatttctttaaatttgatcaaatttatataaaaatatagtagtattttcaatgcaattcaaacatattatgaaactatatttaaatttagtgtttcatattttagatattgttaacttttttatataaacttgatcaaacttagcaaagctttactagataaaatgtcaaacaatttatagtatgaaacggaggtagtatatgttatcgccaccgatgtggtcatcctccgtagagctgcagcttcgcctcctccaaaaggccatgttctcaagtgtttgatgaaattaaggccctgtttgtgggagtttgtcccagctgcagcttttcccaaaagctgcttctgctagaaactgccccaaacagtccacaacttttgttcttaaaaatgaactaagaagccaaagctggagaagctgggttttaaagcttttcagattctcagaagctggctatcaaacagctgcttctcagaatctaaagcttcctcaaacaggccctaagtctagggatgccacaaaatttttgacaaatttttatgagctttggctgcttgtgttacctttgttttttactcctcaggttcacgtccgatagttctcttttggaagtttttccccttactgccagttgacacttgacagtcactagctacatggattatgctaatcacacaatgttcgagttcttggttgcaaccagctagacaagaaggacgggtccctctgtattttcttcattgaagagtttttaagatcactgcaggtcccatttttacctgatgatatgtgaggatgaaaagaattcctgtctagaatagtggtggttggagtgttggacatgttaactagtgtcacttaattaaattcgagaaaattttgaattaagagaaaacaatagagaggataacataacaataatctggtgaaatttgaatgctacagctagaccaacattggtggcgatttcttttttttttgttacaaatgaattcaaacaggcacctgctccacctttatgaaattatgataaactctgcaaatgccttggttattcttcctgtgtgggttttctcctgtccaatgttgtgtgcaaatactcctactgtatcacaaggaatttcacaaagtttacctgctgtattattttaaagttgggaaaggcccgggatctttctagctagcaatgcaagctgcgagctagctggtccgggttcaagactcaccccctccttaatttaaaatcaatatagtccttcctatattggtctttttttttcaatcacattggaaattgtgaatctatacaaatacgtgtaccgtgactccgtgagatgagttgaatccgaaggactatgaactacccaaactcagatatctactactgtaacagtctgctcattacgagctcagatgtacttgactactcctaattaaacctttacctcaaagtcgaaccactgtttcatcagtatatcatcctgtagtccgaagcgtaattaaccagccccaagatctgtcttgttctgctcagcgttagcctcgagctcatcgagttgatctttcagcttctgcccccatctcctcttgcggctgcttctttatcttgagcgcatccaggttgagctgccagaaggctcgatcgttgtgctttctcatcatcagccttctgcgccttggtcagcttgtcagatttcatgggaagacctccgagatgatacggtgcgattggcatgtcgccctgcgattcaaacatggaatggaatagcattttgtggaatcaaacaccaagcacaacaaccacactggggctcctcgatcgaacagtcgaactcgaaaaacttgtatacataggctaaatgaatacagcgtaaaaaacgtggttaacaagctgacggtaagaaaaattaaccaggatcctggatgcgagcgcagttgtcgcacggtgtgccgccgcgccaactcatctaataccacttatagaggctcactcttagagatggggcaatgggaaattcaccgacgggaaatacatcgtccctatgttgaaattataagcacgtaatgatttaagttattccataaataaatcatgacattatatatgtaaactagattgaacgcatcattagatctacacatgtaaactaagcagtaaaatatgaacagatcaaatatgcgcaaaatgtcgaacacgtaccgaggtggcggaaagaccggttgctcggcaggaactactcgcggttgcgagcgtcgacgaaggcgcgaagcacgcgagcggagaggaaggcgagccgtcgcggacgaacagagagctgtcgcgcgaagcgcttcccaagaaccttattgccgccttctcccggtgcaggacgtcgaaggcagaggttccggagacctgctctcccgatcgccggtgcacgccggcgagcgggatggagtagtctacgagtgacggcgcagtacagagtaggaggcaaaccctagattgatttcgcgtgtgttgcgtgaagacggcggctcggtttatatagagatagatcgcctgatcagggcgcccgcgtaaaccgaaccggataagtcgcgcgtaacctatccggactccatgccgttttcacgtaccggatttttcggaatgtttccaaaacaaaacaaatccgaatttcccgcagcaaaacaaaactgcaaaagactccatgccgttttcatgtaccggatttttcggaatgtttccaaaacaaaacaaatccgaatttcccgcagcaaaacaaaactgcaaaaggaggctgcatctgcgcaagggtgaggagccaattttgtagaccattcgacgcgtacgtcgtgcacgcgcgccgcctgccctgccaggcgaggcgaggcgagcgcgcgcgcgtgtttcccctcttctcttcaccacacatgcttcaagtggctaggagagcatcctcccttttaaggaggtccccctctcctagaataagcaatgtggtactaaactccacatgcataccatcccatgaggtgggcttttgtgattttccaaagaattaatcttcaaatgggccttagcccatctattaattccaacaatcccctaccaaatctcaaaatcccactgagatttgccttttccaatgtactgtttatataccaacggctcgatagagaccgattaaggttgaacatctatctagaactccaagctacacttactcacaacttgaacaatggactacggcttggattgcaagtcttgtgcaagcaagtttcactcagagtcttatctggtattagaccgtctgtagactacccctcgggtggagcgtataagttatactcctaggtctttagtaagcttcctagaagattcacccaaaatctccatagactgcgaccaacggtcaagcttacaaaggtgagttctttcaagaatgctctgcaggacagcgtcttcgctaattaaagccaacagaactcattaaggcatagccaacctgccttgcagctcacgagagtacatgcatcttcacttagggagggtatagattggtactctcctctagtttactaatggtttgttcttcacaggttctaattcacgggatctccgatcacatagactgagttaccaccatagtataactcacacgggtctcaaacccatctccttcgatgcattatctatcacatttcgtgataatcccttcgtgaagggatctgccaggtttctagctatttggatgtaatccaacgttataactccggagtttctcaatttcctgacagacttcaatcgtcttttcacatgtctaaacgatttcatattatccttagaactattcactttgacaattaccgtttgattgtcacagttcataaggatagccgacaccggttttcaacaataggcagatccattaatagatcatgcagccattctgcctcaacagtagcagtatccagtgccgtcaattttgcttccatggttgacctcgtcaaaatggtttatttgcaagacctccacaaaacagcaccaccacccagtgtgaagacatatccactagtggctttgatctcatccacatcagagatctagttagaatcactataaccctccagtaccgcaggatacccagtatagtgaagccccaatttcatagtacctttcagatagcgcattactcgctcaagcgcacgccagtgatcatctcccggattagaggtaaatcggctcaacttgctcacagcaaaggagatatcaggcttagttgcattagccaggtacatcagcgagccaatgatttgggagtattctagttgattcctagcaattcttttgttcttgcgaagcaacaagttaggatcataaggtgttggagaaggcttactatcaatgtagccaaagcgattcaagatcttctccacataatgggactgcaagagtgtaatctcattttcacctctaattagcttaatgtttaagataacatcagctactcccaaatccttcatatcaaaattttgagacaataatgatttaacctcatttatcacctcaaggtttgtcccaaatatcagtatgtcatcaacatccaagtacagaataactccctcacccccaccatggcgatagtacacacatttatttgcctcattgactgcaaagcctgcagatgtcaatgttttgtcaaatttctcatgccactgcttaggagcttgtttaagaccatacaaagacttcaacaatttgcacactttgccttcttgaccttcaactacaaacccatcaggttgatccatatagatctcctcatccagctctccattaagaaaagttgtcttaacgtacatttgatgaacgagaagaccatatgaggctgctagggaaagtagcacacaaattgtggtcaatctagcaacaggtgagtaagtgtcaaagaaatcttcgccttctttctgagtatagcccttagcaacaagccaagccttatacttttcaatagtaccgtcaggcctaagcttcttcttgaacacccacttgcaccccacaggtttacacccatagggtcgctctgtcacctcccaagtcccgttagcgataatggaatccatttcactacggacagcctctttccagtagtctgcatcaggagatgcatatgcttctaaaattgacttaggagtgtcatccacgaggtacacagtgaaatcatcaccaaaggacttagccgtcctttgtctcttactccttaaaggagcttcactgacatcctcctcagagacatgttcatgtgtatgtttagtttgttccggtggtgtgattgaactggaaattatttcagagggttggctcgaaccactatgtgtatccttcattgggaaaaagctctcaaagaaggtagcatcatgagactccataattgtaccaacatgcatgtcaggtacctaggatttaactattaaaaatctataggcaatgctatgatgagcatatcccagaaatacacagtccacagttttaggtccaagtttgcgcttcttcgttattggtacattgactttcgccaagcacccccatgtgcgcaaataagaaagtgatggttttctctcaatccatatctcatatggtgttttgtccttatttctgttaggaactctgtttaacacatgattcgagataaacaatgcctccccccaccatgccgtaggtagtcccgcggtgtccaacatggcattcaccaagtcagtcagtgtgcggttcttcctttcagcaatcccattagactcgggagaatagggaggcgtcctctcatgtatgatgccatgttcctcacagaataagtcaaactcgttcgagaaaaactctccaccacaatcagacctaagcctttttatctttctgtcaagttgattttcaacttctgccttataaattttaaaatagtctagaacctcgtctttcgttttcaacaagtacacatatctagtagcatcatcaatcaacgtcatgaaatatcgttttccacccttcgtcaacaccccattcatttcacaaagatctgaatgtaggagttctagtggtgccaagtttctctccttggcagccttgtgaggcttgcgaggttgcttcgattgcacacaactatggcacttagaacctttgacaatggaaaacttaggaattaaacacatgctggaaagccgagacatcaagccaaaattaatatgacataaacgtgagtgccaatcattagcctcatcatccacactgccacaaatatggttcacagacttattgcagaaatcagaaagggaaaagcggaacatgcctccgcactcataacctttaccaataaaatatccatgtttagacacgactaatttattagactcaaaaaccaacttaaatccgtctctagtcagacgggagccactaataagattcctgtcgatagaagggacatgctgcacgttcttcagctgcacgatctttcccgaagtaaacttcagatctaccgtgccaacaccatgagcagaagcatgtgacccattccccattaggacggtggaaccccgtgcgacctgataagaagaaaacaatgagatgtcgcacaaacatgtacattggttccagtatcaacccaccaattagtagactgattaactgaaaaaacagtaggtaaattaccatacccgcttccatctccagtgttgccaatggtcacattagcagacttagaagtctgccctgcaggtgccttcatccccttgcgccgtggaaacttcctagccagataaccaggttgcccacacacaaagcaagtcctctcatcctggttaggattgttgttgttcttcttctgcttcttgaagttggtggtctgttgagttttgtatttctccttgctcttgttctgggccttgtgcacaacattggcactggactgcccaccatcgcccttagacgcggcgtctttttcccgagctttctcctcaacatcaagagacgctatcaacccctcaacggagtattcatgtctcttgtgtttgagtgccgtaccgaaacttctccacgatggaggtagtttcgcaataatgcacccggccacaaatttgtcaggtaagacacacttaaggagttcgagtttcttagccatggtttgtatctcatgagcctgttcgactacagaacggttgtcagccatcttgtagtcatgaaactgctctatgatatacagatcattgctagcatcagtagcaccaaatttagtatttagtgcatcccacaactccttaacgtcgatcatatgcatatacacctcgaccagacgatcgccaagaacgctaagaatgcatctcacaaagagagtagtggcttcctcgaattgcttctgctgatcagcagtaagaattcctttaggtttgccagtactcacccagaagcatttcatagccgtcagccatagagtgaccttaatctgccatctcttaaagtgcacaccggtgaatttatccggcctcagtgcatcggcaaaaccagccatagtaaaatcacaacgcctataataaggtttttggattgttgaaattataagcacataatgatttaatttattccataaataaatcatgacattgcagatgtaaactagattgaacgcatcattagatctacacatgtaaactaagcagtaaaatatgaacagatcaaatatgcgcaaaatgtcgaacacgtaccgaggtggcggaaagaccggttgctcggcaggaactactcgcggttgcgagcgtcgacgaaggcgcgaagcacgcgagcggagaggaaggcgagccgtcgcggacgaacagggagcagtcgcgcgaagcgcttcccaaaaaccttattgccgccttctcccaatgcagtacgtcgaaggcagaggttccagagacctgctctcccgatcgccggtgcacgccggcgagcgggatggagtagtctacgagcgacggcgcagtacagagtaggaggcaaaccctagattgatttcgcgtgtgttgcgtgaagacggcggcttggtttatatagagatagatcgcctgatcagggcgcccgcgtaaaccgaaccggataagtcacgcgtaacctatccggactccatgccgttttcacgtaccggattttttggaatgtttccaaaacaaaacaaatccgaatttcccgtagcaaaacaaaactgcaaaaggagtctgcatctgcgcaagggtgaggagccaattttgcggaccattcgacacgtacgtcgtgcacgcacgccgcccgccctgctaggcgagacgagcgcgtgtgtgtttcccctcttctctccaccacacatgcttcaaatggctaggagggcatcctcccttttaaggaggtcccctctcctagaataagtaatgtggtactaaactccacatgcatgccatcccatgaggtgggcttttgtgattttctaaagaattaatcttcgaatgggccttagcccatctattaattccaacaccctatccccgtccccgcgagatacggcaggggaattttggttcccatccctatcctcacacggggaattaatccctgcagggtcttcatcctcgcttaaaacaatatatacaatattaaagcatatatacaatgtatccagacggagatatgtctcttcccatttagttccgtatggagaaccaattctaacaattcctatttcctaaaaggtgaatttcccatgatgagacggggaacggagccgttgcaatctctactcactctaaagaggtagagtgttttaaaatctgttaagagagtacaggggactgctgacaaaacaaaccaccgcaaccttatttagtattaggctcatagcatttggagcccctcattgctcctcgagattggaaccagcactttggtcgttgcttgaacttgctgggcattctgtgcattttgaactttggcagggccgccttggtaccacgtacgaatatatagtgcacaatgaaaaaagtcccgcaaaatacccggtattaattatgttaaggagcaatctaaaatctgccaaatcgctgttgaacagaaaacaaaatcagtaatgtttctacaaattcaatttacatatagccacatcttaatattatctgaccaatttgtgtagtttaagaaggcaaaacaatgacaattttatttcaacagtttgtctagtgaaatgttccaggttcaagagggtaaatttatatacagggtctaaaaaaacacaaacacaactgattctttttatgttccaagtagacaattcacaattagttggtttagggcctatttagatcgcatggtaaaatttttcaccctgtcacattaaatgtttggatacatgcattgagtattaaatatagtaaaaaaactaattacatagattgcgtgtaaattgcgagatgattattttaagtctaattgctccatgatctgacaatatggtgctatagtaataatttgctaatgacaaattaattagggttaataaatgtgtctcgcagtttacagatagaatctgtaatttattttgttattagtctacgtttaatacttcaaatgtgtatccgtatattcgatgtgacacgccaaaacttttcacccctgacctaaacacaaccttattattatctctgctgcaagtgaatatgataatatagattcatttcgtgttcaggtcaaacttgattcagcaagtttctacattttacattttgcagttctctacattttaaatgtggtgcacctttctacattttgccgtttctcagtgatggatgatgcgacatgatccgatgtagatacaaaggagagaaaatagtgctgctacttactcacggacaattggggtgagtcggtccttgacagttgtactgtataaagcggttgtgttggcatctctagcacaacccaggggcttgatcaagtgattggtgtgatcaacagagggcagcccagtggttgggcagtttattttaagcttggggtgagcacttggaaaggtgttgaagttcctcgatgcctgcattaggtgggataaaaaatcaggacggtcaattgaggcaagtatattctttgcaagtatatgaaatattatactattatataattttttggcgttatttagcactccatccattctaaaatataagaacataaaatcagataagatatttctgtccagatttatagtactggaaaatgtatcatctgatactaaattcttatgttttcggacggaggaagtagtaacaaaaatgtaatggtactgtcatcttgccacattacgaattagcgtcataaactctttataactaactacttatatattcaatttcattgtctaataaaaaaacaatactcaattgaatggacggatgggcgtgtggtgcacgaacctcagcggttctagggaagaggcttcttgttgatttagaagacagatgggaggccaatttaggaaacacgaaacggccggccatgtcgacgacgtacggctatcgatctaatcttcaaaaccagacgcacggacagattggattgaggccctccctgccgcgccgcctgctcatataaaagagggggccaaacacgggagacactggaaaacctattccgttccaagattggaacaactcggaatacatgtccgattccgaatgataatcattaggaaaacaaaaataaataaatccaggatagtagagaatatcagagaccatctagcccatactaataatcttgttaaaaaatatgtaataagtccccgaaaataaaaaaggcattgtcattagcaactactaattacgaacatcggtgaagccagctctaaggctggttaggtattgcctaggctctacatctccattgtgtattggcgtgagaaatatcaggagtcttctggctagcttcacaaggtggtgagctagacgatctgggttcgaaaccttaccccttctaattatttgatattaggtcattccctaatattcacgtcttttcatcgtgtattggcgtaaatactcatcaaatatcgtcaatgatcgagaaatgctctttaattaatcagcatgttttggcaacatcaatcataagaaggaaacatatcctatacatataagcttcccgtgcacacaaactaacaaatgtcacaaaatattctaaaaaaaattgaacatttactcctaatagtattacacatatatgtaaagtctcatattcaaatttattatatttagcagtaaaaaacatgaaaaatctaacagttttgagggtaaaaatctattatgattttgtctttttttttacggctaaaagataaaatttcatatgtaggtgtatgtcttttttttttttgtcttttttcacagtttgggctttgctcgaagcgagctacggataatcggttcgtttggtttttaagctgagccaagcccgagctctttgtccacccctacccgtgcgcgagttcggttcctagcgcgtatgcgcgaaataggagtagcattcctgcgtggggttcgtcaccctcccgcgttatccatcctcttccaaacccaaaccccacgagctcccctcctcccctggactggatagcaatctagggttttatcccgagcccgcgcgccgctccaatggcgctcgcgggcgcctcctcgtcggcctgcctccgccgcctcaacccgctcctcttctccgcccaccgccgccccgcgtggaccccgcgccgcgccgcccgcaggttctgcgcaggtaccggccgtcttctgcttctactgccctttgtttggtccgtttggttggtgttgattcggtgaaggggttggttccgttgcagctgcagttgcctcggagagagatgtgttcacctccccggaggtcgccaagtcgttcgacttcaccaatgaggagcggatttataagtggtaagctagcatttctaccagttatccactatttccccattttcatgaggtaatggaactatggctgagatgattttcccagtaattaatttgtcaatcttaaacgtgtgttaccttacattggacactcaccagtaagttaatttgtgatactcatgatacagcgagcagtttagtgccatttttccttgcagttttagactgttcgggtgattttatggtattttttgatatagcttcaaccattagattggcaattgtatctggatgagcaaaattctccttacactcccatgtagttgtgccctgtagtatttgagaagtaagcttctcacaatgcttctacttaatgcctttaagctaaacaatttcaatttccagaactaaaagtgagttccagtaacagaaaagggtatgctataacaagctttctcgcaattgattttctattatccatgttagacttgatcacttactagtgagttagtgacctgcctttgagcattgcctaatgtcaatgcaaggtttagcattacgaccgtatcaagattgaccgattaatactcttattacttgactcaaatattgtgtttttagtagattaatactcttattacttgactcagctattgtgtcgtcagttttttactgaaatagcattctaaatgcaaagtacaactctaggatctaggttgaagatagtctgtataaaggtatcatgatttggtccagttccatttttctaaagtgtgtgtgtgtgtgtgtatatatgctgttgcattagattacattgatatgattgtttacctgctctagttgacacataaaaatgtaaaaactgatgaattgcatttaacatatttaagtcaacaggtctagttttattttgctacttgctttgtttgcctgtttcacttcaagttcatgaagaaatgcacttcggtattttctggtcctacaataaattttccttataacatatatgttgtatctttgtaggtgggagtctcaaggattctttaagcctaactttgatcgtggaggagatccatttgtcatcccaatgccaccaccgaatgttaccggatcgctgcatatgggccatgctatgtttgtcacccttgaggtaggtatgatgattgaaaatttaagatttttttcctcttgttgaataactatagattgattatttctttactagcagatcataattgagtacatttcatgatttatacgttcactttgttgaatcatgacatatgagtttcatcttttttacccatttgaagtgatttgcatgttaacatgagcataagctgctatggatgtacttaccaaggtgaatctgtttcttaaagacaagaacatcatttttttaatcacactagcaatttagttctcttgcactggacccatgaaactgtgccatggatggtaaactgaatagtacttgcaattgctatattaagcagaagtgttggacagcatctgataatatccagaggttctgtgaactgacatgtttcagttaaactagcttattttgtggtctgaattcgtagatagttattggtgacagcactatgttgataatgagttatttttgtccccccccccccccattttttaggcactgtaatctttttactactaaattgtccctttttgtgtaagtactcaggatataatggtaaggtatttccgtatgaaaggaaggcctgcactttggttgcctggtactgaccatgcagggattgccactcaggtttgtagatcttactgcacatctgatatgaaatgataaattctattttgtgttcagcatgactttgtgaagtgatgggctgatttttatttactttttttttgcatttacattttagttggttgtggaaaagatgttagctgctgaaggaatcaaaagaacagatctgacccgagaggagttcactaaaagagtttgggagtggaaagaaaagtcagccctttttctgaagctagatcaatttttcttcattgtttctttatgcacctgtaattgctatatttgtttttctaatatgaagtgatcattgctaatagttacttggatttactattaaccatatatacccttgctcctacctccatttttttacgtgtttgccatgaaggctcatgtgcattacagtttattaactatcttctggtatcattatcgtgttgggtggtacctgtcataataatttgatcatctagatgaccagccttttgttattattctgaattgccagttaaactatcatgaacttgggatggaataataaatattctagttgataaaaaaaatcatgattcaagaaggttacatattttataaattctagcaatcactccaaatgatgtttcctttccaggtacgggagcactatcactaatcagattaagcgattgggtgcatcttgtgattggagtcgtgagcgtttcactcttgatgaacaattaagtcgtaagtgtagcctttattttccattgcaaatgatgcaatttgcatttgttagtatatgtatcattatagtgatggtagtcggtcgatcaacccctcaacctcaagcttatcatcagcgcttggtggtttgtacaactgatgtctcactagtttttttctttctacttacaggtgcagttattgaagcatttgttaggcttcatgaaaaagggcttatatatcaaggtaattaatataatcatttactcgctctattacaaaggaagcaaatgtgcataatcttgtgctgatattatgtgtgatagttttcagtttttaatcttttccctatgttttttctgtcagtgtaacctaattttcttggttgtagtttcaaattgactatgttaacatatttagtgttgatagatttagtactaactgattttttttttaaaaaaattcagtgtcaatagtttgaacagtagtgagaggtacaagaagttggggcatgtggtaataactttattttctatgtaatgtattatcactttatcagttacagcacaagtttcagaagtttcccagggtcctatttggaacaaactttaaacttttagccccaaactatatcaagtgcatccgtttattttgctgataggataggtctgtggtgtaatgtacatcataaatttttgaatcagaattataggatttgttggctctgagcttttttgttgcttactggagactaagttctcttatgactggaatttacaagcagagaggagcggcagcaagatttactaaaattatgtcccaagcaatttgttacttccatcgctagtatcaagatgccttttgccgtacgtttttaatatgttctggtacacacttgggtgtgttcatgtccatgatgcccgtgcttgttatggcattttctattgtgatagttgcgtcgttgaacagaaatttaggattttttcttcattcaattcttgtgtttttcctgaatttgagagtctagttttgccttatgtgaccttgatggtaaatattggttaatttattgtattttcgttcacaggatcttacttggtcaactggtctccaaacctacagactgcagtatctgatttagtatgttacaatattacctctcattttttaagaaatagctgcacacttctatctgtgcagatatataatctaagcaaaaaataaaaaataaaacttgagaataattacatacagaagctgacaaacttcaattacttcttcatggatagttgcatgagccaactccagatttgatcctgaaatggtttatctaaccaggaagtggaatactctgaagaacctggtaatttgtacttcatcaagtaccgtgtggcaggtggatcaaggtacttcttgacttatctttaatcttgtggctatatgttttatcattattcattttttaatcgatggtgatgttatcattgtccatttttgtgatgtttaaatgtgaatgagtttggatgatgcgcgctataaagtttatgttttgcattctattacaaggaatctaacagcatggtcgacactgtatgttgatgaaaattacttatatgtatttaaaacttaagcctctggtgcagggatgattttatgactattgcaacaacacggcctgagactctctttggcgatgttgcaattgctgtaaacccagaggtatcagaaaaagaaagcattccttgtgtcctgttacaacttacttcccccatcccaaaatatagcaacttctagcattcaaaagttgtcctaaaatcaaaatgtagcaacttctccacctactccctcctctcaaccaaccacaaccatcctccatttaatatcgccacctagtattcttaatctctgcacaaaacctaaaaaagccttatattttgggacgaagggactgcatcaaattgttctatttctcgaactgatttatttgaacaaccaatcttattttctttgttaaatgcaatgcaggatgaacgttatgcaaaatatgtgggcaaattggctattgttcccttgacatttgggagacatgttcctattattgctgaccgggtaggaattaatattacctgtaatatttgtatgattctaataaccaagaaagtatgttgcaacacggatcaaagtaaagcaattcaacagtaccgtattcactagatgttggcgttctcttatctttattgtgttgtcccaatggcacatctacatgcaaatgtgatgccatcgcttgtcagttcaagtcagaactcaggaaagctgttgtttctgttgaggcaaacttcactgttggcactgtttttggggctaaaatgccaacgttttgcttgctgagctgacgaaagcttttgcttgacgaatagccatacatacaaaagatgtgcattctttgtataagggcttcacacttgtatgccctcgtttgtggtttgatcttaaacatactttgtatgacttcatgtgtatctcccctggctcaagaatctcacttaatgataggcatgcattaggttgcaaacccggtttataaagaaaggtgttcttttatataatcgatagacttcgattatcccttttaacaatatatcggttttatgatctacagtatgttgatccagaatttggaacaggggtgctgaagattagccctggacatgatcataacgattatcatattgcacgaaaacttgggttgccaattctcaatgttatgaacaaagatggtacactaaatgatgttgctggattatacaggtattaattttcgttcaaacttcaatttaagtaacctgttcacttatttccctttgaatttgtttagacttgcaattttcaatgtttggtttctctgttctattccatgttgcatcataactactatctagggactgtagtttgtgctgcttataaacccatgtatcctctttgcaacacgaccagtatttatcttctattataacatggaaatttgagtatagtaaaattgctgttggaaaatttaagagattctgtggcttttagccttcacaatcagtggaaacagaaaacagtcaattcgacctcaattatttcatatcgaagagaatgtacaatatttgttcgattatacttgctccgcaggcaacacagctgcagagccctctgtatttgacatgttcttgaccttgactttgctatctttattcagtggcatggatcgttttgaggcacgggagaagttgtggtctgaccttgttgagactaacttggcagtaaagaaggaaccctatacacttcgagttcctagatctcaacggggtggtgaagtgtgatcttttctcctgtacctgctcatacatgtaggctaacgatgcttaccataaagattaatgaacttaacttttgtgtgtcactaggtaatagagccattgattagtaaacagtggtttgtcactatggatccattagctgaaaaggcccttcatgctgttgaaaaagggcaactaactattcttccagagagatttgaaaaggtaatacattaatcattagcttttctatgcaccaatcttctgctcactagtaagcacacataaaacatgtctaaagtttttattggaactgctaagcaggaatctgtctctgtattcccactttctcagtaaaactatgcatatgccaaataaagagttaatatctctggttatatcttactcctgtaaaaatgatttctttgaactgactttgctgctctccaataatttatttgtgctgctgctgcagatatataatcattggttgacaaacataaaggattggtgtattagtaggcaactgtggtggggtcatcggatccctgtttggtacatcgttggaaagaaatgtgaggaagactatattgttgctagaagtgcagaggaggcacttgcaaaggctcaggaaaaatatggaaaatcagttgaaatatatcaagatcctgatgttcttgacacttggttctcaaggtttgtcttccatctgtaaagctgtatgctcgtaatgacttagcatacatgtattttcctctccttgtccgcttcctgaagtttttttttgttttgctttgttcataacatgggcctaaaatagcttttacaacttgcattgtagagcagaaatgtgtttattaagatgtctgaataggttttagccatctccttgtattatttttcatgtacaacagtaagatgaatagttaatggagctcctatactgcagtattctttttcccttacagtttctgattggcatctgggatatctgtatgaaccttatttccatgtgctgtaccatgtagaagtataaacactttcagacacaaatcgctacaggtattaagaaaactgcatatagttttttgttgttttgacttgttgcagttgtcctgcagtgctctgtggcctttcagtacacttggttggccagacctatccagtgaggattttaagcacttttatcctgcaactgttcttgagactgggtatgttatcttcagcaacaactttatttaccttctgatctttcagtccagcgataatactgttgcgctgctctttatgttgattatttatttttccatttacctccattatattatagctttctctctctttttttttttggcagccatgacattttgttcttctgggttgcacgaatggtcatgatgggaattgagtttacaggaactgtgccattttcttatgtttatcttcatggtctcatccgggactctgaggtgagagaggagcaccttaatcactagttcctgttctgtacttttgagggagagtcgattaaacaaacttttcttgtagttgtaaaatgacatgattgaacttctaaagggcatcaaccattaaaggctcataacttggaaattttgttttcttttgagccgggattgaaccctctcagatcaaacattgcacctgattggggtctcatgctttatgtgctaattgactgtatgatgctctagtgcagctagtcacatactgcacattacctcaaatttgaagtcactgcctccttttatctgatataaaagtggtatcaccagttaaactgttaaatgagcccattgtgaaatctgttttgtacccttagtcatcgtgttcatctgagttgtttctgttgccatattagctctctgtttccatggactaattagcaagttaattttcagggacgaaaaatgtctaagacactggggaatgtcattgaccctctagataccatcaaagagtacgggacagatgcattgagatttacactttccatgggtaccgcaggccaggtttgcttatacagtcgcttttgtatttatcaagattgtttgattttgtgctgttaataccctttttgcttcaggaccttaatctctctacagaaagattgacatcaaacaaggctttcaccaacaaactctggaatgcaggcaaatttttgttgcagaatttgcctgatagaagtgatgccactgcatgggatgtcttgttagcaaataaggtatctgattgaatttcgaattgcacttgatgcattgacataatttagttctttttagaactgttgctaacaccttgcatctattgcccagtttgatacagaagcgtcacttcagaaactaccactgccagaatcctgggtggtgagtcagagtacattactatctcgaattatttgattaatgttcagtttgttaatgaagagaatacactacgatccaggtgacaggattacacgaactcatcgatagggtcagcacaagctacgacaaatttttctttggcgatgcagctagagaaatctacgatttcttttggggggactttgctgattggtaagattttttttattacctaagaatatgaggccaggccttttcattaagagcacattaatatttctgcctcaattaatctggagactatcagccctattgacaatgtaaggagacacagggggcctgagtaaccaagtgtacaacttatcatatttggtagacctgcccaccatgcagaacaaagaatttcctatttgagcccttttttatgtttcctttaatttacatagtcctgtttgtctaaattctgattgcagcccttcccattgatgggaagaaatatgctagttgtatgggattaaaagaactaaaatccttttatgtgcttaacttttgtctggttttcttaatctgagcttatatccaaatggtaaagaactgtcaagagctttagtggaaagctgaggtctttcttaacaatggagattccatgagcaatttttctaaaagaaaatgaaactaaaacatatcacaatgttagacgccatgagccccagctagatcccaaaactcccaaaactgtccctcttccttggcaagcagaaaagcacctgccaggtttgagggtagcaccataaaggacacaacaattaggatgcttccagggagtccaaacaccaagaatgttaaggacttaaggccttgctgcaccaggccattaagtgcatcgctagctcagctccactcgtcaaggactgattccccagcgatggcgacagggcagggaggccaacctgctgcaggagactcaaccaaaatcgtctaacagaaactcatgtagtgagcaggtgatggatagtctcaacgtcctgatcacaatgaagacaacaaggagggtgcggcagcctcacctagtgaagtgatctgcagtccagcaccaattgtgcacaaccaaagaaagtagtgtcacatttacctggggcccatgatttccaagtatgctcccatggctgaaatcggacagcaccctccaaaagaaaaataaaggacaacaccttggaggcttggaagaaattgtcatgtgcagatttggccaactattaccccaaagctgatagccgccaacggtgaatgtcttccacacccggctgcaacacagacctcagataaaagatcctataatcagagatctgggtattctcaagggcgccaacagaggttgcaccttgtatatccaggatccatctgtattcctttaggtcctcaagaaccgtgcgcctgttggttgtttttgtaggaaccagagcaaacagtttaggggcaaggtcagcgatccgctgcccatgtagcctcctatctttccagaacaaggtgtgcgcaccattgctgacctcaatctcaactgctatggaaaagaaagcatggacatcatcatgcatttgaattggtaatgccgactatggcctatcaggctcctgtttttgcagccacagccagcatatcctgagggcccaaccatgatgcatcatgcattgtttttagtatatttttgtgtgtcatccagtcaaccaaattagttctcttgcaggtatattgaagccagcaagacacgtctttaccactctggtgatgattcagcttcttctatggcacaaagtgttctgttgtatgtgtttgaaaacatactgaagctattgcaccccttcatgccctttgtcactgaagagttatggcaggtagtgaaacctaaccgtaaattattattccctgcaatgtagtatatcacttttaccttcaccattaatagcatatcattatcgttcttatttcaggcattgccatacagaaaacaagcaattattgttgcccactggcctgcgactgatctccctaagaattctctctcgatcaagagatttcagaatttgcaatcgttggtaaatctttgacttgagctgctcatactttaagtggtgacattgcctgtggtgaccattttgttccattgtaaatgtgataacagataagaggtatcagaaatgttcgagcagagtattctgttgagccagccaagcgaatatcttcatcagttgttgctgccgcagatgtcctagattacatatcggtgagcattttcttacattacgggtttttctttgtggcatttcatcgtatatatattgtatgaccttttttatctattaatctgagaatcaacttaatgcacatgcatgtttattaccaagaacggtaagtattattattctttttatcttgttgcaatactcgagttaaagcttttcattgctagaaaacaaagcatatgcatagttattagatgtgcaagtttcactattggaacatagaggtgcatgtgtgatactgtcttgccttttcagctctaacttccctgcgtcttgacattatgaaaaccctttatttgttttgtgaaaaaaccctttatttgttcagcatcatgatctgtactttgatgcctgcagaaggagaagcaggtcctggctttactttcaaagcttgacatgcagagtatacattttagcgagttgccgccaggtgtgtgcctataacttgtcaacataatcttccttgatgcacttggccaatataaatcatctacttctgttgctggcaggtgatgcaaatcagtcggtccacattgttgctgatgagggtctggaggcctatctacccctggctgacatggtggatgtttctgaggaagttaagcggctgtcaaagcgcctctctaagatgcagtcggaatatgattctttgctggcccgtctcaattcaggaagtgtacgcatatatttcatcttcatgacaactatattatccctttgaaaccaatttctgtatccttttaaccatgcatttctttcgtgctgtagtttgtagagaaggccccagaagaaattgttcgtggagttcgtgagaaagcatcagaagcagaagagaagatctccctcaccaagaatcggctcgctttcctgcagtcaacagtatcaagttagattcagcagtcaccattgacggtgtcaacctgccatctaaataacaattttgattagtcctgatttggacgagagatgccacttccggatataaattggcgtgtcagagtagtgagtgccattccattttcgcgtgtgcaggacattgcaactggtgcacgcatcttaccgataagttctactatataacactcatttatacgtctactaggtatgcctgtacgcctgtgcgttgtaacgggacaatagttgtacatacataaacaatacataaacaatgaatggaataaacagttgcacacatctgtattagtgaaatgtgaatctcaaaacttaacagggatgaaccacgtaatcaagaaaacatgaaccgttagattagaaaacatctgtattagtgaaatgtgaatctcaaaatttaacagggatgaaccacgtaatcaagaaaacatgaaccgttagattagaacacatgagccgttagattagagaagataaaacaaagagatacaagagccattagattaaaataaggtggaaaaaaattatactccggtcaatggagggaatggagagaagtgttgggatacacgtaggctacgatagcataaatcaaaattttctatcgcgtaaatcaggaaccatgcaagtattagatcataaatcgttaccactcgacgcactgcgcaacggaagaaggcgttaagaagtcgaaggaattctcacgaagtagcgcgcgtcgatgtagaggaagtagtcgatcgcactagctcgaccttctcctcctcgtgcgttctcctcgtcgtattcccacgccgatcagcaccgcaaaccagcggcgcctctaccggtatccacacgtacagggacggaacaccaggcgcagatgtgctagcacccccgcgcggctagggttttgctcggggaggggagtgacggctagggtttctcacgtgatgcaatccctccgccggtcacacccctcacgaatatataggatccatcattcgggcctccaaggcctgtaggactcctattcggatccctatccaaattaagctcatattggatctccatccaatccccttattccggcacattaagcgtgcgatcctgtaggttcatgtacactcggatgtaacccaaaaactccttttcagtccacgcgtcaacagctgcccctagcaaaacgtattgacccaccgggcatacataaagatcatatcggctgaacctctagtgtatacttgtatgaatccctttgcctcacgatatcgattaagctcaaggctgatatgtgccatcttctaatagctcaatcattcactcgaacctgttgatagattatataacttgtgattgactcctcaatcacctttggcatagccatgcacttccataatctacaacatcaaggggcccagcgatatctctccataggagggacaaatctcatcttgattattcatatcccactacatatttcatagcatactcaaaaactacttttataactacccaattacggagtagcgtttagcaatccctaagtaagctactacatatgttgggaaccatgataatctcaggtctaaggattcaacaccaatactaaatgagatcaccgataacacaacacatatggctcttgcagtgtctcatgttgggtctatccaacaacatgttcaccaacatgtgtccacattattaatttgatatctctatatcatgatccatgagacatgatcatcaattaatacatgtgctgatcatctaaacatatttgttccacatatgatatttgatcagggatcctttagaaatagcaacacataacataaagagtctcatgaaagaatcacatattcattaaccaataatgagttatctatttcaaggaacaaaatcggataaatatgtaaacatagtatgtgatacaatcatctctatgattgcctctagggcatatcactaacagtctcccacttgcactagattcaatcatgaacgtatcttatacccattgccctagtgtatgcctcatgcttaggctgagggagtggcctaagcatacataaacaatgcatggaataaacagttgcacacatctgtattagtgaaatgtgaatctcaaaacttaacagggatgaaccacgtaatcaagaaaacatgaaccgttagattagaaaacatgaatgttagattagataagataaaacaaggagattcaagagccatcagattaaaataaggtggaaaaaaattatactccggtcaatggagggaatggagagaagtccctcaaagcatcgacagcgcatgtcttgagggaaaagaagctaggaaaagcatcgacaccgcaggtcctggagggaaaagaagctaggaaaaaaaagaagatggaagtcgtagcactcgtaggtactgcaatcctaccagcgcaatttaatacagattaacaaatttaatacaggtgtcttcacaattactactagctcagctaatcggctatcctatatacctatacaaatcatccctactactaggaattctctgcatcctcatgcttccacgtcaccccgttttctcctagccattggatctcgatcaagcgcttctcccggttgatctgttggcaatccatcggatcaaatatcaatggttcagatgtgcagtccctctgttttcttttgctggccaacaagcccaactttacacaccatcaagcccaatccacactccttggcccaatttccaccgcatcttcccacactccatccacaccaccattcccgttcccctcctgcgtccgagcggtcgcttctccccgcgccgccagaaactgcgaccgcggcaccggcgcctcaccttccagatcctgcgtagcgtcgtggttccccgccagctcttggactgctcgcctccaaacggaaaccaccgttcacatcgagcaaactttatggctgtcatcaagatagttgttgtctcctcaacttcaagaaactatcttcttccacatcttgctcggtcgagtcctcacacgctgcccgattcacttcctactgcatcgaaaaccatagttccgttcattttccctgcctttaaagtttcagccacctcctcaccttcaagaaacctcaggggtatatattcctctaccaaaggtatgcttcttcctctttttcttgaaccataaccatatatgttcattcaatttattggcctacatttctcctttgagtcacactcgattgatttgttcatgttatatatcagattatcaacggattaaggacatacgagtattgatttggtttcagctcttcttcagatttccactgtcccaatatttatttggattcgtctcttcttcagatttgtactgtccctattcaataggattgaaatttatttggatttgtcacttcatatttctactgtccctattcaacacgactgacatttatttggatttgtctcttcttcagatttatactgtccctattcaacaacattgaaatttatttagtatgtacaatttgttaaaggtgccaattcatgatcatggtattatatgacgactctaaagatcatatatatgcatataccggttttatgtattgctgcaccttaatttgttttatttctgaatactacggttgcagatcattgctattagtagattatatactgtcgttgtagtagcagctctgggctaccgctgaggtcagtcgccatggccatccaaagcagcagttgcagcatatatttcctccgatatgaatcctctattaagaaaaatatcaacaatacaatcggtaatgtttaattttctcatcttcattcatggtcatgttttccaaatattatattatgcccacccgacgttacttgctttgcaatttcttccataagaacaaatgaacaatatcatattttctgcagactatcagggactgagttcagcaatgaacttaatttaggtaaatattggtccttggaagttttcattttttttagatgaagggcaacgccctctgcatcctatggtggatgcaccttgcatctgtccatgctaaccttctttgctatatgatgttcttacttaacatctttcccttctttcttagtagaatataaaggatgttctttgtaatagtacacaatttaacattttgtcaaacaataagggattcagcatgtatgtttctatcgacacaatctctctgccctaatgattagtatcatcaagaaagaaaaataagagagtttctgatgctttgtttagatatggtagctatacttttttcaaatatagaaaatgtttaattttttggctttcaatttactttatggtataggatggtaagggattgagcaatgttgatccaatactttatggattttttacattaatcataaaacatagattacctcacatgtagaccattttaattgaagataggtcaataataatcaaaattattttctcttacattgctataactatttgagatatttgtatctcaaacttcacctttgttgggcattccgtttatatttcgtccaacaatatactaaatattgtttgctgaaataaaataaaataatcattttccatggctatctattgcatttgccttgcatctccacatatagtcttatgttcctacctacgaatcccgcagcaacgcgcggggtattttctagttacatatacacgagagtgggttaaatcaaaaccacgatgaaattacatcacacatcagttgatcagtagagtcttctgccaggtattataggaaaaaaatcatctgttttaaaatatagcaacctaggatatatcccatcattcgtagattgctatatatttcatgacagaggtagtatacgaaggaacaaattgaacatatagtatgaagaaaggagacctgcatgcttcctcttactctcttaatattcttttaatatttctctcaaaatattcttttaaaaatgacaatattcttttaaaaacttgaatttgaaagacaataggaaaagaggtatatattatatggaaaaatttatcttactcttaatattcttttaaaaatgatactacctccatttcaggttataagactttctagcatagcccacattcatatagatgttaatgaatctagtcacacatatatatctaagattcattaccatatatatatgaatgtgggcaatgctagaaagtcttataatatgaaatggaggaagtatgatctatttgtaaatttatgttattttgattttcaaaagaatatgaaaagaattatagttaaagagggaaaatgcctaaaagatgttgatgaaagttaaagagtaacagatatcgcacaaatggggactacctcttgcaaagatgtcgtaggtctccaacactaggctagcaatggtatgctgttttgaaaggcccgcgttagttcagttggtttggtgctgagctcccatgacttgagcagtaggcgctatctcggataggatctccgctccaatgttaatagcactaaggtgttatagctcagcacataacacctaagtgattacaagattagcactaaaaaaatatatgtttttataataagtttttagcacagtctaatcttcaaatgtgttttataaagggcaaattttcacatcatacggggtagtctctcttgcaggtggtaggtaggtttgaatcccaccctcttcatcttttatggtagtgcaatacattttaaagtaaattgcacaaaactacaagcattttgaccaaattattatcacaaaactacatatttaacacttaatttataataacactacatatttaatattgaagttatcacaaaactattataaatccctagcatcattgatatgttggaactataaaaatgtagttttttttactaccttggttctaaacctgtagatttatgataattttattaataaatatgtagtttcatgacaacccatattaaatgtgtagttttgtgataattttaattaaattgtagttttacgatagtttgatcataatatctgtagttttataaaagggcaaattttgctaaagggtatcacgactttatgggtttggctgtaggacaccgcacaaactcacttttaggggaaaacactctctaaacctggttagcacaaactcactcacttttgggggaaaaacactctctaaacatggttatttgctgctggacaccgcgcacattaaaatattaatttctggttgaatattagagataaggtgaaaggtcaaaagtaccccttgccccacttgtcatattcttcctctcactcctaatttcccttcttctaatctcacgaccgaccgtggagctccgtggtgaaggcagtgctccaccgcgtcgtgggcgcgctctggcgtggcggcattcggtggagacggcgctcgacggcatctgcgagtagcagctaatcatgaaaagttgttgttcataatactcgtgagacttgctgtgtaatccattattggaaaagaaatactcgtgagactgataagctacatcgagaccttgaagcacaataaatttcaaaagagcatttttaagaacaatactccaacatcatctaagaagggaacactatagcataaactggaaacaagtattgatagcgcagattaggaaatacattttgcttgttataaaatgataatacatgtcaattcatagtattaagaaaataccagtgcagtaaccaagctacccgatatgtcaccgaattattaacacacattttgacaaaaacaactttatgaaaacattttctaggaataacaggtgcaaatagttatagcagcaaaattcaaagtattccactcaatcatcaacacattccttatatagcctttagaccttgttcctcatttggttttagctggcaggttggtataataaatatctgcatgccaaactcatttgactttagctgctagattggtacaataaatatctgcatgccaaaaaataactttagacatataacaaaatatttaaagaaaaaaaagaggatagtgaagactgaagggtaacacgtgactcatccctatcttgtcttattgaacatggaacaaaaaagggggtgaattacttcatttcgtaaatcaactagtagatctcgaagaatatttatataggaccgatataaaaaaatctatgatcatcctacgacagtacatccgcatatatggacttatccagtagaacttgtagctcattttctgttataggttcttcataagataaccgctgatgatatcgctgagtaactatgaatcaagagtcaatgttacaattaggcaagcattgacttaagaaatctagtcagtacattttcgtttgtgaatatgacataactaatagtgcaagattttagctgcagcgaaaaccaaatactgaataacactgagcagaaactagaaacaagtactggtagcgtagattaggaaatacattttgcttgttatgaaacaagtactggtagcgcagattaggaaatacattttgcttgttatgaaatgataatacaactcaattcatagtattaagaaaatatcagtgcaataaccaagctacctaatatgtcaccgaattattaacacacattgacaaaaacaacttcatgaaaacaatttctagtaacaacaggtgcaaatagttatcgtagcaagatccagagcattccactcaatcatcaacaccttccttatatagcctccagacctttcctcatttgcctttagctggaagtttggtacaataaatatctgcatgcaaaaaatctttagacacataacaaaatattaaaagaaaaacaagaggttagtgaatactgaagagtaataactgtgatggtgttacccattcctatctggtcttcttaaacatggaccaaatagctagtagatcttaagaatattcatattgttctctaggaccgatataagaaattggtgatcctcctgcgagacatcagcttatatggacttatacagtagaacttgcagctcattttctgttatccgttgcagctcattttctgttatccggtactttataggataaccgctgatgatatcgttgaggaactatgaattaagagtaaatgttacaattaggcaagcattgattatgaaatgttacaaaagtaatttacatactaggggaattctatattttgaatcgtcgacatttagattaggaccttcacttttgatcttatatatcaagctcttagtgttgccaatcacttgctgaatgttctcagagaattgctcaagctcatgtaacctacatagttttttttttactaaatcaccgggagagcttccccacccgaatttgtcatttcattgaaatggaagagtagaattcatagttttttttactaaatcaccgggagagcttccccacccgaatttgtcatttcattgaaatggaagagtagaattgctcaagctcatgtaacctacatagttttttcttttactaaatcaccgggggagcttccccacctgaatttgtcatttcattgaaatagaagagtgcaaggttcattacattgaattgagagattggggggggtgatttctttctaaatatgaatttgtcatttcattgaaatagaagagtgcaaggttcattacattgaattaagagattataggggggagattttttttttactaaatcaccgggggagcttccccacctaaatttgtcatttcattgaaataaaagagtgcaaggttcattacattgaattgagagattggagggggggagatttctttccaaatatgaatttgtcatttcattgaaatagaagagtgcaaggttcattacattgaattgagagattatagggggggagattttttttttactaaatcatcgggggagcttccccacctaaatttgtcatttcattgaaatagaatagtgcaaggttcattacattgaattgagagattggagggggggagatttctttccaaatatgaatttgtcatttcattgaaatagaagagtgcaaggttcattacattgaattgagatattatagggggggagatttctttccaaatagaagagtgcagggttcattacattgaattgagagattgtagggggggagatttctttctaaatggttgcatacaggaactccatgcctgtaatgacccgcctctcccaagctctcccaggccgggcccgcttacatcggtcatagactgccctcacagaccaacacatgtcttttctacacactttgtcctctctcgggaagaatttcccgatcggccacccatcctgaaattgctcggggccaagcacgcttaaccttagagttctttcgagatcggcttgcggaaaagaagttgcagcttgttgatatgagtattctattaatcctattaagccctgggctggatgtcacaataccccgtcttcaattgatgaaacagatgcacatcctaaattgtcggttgcactcctattttatcctagaaactttttgcaaacgggcataaaaaacaaaggtggctggccgtttttgttccttcattggagatgtcgcaggtgctagtgggaacaatgtttttcttctgtaaatttttctttgtggataggcggtgcttgacaaggagccacacaaacaacttcactttcagtggggctctgcatttccagatagtatctcatagtggagagacaactccaggaggtagctgatgcattgatgataaggtacac

SEQ ID NO: 6203 - DNA, 5762 bp, Oryza sativa
  unsure (1)..(5762): unsure at all n locations
tatcgctgtagaggaaatagggctcaatgtatgtgtccgcttgccaattccaccatttccccacttttggtgtaggttctatgtatgtaacactaccgacaaatttatggggatttcctttcctattgcagcttatatgggaatgtgggataagtccggtgagcccgacacggtgagggataggatactgctggagctcgagcatgagttccttgaggtctacacgacannaattgacaaggtgaaccagagccgggtgcagctgaggcaggccattgccgaggccgagcagagcttgctgacatctgttcgtccatgggtgaaaccgcccatgcacgttagactggtttgtttctacctccaccaggtaaaggaggtactgtacgattagatcaaacaatgtaagttgagttcttgtggaacaatgctgataggcgaaggaagaaaaggagatttagtagagaactagaacctacaatttctgttgtaagatgatagtaataatgcgtgcatagttgttcttatggagccaaaccgtttggaactccattagcagttaatatttttacaaactgtttgtttattaccattgtgtcaatatattaagggagagtgttggtataccaatatattaccattgtaaacttactgcaattttgagtcgagtggctgcaatgatgtcaagtatagtgtagtctcttctgttaatgcatgcatatatgttgttggagtgttggtgtatgtgttcaacgtgttacctgcagtgataattgtaatatgtatgtatacttaggttgtggatgctaataaaagcaatacatcggcatgagcttatggaattacttctggtcatcatgaattagaagcaaatgaagctattcacaaacttctctgaagattttcgtgtcctgcaacataacaattttctccaaggatattttgtgtgctgtaacataacaatctttccccgttgcaacgcacgggcacctaactttgctaaatattctacttatttcaaatgaagtcattacaaccagtttatcattgtttataatggtcgaattgctcacatacattatttaatacctcagattttcaattgcataatcctcatatttgcttccaatttccaatttaagattgtttgttctgcaatggataacaatggtgggagttctgtgccaacatcgtcaacaagatcaggtgacattttcatccatctagctaatgttatatttatcgctcaattgatatattattgcttgctaatatgaggatcactcctccctcaggtccttttgcagatataactaatgtaattgatgccaatttgacgaacaaccatcccgctgctaataaaaatggaactaatgtgccaaaagatcatgagaattgccagcacaacaacttggactctacaggttgggcgtagcactatattatatattttgtttctttttaaggcttttgtattaagcacagtttttgtgtgcatgcactcttcaagatgttacaaaactaagtgcgactgaactaaaaaggaagcgtgctagggagtggtatgcatcattgaccaaagagcaaaaggaagatagaaacaagaaggcacgatatatcaggaagcggaggaactttgaatcacaaggtttaaatctctactgcagcatatctaaactctctgaacagaaaactttattattaaattaattgaactttcagataatgggtctcaagctgcgacatcaaaaaaaattactactacggcctcatctgtttcaggttgagttgtcatatggtcactgctaaaaatatgtttgtaaatttgtgccaaaaacattttttaatatgtttgcatttcaatagcagctccgtttggtgatattaaaattgcaagcactgaagatcaatcagtagggggccggttggatgttaatgatgcaggcactgaaaatgtgggttctattgtaacgcctgtgcgtctaccatttactaacagttctgatatgtcctacagcttcaaacaatactaaagaaggatgagccatggagtaagccactgcaatgcattgtatacacaatcgtaattcatatatgcattaacttattttctttgattgacaggaaaatatgggtacaaagttcaaggccgcactatattagcttgagtctcaaacagcttcaaacaatactaaagaaggatgagccattggaaagtgattgcttcaacatggctattcgtaagttcatgtatgaaaaaatcgagatgattcataaaactaaagaagcaatatcgaatcattgcttggacttgcaattttgggtaagtttttaaattctaatgctcatgtcattctctattgctcatgttattacctataatcgcaatatcgaatatattgatttatctattgcttatgtaattgaaccattttttaaatcatgtagagtgctactggctttggtaaagacccggtccaccatgacaacataaatcttgcagagaccgtcggtagttggtcggaaattcattacaaactttcacagtgcaaagcggtaagatcgctaagataccatcctatatggccgtgttttatatattatcttgaaggttgatcttttgtagattcttataccagtacgccatgctcgaagttttatcgtgcttgtagtggaccaagaaagtcaaacgctctatgtgttagacccaaatccacttatgccagaatataaaaataacccaaatatgagatacaccagaaaactgataactatttgtgatcacttcaacaaagctatgagaaaggcatgccctggctctaggtggaatgaagacatcaacttgtggaggcaagtaattgtcaataatccggtttacagcaggtaagttatcttcttaaaaactcgttcaaaccaacaaatttaactgtgtagagaaagggaagctaactcttcaatttccttaggagtttatcgggttttcttgttcatctcttcatgtgtacatggaataataaagaaccacatttgccggcaattaatgtaagtcttgacaggcattaattattcatatattacattattatatatttaccaaaatttaacttattaaatacatgtgcaggatggtgacgagctaaggaaactttttttgctaaatctactgatgtaccaacaaaatgagtgtgaaagcaacatccctaacggcgtacaagattttctaaagtgtataaagaattcacaacattagggtagttatttaactatatggaacaacattagggtttaactataatatggagtgatttaatttgaggtgatcatccattagaaatgccgtatctacaaatgctggatgttctatattttttgtttgtgctttatttgtatgatatcatcaaattttcatagatgtcttctatctatgttactttttataatttatgtagtaaacgccatgagattgtttcattacgatgccatatttgtcttttcaatgccagatcttatccccgtgatcaacaaaattccccgtagcaacgcacgggcaccctactagtaaacaaaaaaaaataccgaaagggaagctcgcagaggaaaagaagagcacaaaccccaattcccaacacctccgcgacgcgagcgagcgaagcacgaggaaaaaaaaaaatccccgaatccgcgacgagcgaggcggcgagctcgctgcttcgatcgatccggagagggaggtagggaggagtgagcttgctcgctgttgccgcggaggcggaggcggaggcggatcggggcgccgcggctgctcggctcggcggcggcatgatggatccggagatgatgcggctggcgcaggagcagatgagcaagatgtcccccgctgacctcgccaggatgcagcagcaggtcagatccgcgcccatcgagatcgatcgtttcgttggagatggcgatctggattaggttttggtgtcgttcgtttagatcgggaggtaatcgcgtttaattcggtccggtttcgcgtttgcgtcgaatcaggatcgtgtgccaagttcaagttcggccgggatcgcgtttagggccaaagcaaaatcgtgtcacaaacgcacgtacagatgtggagttcagtttggttgagtttgcgtcgaggcgaaatcaggatcgtgccatgatgagatcacagggttaaattgttcttagtagttgatagtattattactccttttaagtcaaaatagtgatgcaattatacatataataaagaaaatggtgtttactcttctagtcttcaagttttcaagtcaattagacagtgagttgtgggttccaggttgggtttgatttggtcagttaattgattggtgatgacaatctgcgaatgtttttctttctgttgctatcaacaactgcatgattgtataaactataagcaataggagcgttgttgctgggtcttttacacattagtttatgacttttgcttcaactgctggtgttttcgcatgtccttacatccgtttagactttgtcagcgttgtcccatacaagcacaaccatgccaaatggtgatcatggcatattttgtaccacaagcctgcttttggtgcttgtattgaactagaggcctttcgtattgatcttgttgttgcttgacattgctggttattttctgaggagccatgcatgacatgagattgacattttccttgttatgattcgtattgtttcagcttctgtcaaatcctaacctagtaaagttagcatctgagagcatgaagaatatgagagctgatgacttcagacgagctgcacagcagatgaatcaaacaagaccagatgaaatgcttgatatggccgaaaaacttgccaatgctaatcccgaggaggttgctgctatgaaggttcaagcagagcaacagatgtcatatgtgatatctggtgccaagatgttgaagcagcaggtatgtatagcagtccaacttcactttttactatcatattctgttggaattcggttatagtaaggctgagttcggtacccatgtttcccacctcactcccctcattttccgcgcgcacgtttttcgaactactgaacggtgcgtttcttgaacttttttttttcattttttcaatctagaactagaatagagcttcatgttacactttttggcaaggacaaatgagtaataaaatttaaattcacaaaaaaattggcgaatgctgtatgtgctatgaggttcataccattacaggtttggatcaccctgagttaactagtggaatgctggaaaatatacatatgaacttcatgctgacgtgaacactaaagagcatttgatgagcctccttttttccttttaccaaagaactacatctactgatgcattagtcaggctgagccagatacatgtactgttttgtgacaaatgtttactgaacctatgcacctttaccaatattatcttgtttaagaaaactctgcacctctttaattgtttaactattttgaacttgcaaacttccaagttttaaactatttttgtaatattgatatttgtaattcccataatatcacccttatttgtttcattttttttaaatttcagggaaatgaacttcataggtgtgagcagtatagtgaagctgctgccaagtacaagcttgtatgttttgaacgtcaaaccttcattttgtaagtaaatttgaatgtgatgtatgttaaatcaatgcattcctttcctgaccaggccaaggataacttaaag

SEQ ID NO: 6204 - DNA, 59938 bp, Oryza sativa
gagtggacggggatgcagtgctgcgacagcagcgcgaagtaggcgttcgcggcgtcgtccaccagcgcggcggcgagcaggcggcgcgccgcggcgatcagcgtcgcgtcggcgcgcttcgtcggccccgccgccacgaaccgccccttgaacgacctcgtcggcggcatcatcagccgcgccgccgggtcggcgtgcacgtacacgttcagcctctcgccatgcccctcgaagaacctctcccacagcggcgcgaacgtgagctccgagttggtgaggaacaagaacgccaccttaggctccgccaccgccatcgccgccgccccctcgccgccgtccagcgtggctcgccggaacagcgcgagatcaccatcctccccacctccacccaccccatcacccaccacaggcggcgacggcgtcgccgtcgccggcggcgacgaggagcgcggggcaagaaccaccagccaggtcagcgacgcaaacaagaggacagtaagcaccaacggcgacgacgacatcgccaattccggcgaaaggaccaccgatcttgctctccgcggatcgaatcgccggaatccggggtcagatcatgctcccggcggccggaatcgatcggggaatggaagcgaggaggcgaggagtgaggtgaggtgagctcgcggctctcgctttcgctctcttttcctcttccactctcgagcttatataaaaggaaaaatcacggggctcgtgtccatgacacgtggggcccacggttgagtggggcccggtggcagtggtgtggaggggtggtggacggtcgtgggtgggagtggtaagggtatggatggatttgcgccgtcggatgcggggtgtacgtggcaggggaaggtggtggacacgtggcgagtatatcgctttgtctactctgctggctttcggttgtgttcggtgcatagggctggggggaaccggcacgctaaatcatgcggtgaattaacgtatgtttaattaaagattagcttaataaaatttggaaattgattactatgattttaaaaagcaattgtcctataaaatattaccaattaacaggttgagaaagtgtgagaaagaacacatacatgagctttgtacatagatcacctcaatttctgttaacatgttttaacactgatgacttatttgatctttgatgtgtaacttatgccaatatttttctactatgatataacaaaattgcaaaattataatgatgtaaaaatatttataaagaaaaatctacccatatgattttcttttattatattaaagagctattgatggtgaaagttttaaagtttgaccgactatagtcaacaatatcatacatttaaacaaatgaagaagataaaaactatcatttgtatgatagaagaattcgataaataaaatagagaaaacatgatgtgatacattatttttattttccttcaaaagggttctaaacatgttactttatcgtagcgtccatccaagcactcaaggtgccttcctcacagggattttattctggaattaattaatttgcccacatgaaattgctgacatttccaaataagctttgaagtccaaactaaggaaaaccaaaattcacagttctattttcttataaatgatgcattaagcagctccaggaagaaaatcattctgaagtctgaactgaaaaaaccaggacgttaacctgaacgaccaccatttccaatcacaaaaacactttccagtgatgaaattttctgaagcaaccatcatacagaaaaggaagttaaataagttaccgtcaaggaactaaaacacatacgagttgttcttcaaattcacaatcctaagttgtccaaaaaccaaaaccaaactaatcagggctgacttagctgctccaaactccaaagtcgtccaaattgtgtagagcttgactggcatgaacaataccttcagagtggctcaaatcttaatcaggaagaggaattggccttacgggtaaggcgaacacaatctggataaaccagctcacaaaccgagagcgtttcgacctcctcgcgacgaatttcagaaacatcgacaacattgttgtggtcttctctgcagagatattcaatggcgacctcatacccatcaagatactgaaacccttccaagggtgacagcatcgatatacaaggaagggcgaagagcggcttggggtcgaccttcatcgccctgatcatggcggaatttctgagaatgtgcagtgacagctccaattggtctttcatgccgatgaatccacttatgtgtacaagcctgagatgggcatgaggctgcggtggaagactccgtagctcgccatgagcttcttcgcgataccgttgatggtgaaggggcatccacatctagaaaaaaaatgataaatgagaaacgtccaggggtcttccggatagctccacaaggttgtgggcgtaagtctcaccccttctaattatttgattttaggtcattccctaatattcgcgtctttttagaaaaatgataaatatcagcataaaaaatgataaatatcagcattgtgggaaacatggtggtgttattataggtatatctacatgaatatagagaacagaaagcatataggcaaggcaggccatttaactcaggccagcactactgatttggtggtttaattgtatatataggatggggctttttttcagactagctagaatattaacgattagctcatttctcactgtaattgcaagttacatgcatgccactctagatctatacaaaagtaaaaaagtgttgcataataagagagttaaaagctctatcagaactatattattttgttgctcagaagaatgttcatagtatggactttagtccaaaacaggattaggttgtgtggttgtgtttcagttgaaactgaagtcagagtcaagcaagtaaaggaaatgtccaagcagatataatctaacataatataaaagcagttctgctagaaacagaaaatagtgttcaataaacaatataaagtgagtgaccatctgtacccacataacgaaaaaaatctcatgtaaaagccactaagacagtattcagtttgaagaagattgatcggtttacataagtgaattgcgtaatccaaatctccaaaagacagacttacatgtaattcaaacttttgcagtaaaggagcagcttccagtaggcaggcaaagtcaagaagatcaatcttcttttccgtcacagggtgtctcaattgcaacctcaaatgctttagatacataaatttgatatgattttctggcaaaatagccctctgatacgcacaagaagagaagagacataacacaatcaatctcacatagggaatgatgagcaagaatatttgaatgcagaagaactgagttcatgaccaaacctcgagttctgaacattgcaaactcagcgtctcgagatggagcagcgtgcttggaagattggtgaagatatatccaagagaggaacgagcgtgttgcagcttcatgcagacattcgttagcagcaatggcccaggaggtgacaacggtatcagtgtgcccttgtacccaagtttcgtcaggccaagattcaactctatctctttaagcagatggcagctctcgacatgcaaatgtttaagctggttccaaaggtgcgatgtcgacaatcttgtgagcttcccacaatcaacgataccaagaaactccaaggcattgcagttggagatcaaaatctgcatgttttcatcagtaatatttgtgtgttctaacttgagccttttaaggttcagaaaggctttgaaatccacaggcgggttcagagaaacagcactaagcctcatggacagcaaatatgaactgtccatagcaccgaaaaacttaaaagggaaatcatagggcccctctctaggataccgggatttgaaatcaaaagtaagatctttcgttttagtagcactaacaaagctgagccatctgtttatgtggtctgcatgttcattatccaacttaccttggattgctattttctgaacacttagaccactgtgttgcgcaaagacttgactgactctctcgatgaacattttcatcctaagccgtgcatcatgtgaggtcgaagctaatcttggcgacatcgagtagaaggagaattccaagtttacatgggaacaccagatttttttccagtggcttgataatatactcgtccttgccgcctcttttatcggcagccgggatatgataccaatcaatatatcctgcaacgaggagaacaatggtgtcaactgtacaaacaaatcagcatgttgttgatgaatgaattatcaattgatcataccgtaggtaggtcattgaaacgaatcactggtcttttccttttggtcgtagtagcatcatccatgtcttcttcttttttggttgtattagttccaatccgtttcaagcttcgttttgtctttctcgtagccaccaaactgctgcccacagcagcaacaccaacacgttgacctagctagtaacaaaattaatggcttgaatcttaggaactactatgaggcttgttcgccggaaaccaaataacagtcggatgtaagcaagaaaaagaaagcgcatctgatgcagggatcgattgattgccctgttctagatcgatcgggtactgtctctggaagatgcaaattccctgtacgggcaaaagaagaaattttgaaggggttgggaggggggggggggtgaatacctgagatttggtcgatcggcaggattcgtacccgcggcagaggaagatgcagagcacggaagcggcggcgcagccgtttggatgaagaagaagatgatgatttgtatatatatatatatatatatatatattagaagatgatgagcaccgacttgacctccaactctaatccgaaacgaacactgaaccgatagtcaactttcagcaagaggcaggcatagcgccgccggcaacggacagccggatcggtggcgtggggctaggtcgccggccgccgcctggggctcgtctgctcagggatagggcagtcatcactcaatgattcccccccccccccccctctcagagagggagggtgaaaccgtggagaagtgaggttggagaggaggggcttaccagatcttgatgactgtcgtcgcccctgcccgccgtcgccagcgcctactgccgccaccgcttagaggtggccaaatgggccgggccaaacgggcggcccggggcacggccgaacctgtagcaggcacggcccggcacggcctgctacagtaacgggccgtgccggcacggcacgagtagccgtgccgtgcttgggccgctggccgagcccgcgggccggcacggcacggcacggctactgtagcgggccggcacggcacggcacggctactgtagcgggccggcacggcacggcacgccggcggcccgtcaggcgcggacagggcgggcggcggtcgaatgggaaggcgccacgtggcactaacggctatttgaccgttcaaatttgaaaataaccgttgggaggctaaaaaattcataaaaatttcgaaaaaattccaaaaaatctcaaatttcgcccctataaatagggcatgaaccccagccatttctcctcatcccacactcctcatcttgtgctctcaagtgttttaagtgctctctttgttctcaagtgtgcatttttttttattttgacaaaatttgctcaaattttgtcaaaaatcaaaattagtttcgtagttcaacagtttgatcgcacaggtttgaagagctcgcggttggaaagatgtaagtattattcaaatttgtgtattatttgtattgtgtttgtgaattcaataaatattcgaaaatttgtttatgtcggtttaaattttcagaatggatccgaactttccataccagtcgccgtcgttcaccttgggtgatttcgaccccaactacatgtcggggtttgacggtacctccggatcggctccaactccaccatctgtggaggaggtaccggttcatacggctgtcgttgaggaggtaccggttcaggcggagacagcttcggaaggattttccggaaccgcgagcggaagtgtttcgacacacaccggctcgaagagatcgagaacctccggtgtgtggcaaagcttcgacgagataaaggaaacatgccccgacggaagggaggtatcgaaagcccgttgtagaatatgtaggcaaattttatctgctcgttcttctggtggtacaggtcacctcaagcgccatgcggagtcgtgtgccaagaagcaaggaatacaactccggcagcagcaacttatggtaaacccagacggtacggtacgcagttgggagtacgatcccatggttgctcgggaatctcttgtccggttaatcgccaggcaagatttacccctgaactttggggagtcccctgcttttgaacattacattcagcaatctcataaccctaggtttaaagctgtgagtaggcaaacatcaactagagatttagagaatgtttatcacaaggaagcaactgcacttaaggaactgtttagtacatgtactttctctgttagtgttacttcagatatatggagtagtagagctagagaggattatcttagcgtagttgttcattttgttgatgatgattggcaattacaaaagagagttttagggcttaggttaatagatgtctcacatacaggagaaaacatagctgaaagaattagggaagtaattaatgaatttaatcttgctgataaaatatttgctgtcaccctagataatgcatctgctaattctagggctattgaaatattgcaacctttattttgtgtgtatgctcaatcttttctactccatcagcgttgtgcatgtcatataattaatttgattgttaagactggcatgaagatggtaggtgaccacatcgatgctgttcgtcaagcaatcgcgtggttaactgcttctaacccgcggattgctgcatggaagaggttttgcaatgcggccggtgtgaaagctcgtaagtttgccaccgatgcagagcatcggtggaatgcaacgtatttaatgttaaaagttgttttaccttatagtagtttactttctgattttgttcagtcacgtggtggcccaagaaacagtgacgggtcttcagtactgaacgagcatgtttaggcaattgtccaaaaattttaccaatttctagaaactttttatgattgtactctaactttgtcacaagtttattatccaactgctaatataattttgcacaaccttcttgaaattgctactttatttaaagaatacgaaaatgatgacgttctaactgaacctgtctttcacatgaaacaaaaatatttgaaatattggaaaaatatacctatgttgtatgctcttgcttttgttttagatcctaggtgtaaattaaggggattgtctgctattttatcacttgttggagatactataggtgtagattatagttctttttatactgaggttagacgtaaattatatgaggtttttggaagatatgaagtaaagtttcaggaagttcgccagcagagaccccctcctatccccactacaggtaagaagaagatacagtggggtaggatttggggtggatcgtcttcaagttcaatccaaggtggtggcagttcgtcggctacaagtggagacgcctcttcgcatgttgtggccgaagagttgtccggttatttggacagcgacgccatccaccacgaagcacaagatttcaacgtcctcgggtggtggaatgaccacaagataacatatcctgtgctttcaaaactagcacgggatgtgttgacggtgcccgtgtcgacggtgtcctccgaatcggccttcagtctatgcggccgaatcatcgaagaccggaggacgactctgcgcagcgaccacgtcgaaatgctactaagcgttaaagactgggagcttgctcgacaacatgcccaatacactgcggacaaccaagaattggccgcccagttcgagcaactctacctggatccagaccaaccccagtagaattttgttacaagtagttctgacctttgagctgtactcttttctttgtcatggttttctcattttcccctatgagtttttacatgacaaagtttttaacgaggcagcatgtatcattgtatcctgtaatgatataaacatcaataaaggtcattactatttttaacaaattcttttgcaatattttcgcaagtgtggatttatctttaaattatttcaaaataatgaatcacaatctatatttttaaatttttcaacacaacaaaaaaataccattttttcttttttttaacattagcaaatcattacttttttaaaaaacttttatttccattttttaaataccattttttcattttttaacattagtaaattattactttttttaaacattttatttccatttttaattttttttttccttatacatttcctttgcttttttttaaaaaaaaaacactgtgcactgcaggctggcggcctgccttcacgggccgccgtgccccgaacgacccgtgggccgcgggcgtgccgtgccggcacgggcacggcccggccatccacgggccgtgcttgggccggcggctcggcacgtgggccggcacggcacggcccgtttcatcagccgtgcctaacgggccgtgccgaaacgggccgtgccggaaccgtgcccgtgccgggccgggccgtgccgcccgtttggacacctataccaccgcttgagttgcgtcgtgtgctggttgattttcagggccgtgtgccgatttgcctgattttcttctcgtttcttttttaataggcagatggcgctgcatagcaattaacgtgagaaaaaaaaataaagcatatggcaatttatttgttcaaataatagcccttaaacaataatacatacattttatatggttagttagaagataatagtaaaaaaatatagaaggatgtagtatggatgatctgttaaagtaaaaaaagatatagagagaattttttttttaccatttagtaggtatatgaaagataaaatttggatgagctgttgggatgctcttatactaccttggatagactactttgacttcttgaaagcaaaataaccctaccacgactagagaccggcatgattctaattttgtaaaatgttaatgacacggttataaatagatgaattataatgatattttttaaatagtcaaattaccttttttttgtttttttaaggtgacgaaatgattatacttgcgcaggggtatatttgttattacttttgaaccgtggtcaaactagtgagtcggcgaattcaccagttcaataacattgatctcattggatggtctaatcagccaaagaaaaaaacaaatttttaaatttttaaatttaattttaagattgatttaagatatttttaatgtagtttctttttcagcattggcttttaattcaccaagaacatatatatatatatatatatatatatatatatatatatatagaaaaattattctacacccgggtatagaatagtcccaaggtccaaacccacctcccaccttagtcaaaggtcagtcaaagcacccccacgtcggtcaaagcctggtcaaactgcctaccaactcccccaccacccacctcttctcaactctcgtcttgcgaaacagtgcagtaacgcgacagccatcgtgcagtaacgttgtgtcttacgtgcagtaacaacattcaaatttagttgaaatatagtcatgacagatctacttttgataagcactttttttctaacatcatggtgtaaacggtttaaaaaaatcatatatcacatgagagatattgttattcgaagcttgggtttttttggatcttaactctccacaagtagtaatactagatagcattactactcgttactaccatctgtcatgcgttactataatctcatcgcgacgttactgtaagtgtgcagtaaagaccataagttttatagtaacaatgcgtcttactgcaatttttgaatagtgttactgcataaacatgtggtaacgtgtacctgctatgtagtaacacttccactttgtgcggtaacaagtatatttagcatgtgagacttttaacccatatttttcttttgatttctggtttactataatttcaccacgatgttactaccaatggtgcagtaacgatctatttgttttacagtaacaaagtttttactgcagttcttgatagtgttactgcataaatatgcggtaatgtgtaaatgttaggtggtaacgtgtatctgccgtgcagtaacacttttacttttgtgcagtaacaaatatacggttagcatttgagactttgtacccatatatttttgtttcaattcctgatttactgcaattcaccacaatattactgccaaaagtgtagtaacatcatatacatgcatgcagtaacactatattagagggagaagaccggttttcttaagaagagggaggaagaacggtttcttgagtagaggagtatgtagatgcattttgaagttctatcctccacatgtagtaacactttagtatcattgtgaaaatggttttagaaaataatacatatcttgtgagatattgcttttcaaatattggcattttgaactttaacactcctaacagaatatgtaatttgcagtaacatgggtatatacatgcagtaacatagttttaccaaatgcataaaattgttcaaaacactcctacatcaatcagacctcactcaaagccacctacagactttacctatagcccacctattcgatcttcatctcataaaaatgacgtagtaaaactacgattatcgtgtagtaacatagctacttggaagtggtaacatgcatctattatgtagtaacattcttacttttgtacattaacaagtatatggttagtatgtgaggctttaacccatatatttttgtttagattcctggtctactacaattttactacgacgttactgccaaaagtgcagtaatgtcctatgtgttctacagtaacgtgacgtgttactgtacttttacaacaatattactacatccttctatatttttttactattattgtacataatacaaactatattgagcattaagcatttttcttatgttattatacttttaaactttagtacgggaatttctatgaactttctgagatcctgaaagcagaaacagaagacggaaggaaccaaattcagtgaagttcgagaagaaaaaattggtcgcccaattccggaaaataaactagttgaggatacagacgccaaaactaaaccaaagcttccaaaagacattttaaccggagtaagtttgcagccttaatcagatttagattctgatttatccaccaatgctttgacttgatttatcgtattgcaggtattcggtggtccatcgtgaactcatgattgatttccacccccttgccttggattggagtatatcaaactaaatggagttgcgctgagataatcgtgttcttcatccgttcattttttagattgggtcatgctcagagcaacttactctttccgtcaaaaaaaaaaaatcaacctaggaggacaatgtatgtggacacccctatgtccacatacatcaacttaggaggagtcatattctttatgggacggagggagtaggttcctacttcctaccttgagagtaccttttcgtatctatgctgtgttagggaaggtttcggaacctgacgatgaatgcatgattgggctattgtcagcatcatattatgcacccctgttttgtcagcaatcatggctgtaatactgaaacagaagtacaccgttctagcttgaaatacaaaatacaaaagtataagatatacaaccatgcctgcctaaggtgctttaagtgatatttacagaatcatccaaaattttatataaaagtactccctccattttttaatagatgacgccgttgactttttctcacatgtttgaccacttgtcttattcaaaaaatttacgtaattataatttattttgttatgagttgttttatcactcatagtactttaagtgtgatttatattttatacattcgcataaaatttttgaataagacgaatggtcaaacatgtaagaaaaatcaacggcgtcatctattaaaaaacagaggtagtataagatataaccatgcctgcctgcctaaggtactttaagtgatatttacataatcatccaaaattttatacaaaagtataagatataaccatgcctgcctaaggtactttaagtgataaaacaacttagaaaataaattagaaattatgtattttcttaatgaaacgacgcctaataaaaaagttaccgacgacatctatttaaaaaatggataattctaccagtgttcgtttcggattacagtattgacactgctcggagatgtccatgaagaaggggattcaggtcaagtccggtgctcatcatcttcttcctcctccaaacgtctgcatctacctctgccgcgggtgcgaatcctgccgatcgaccacatctcaggtattcacccctccaatccccatgtgtaagtgaatcacccccatgttcttgccataaattgttcagacacgatcttccttgatgcattttgccaaccaattatctacttgactacttttgataattccaggtgatgcaaatcaatcggtcacaattttgttgctgatgagggtctgaaggcctatatctaccggatattttgatattttgagggtaatttggctgatatctcttatcctggatccctgcgcgacaaccgacttaatgatacgttattctccaaccggctctccaagcgcctttcttgagatgcagccagaaatccatagtatgatgccgttgctggcccatctcatttcagaaagtgtacgcagatatttcttctgcatggcaactatccatttaaccatgcatttctttcatgttgtagtttgtagaggaggcccctgaagaaattgtttgtggagttagcgagaaagcattagaagcagaagaatcggctcgcttttctagttaactgtttccagtgaaatataggacactctagtcaccattggttcatcacttggttctgcagttgtattagggaatccgagctgttgataagttgccctgtaaattactccatccacgtacaagtgttttttttcttcttcccccgatagtcctacaccatggtttacgatgccggttgactgggtaaaaaacacaaaccgctcggttgtttggtgaatctttttttaaaaagaaaatcaaactttattttaaatttgtcacaggatctgttcagatttcattggttcattaatggtttttgtgaaatccgaagatatcgctcatgagtgggtaagcggttcttgatcttagtctcatgattatgaaccttgtgcacataattccagtggtatatatcatgtattgttgcctctttccaaagtgtatccgattgtcagctctctttgctatatcctgagctcattttggagtctgatgcaacaatggtcccgactataacactgtgatatgttgtgatatgttaggaaacgataagcgaacaaatgataaataacaatagatcaatcacagaagacacgagatttaacgtggaaaaccctcccaaagtaggagagaaaaaaccacgggcgccagccagcaaaatatcttcactatatctggggtgaggttacgacgccgcacggcggcttacaaaaggtatatatatagtggaacccaagcctcccggcgatgggcctccgctccactacggtagaagctggcatttattaagtgcaaatgaatttggatcacaactcaacatgatatgggaactgaagcatttgttgtcttcaaattttatctctttctgggttaattataagccaagagaaggaaatagagtagcccatacacttgctgagctgggatcgttgtgcttgacagattctgagccggtgcttgtttctatgccatcttgtattacaaatttggttgccgaggatatctcagctaatggagtaatgaaagttcgggtttgtttcaaaaagaaaaaacagtaggtgatttcaagattggaaattatgcgagtgatcacgttttttttacaacaaacacttccttgtattacctctactggtacacgtgttgtgttgcgtggtgcctatttgttacacaaggcctgtatgggcctcaacgaccgcccatacttgtacgaggaataagttcatctgaggtctcttaacttgtaaacgaatccgattttcgtccctcaaccgaaaaaccagatacaatgtgtcccttaactatcaaaaccggtgcagattaggtccctcgacggttttgagggtggttttggctaacgtgacgcctacatggctaatttgactcggtcttcatctggcgtggcattgacatggcgcctacgtggcaattcgatcgaaaaaaataataaaacccatgggacccacatgccagtttcacacacaaattaataaaaaatggtggggcccacgtgggccccacatttcatcctcacccctcctcttcttcctcatctctccccatctcccctctcttcatctctctctcctctcttttctctccaggcgacggagggaggccgacgagcgcgcgtggaggccgacgagcaggacagcacctcggcagcgaggcgtggacgagcgggcagagcgggctagcggagcagaggaggagcggcggcgggcgagctcctcgccctcgcagggcttcatcgtcgaggagaggtcgcaatccttcgtcttcgcagggcgtcgcgcggcgaggcggccggtcgcagcagcgccgaggagcggccgcaggggaaggggtcgtggcgtggagtagctagaaggaggcgaacggatggtcggcgacgaagtccaccaacttcagcggcggcgagtagtaatcgttgcacagcgtgaacccgagatcatcgtcgaactcctgcccacggcggcggagctagaggtcgttgtgggtgtcgccgctcgttgccgccttctacggcaggtggagcaccttgaagccgtcgtggcaggcgacgtggtggtagctccccgccagccgctgcatgaaggagaccacgacggagttgtcagcaaacacacgcgatttcagtcgctatcctagcttgtctgacgaaaaacgacaatgcagaaaaccagagaataacaacgttttggtgctgcaaaactgcgcagcttttctgagttctcttcttccttttattcttctccacacaggaggttgttacatgcgcgatcttgccagatcaaggactaaccatgccatcccacgatccgatccctgctcgatctcttctactaccgaaacagaaaaaacgataactaatccctgctccagcgcgatgtcgtcgatggcttccacccggaccagctcccggtccacctccacggagcgctcggcgacgccggactccgcctcctcgttgccagccacgctcgtggtccgtccggtcctctccatgtctcggcgtcgaagtggagctcctgcacggggacggaaaggaggccaccaatgcactgcgcgaacccgtcctggaccgatagacttgggcctacccatcggtggattagtccaccatggaccgtgtgtgcacgtggagaaggaataagttcacctgacattcctcaattttacgtctgatccccaatccccccagtaaggccttgttcggttgggccgttcccggccgggatcgggtcccaatccccgtggatcaccccggcgaggaaaaaaatcccggcccatgcgaaattgtgcgttcggttaagcactgccgctgattttagcccggcccaccacggggtttccctcttctctaggcccgggaataaatcatctcctgaggcggcgtggaagttttcctcgaggaggcggcggtgcagcgaagacgcgacggcgggggcggcgcgacccggaggcgatggcgacggcacggcgctctcctccggccgccatattatctccggtgagcacgctgcctttctacctctcgcctcctcttccaaagctagggttagggttttcttctcttctccctttcccgtcgttgccaccatctctcgtctcgccgtgattcgatctagtgtgtgagcgctcagcgattcgtcgtcgtcctcctcgtatcctgctcgatctggtgagttcttgatttgggcgtggagcttttttttcttggttgggtggggatgagttcttgatttgccgccgccgccgcaccgcccaactctagttcttgatttgagttcttgattcacggtggctttgaggcaccagatggcgagagtgagagctgtacggtggctatggaaacatgtttgccttgattagttttgcttagtgtgactgatgttgtgatcgatgcttgcctgagcatgtcttgtaaaattgactatacaagtttttacagtgaagtactcggatcttggtgcttccggtgtcccaacttgtggtggttggttatatttctgtttggaaattacaagggttgggtgtcctgattttgaggattgtagagatatggaggtactttgtaattagtttaacatttctgaattgtaaactaaatctgtcgtcattgtttcacaagcaaactaacaacaaaatgcagtggtatatacagtaatgtatacttaactgatttattttaaactaacaacagtagcttttagtctcattagactaacagatttgttttcctcaacatgatacttgtataaaaacatgtttatcgtagctattcaagcactaatatgtctagtgttaaatgagctgattaggtgattaattctgtacccatgttatactgtatttgatgatgagatccttctatttgattgaaaaacaacagatccttctatttgattgaaaaacaacagctcctactttgatggtagctagctctagttctgggttttatgtaactctagctctagttccggatatataatcttggatcctgaatttgaattgtcagtgatgtgtataaattgtgtttgttttgtagattgcacgtgcacctcctccttcctgggaccttgtaccctctccttcctaggatagtgctgtgcttcaggaagatggcaaagaagaagaacccaattgtctttatggatatttcgataggtgatgaacctgaggccattcccaacccaatgactaggatggtgtctatagcattaaataagctgccacctaggatgaaaaatgatgtggcaagtgaataaatgaggaaatagaaggaaaccatgtcttgcatgagacatggtttctacacaacatccaagacatcatgtgagataagtaacattaaatttaagtatagaatagttgtgtttgcattggaagattagtgtttagtactagtttcttgatgatgtggagtctatggaaactatgtctagtgtcatgggttgggaatgacctgatgaaagaatgttttttgaggtgccatgtggctctagctatgtgcttcattattcctgtgttttgtcaaggctgaattgtgcttccatacattctaattttcaaagagagaaactagaagaaggttgaggtggtcattcttttctacattcaccatatatctgtctatccactatatatgatttctgcatcctcttaaaattcaggcaactcaagattcacatatgttatacacttgagtttggaactttgcgcattataatgttcattgcattatgtctggtagaagaaaaaagaataattggatggttgtagttttgtttcttctctatttctgagataggtaaactgatgtctactaattgattttccttgtaggctccttgaaattgactggtaggatgttccatagaatttttttgatggtagcagttttctgatggtgtcatttagactaattaaccatccaatgaatggtctactgatgtgtcattttggggatgttgggagaagtttggattttgatgtgcatttggactaattaatcatccaagttgtcggcagatggattcaacttgctgagtgtaagggaatggaatcagaacaatcttcttattatactgtataaatatctcctgtacttttggctggcactgcattggcatcaactttcttgatcaggaagttgtaacaagcatgtatatgttttctaattttctcttaaatggaccgatggtatttttgatcttgctcctgtgctgctgtcacagggtactagcagtactgctttcaggtaaacagtggtaactaaatgtactaatagtactaatactagtagatcataaagtgagctagcaatatgctgctatattcgctgccaatagccagtatattccctgtcaaaacgaacacagggtttctaagagagggattggaagaaacaagggatttactccccatagggtttgagtgacatgggactcaatccctccctggtttgcttccccttggggatttaatccttagtaaccgaacaaggcctaatagaaaccctcaactattcaaatccgttcaaagttgatcccaaagtagtatggactaattttttttttggaataagttcatctgaggttccacgaatccgattttcgttcttcaaccgaaaaaagatacaacggatcccttaccggttttgacatcggttttactaacgtggcgtcttcatggctaatttgacttggtcttcatctggtgtggcattgacgtgcgcttacttggtaattcgatctggaaaataataaacttcgtgggacccacatgtcagtttacacataaattaataaaaagggtggagcccacgtggacccgcatgtcagtaaaaagaataaagatggtgggaccacgtgggccccacaagtccatctcggctctccaatctccatcgccgccgtccccagagaacctcaatcccctcgattcaatctgatccgacgagagagagagagagagagagggagagaggagcgggagcggcggtgggcgagtgcgggtgcggagctcgtgccgcctgtacttcgtgcgcaccgacggcggcggccgctccccgccggtccacacgttcggcttcgacaaggaccacgacgcggcggcgaacgaggcggccatccaggacgggttcgcgcagtgcatcgttggcctcctctccgtcgccgacgaggagagaagcttcctgctgttcatcgtcgtcccgagagcccccgcctgggatgacgtcacccacctgttcgaagtgagctgctcttaccgagacatggagaccggacgtaccacgagcgtggccggcgaggaggaggcggtggtacgtgctcatcaggccgtcactggcggagtccggcgtcgccgagcgctccgtggaggtgggccgggtggaagccatcgacgacatcgcgctggagcgcgagttccgccgcctcgacgacgggagctccgtcgaggtgtccttcatgcagcggccggcggggtgctaccaccacgtcgcgtgccacgacggcttcaaggtgctccgcctgccgtacaaggcggcgacacccacaacgacctcaagctccgcgacagcctcccgtcgttcgccatgctcgtcttcctccccgacgaccgcgacggccggtctatcggacctgctcgacaggatcacctcctcgccggagttcgtcgacgaccacctcccgccggagtgcgtccccgtgggcaggagtccgacgatgatctcgggttctcgctgtacgatggttactacccgccgccgctgaagctggtggacttcgttgccgaccatctgttcgccttcttcatcgtcgaggagaggttgcaatccatcgtcttcgcaggacatgtgctcgatccttccgaggaagtctagtgtatatttacagggaaagtgatcgatctaatatttattactctcttctttcctaaatatttgacgccgttgacttttttttaaatattttttaccgtttatcttattaaaaaaattttgtgaaatgtgtaaaactatatatgtatacataaaagtatatttaacaataaatcaaatgattagaaaataattaataattacttaaatttttaaataagacgaacggtcaaacatttttaaaaaagtacgggtcgatggagggacatgtaaattatctttgattttgcatttcacttcaaaggtggcacgctgcatcagcatgtgccagcagcagcgggacagggagatgagaagaagctacagatgaacacctccccgtgcgccatgtcacctatttttaatatttcccaaatcaaattaccacctaagcatcacgtaatgtgaacactgagtcaaagtagccacctagacaccatgtcagcgaaaaccgctgtccaaaccgccatgggacctatattgtgtcagcaaaaaccaccgtccaaaccgccatgggacctatattgtaccggctttgacagttgagtgaccgttgtatctagttttccggttgaaggatgaaaatcggatttgttgacaagttaagagacctcagatgaatttattctaactttttcttggtttcgctgatgtggtatagtcggggcccatatgttcatgcgcctgtcgaagaggtctctcgcgaggctccgttacgccttggaacgccgacatctcgtcacccggcttccacccacacgacgaccttatgtggaaagccaaaggcataaggtcagagagcggcgagcaagtggccatgccggttggcaaaatgctcgcggagctcgacgggccatgattacgacaatttgactctttgcaaaaattaattttacaaataaaccgtgactaaaacttattttagaaatgacacttttgttcagcaccaaattgtatggcgctgaacttagatacctcagcgtcacgtcaactgacgctgaataccgtgccactgcggatgggaggctgagtcggcgtgccaacgtgcattcagcgccgtgctatttgacgctgaggtgtctaaattcagcgtcatacgatttaacgctaaatagaagggtcattttttaaataagttttggccacggtttaattgtaaaattagtttttacaaagagtcaaattatcaaaatttgtgccatgattaactaatctagaatatgcagctggttgggatgcaggctgcagcttgttacagcaaattgtgcacacataatgatatttaccactccctcccaccgtccctagatatttaacgccgttgattttttaaatatgtttgactgctcgtcttattaaaaacttttatgaaatatataaaactatatgtatacataaaagtatatttaacaatgaatcaaatgattggaaaataattaataattacttaaattttttgaataagacaaacggttaaatatgttaaaaaaaatcaacggtatcaaatatttatggacggagggagtatgccgtcctattgtgcacggattaaagctcaagttacagcaaatgctttttgtaggcaaaaccgcacaagttacgtgctgacatgactgaagattatccagaccagcttcatactggaggggtacgtagcttcagatcatttgtggatcgaatctccaatctgaacaatgaagtttgcagtagcggtcaggtcaacaagaaattcaatcgtactccctccggcccacaatataaggattttaagtttttacttgcaacgtttgatcactcgtcttatttaaattttttttgcaaatgtaaaaaatgaaaagttgtgcttaaaatactgtagataataaagtaaatcacaaataaaataaataataatttcaaagaattttgaataagacgagtggtcaaatgttgaaagcaaaaactcaaaatcccttatattatgggacggaggaagtatcgtcttgctgtaccaggagagccttctccgtctaataacgtctcactggtacactgacatgtggggcctgacatataccacatcagtgaaaccaagaaaaattttaatgtttactgtcttgggactaactttggacggttttaaataattaaggggtagagatttatggtattgggaattggggatcttaacagacttgatgtaaacgtgagggatgtcaggtgaacttatcgcggaggagtgaattacactttgcactgggtgttctattttgcattgggtttactatgtattttcagtttgacttctctctttttcgatttacacacctaggggtcaatgaaaaggcactcttacgctgttttccttaaaaaaatactccacccatctacttttgatagtcatatttcatcttgacatacagaccaaggataagtaattctacttatcatccatttaaatatgctactagttatttctcgtaaaccagcgatccattaatatttacatttcccgatgcccatctagccaatcttatgtggaagaatgaagagtcacgcattaaatccgataaacatccgataaagtcattaaaatgataggttgttagattgaaatatgcctatcaaaaataaatttttcagatttggaaatatagctatcaaaagtagatggagggagtagtatatatttttgtcgacgggagatacccgtagaccggatatagagggtattgggatacgctgatatgaggatctacgtagtacgacatcaagcaaacagggaacaaggattatactggttcaggccccttaataggtaatagccctaatctagttgatatgagattatataatggaaaccacatattacaaagggaatagcagaactcgatgataccgacgagaccgtagtcgagttggttcgactagatcacccggcgacttggctcctgtaggctccgacttcgtaggctgtggtggatgtgttgactgtgagattcgatgccttaggtcctctcggggggtcccttttataccgcaggtcaattggttttaagtagaactcagagacatcggacctcacacgatacagtaacgacccagctctgtccgagtaggactccttccatccgtggactccgtttctgttacatgatgaatttccttaacgtatataggaaacatccgtatacgtgcaggcataccatatcagtatacaacatacatccaagggtagagggtataccttacccatgaccctgacaattttcactttgtatcaggacatatcaaaataattttcaatttgcactagattgtgtcatataactaaagcaaaatcttataaatcatgagtgaaccttacgatttttttaaaaaaataaagaccatgttttcacaaagtttcatccatatcttataaaatttgattttatgaaatttctatagatttgatgatgtatatcctggttctaagcgaaacttatttgaaggcaacatgtatacgctaaacctattgtaaagtgaaactaagcgtgctttatcgggtgcaaagtgcaatttactcttagcaaaatctagagcaaagtcagaactctttttgcacttgccataaatttgaaatttagagcaaagaaagaatttctttccactgccggtgatcatgataaattcctcgctagatagaaagagtattagattaacaaaaaaattgaggtttagggagcaaagtcaagaatgtatttttactgagatgagcaacgaccatgcataaattcctcgtcaaaaaaaaatgaaatttagagagcaaagtcaagaatgtttttccagaattttattcccattgtcgtttgactgaatgactgttggcccgtttgactaatgttctggttatctgatactctctccgtcccaaaaagactaaattcctaggttttggtgttcaacgtttgatcacctgtcttatatgaaatttttttatgattaatattttcattattgttagatgataaaacatgaataacactttatgcatgacttatctttttaaattttttcataactttttcaaataagacgaacagtcaaacgttagacacggaaaccagtactataaaagatactccctccatctacttttgatagtcatatttcatcttgacacacagaccaaggataagtgattctacttattatccatttaaatactccctccattctaaattgatctatatatagttttttttaggttatttctaaatgatctactcgttttttagtacatatttgtgtttattcattaggtctattcgttatttgtgcattggagtaaattgacattgatgcatgcatcacaagcatttataatccacatgcaatatcttgatttgctattagctaggaaatagtggggatggtgcatgcattgagtttgttgctagagtaaatatagtatgagagagttattagcttttcttggtcttagtgtacctatgaaatatgtagatcaatttggaatactccctccgttcccttttgatcatcgtattgaaaaaaatgataattccattttgatattcgcattacggtggagaggcgatgaaaatcctgtgaaggacgttaatgacacttcctaacgaacactgcatgcatctgattggtcaggctatgcggcatgcaaaactaattaggagccgctgcatgcatggatttaatacgctcacaactgattggccagcaatacagtatgcaaaattgatggcgctacattcacggatacgaaacgctaatgcatgttttcgatgctgattaagtgctccgcaggattgtcttggtattgatgcacaaatcatatatgaagatcaattagaaatggagagagtactggtcattcctcgtaaacaagcgattcattaatatttacatttctcgatgcccatgtagccaatcttgtttggaagaatgaagagtcacgcattaaatctaagaaagccattaagatgataagttgttggattgaaatatgactatcaaaaataaaaatttcagatttgaaaatatgactatcaaaagtaaatggagggagtactgcggaatggatggttaattatcaattaaatacagctgaatggatggttaaacatatgatcaattggccttgtttttattcagttttaacagccctgaaagaatcctgtctagtgattcaacttcagcttttccttggaacgcgctacatgtatttcacagatccacttcatattccaacaaaagatatatattgttcaaatcttaaccaaaaggtctaaaaaaacaagcaaaataagcgggattactcaactgagtgatgtgaaaatctttactacctaatcgagaaacttgcacagtgaaaaaaaaggaaatatgtacgtactttaacatagcgtatgttttgccattacaaaccgctctgcagttcaactacttcaagataagaggcattattggcagtcatcactcaaaaataaactcaaactagcatttctgtgaagggtaataagatgggacgaaaaatgcttccagaactaacaatcccagtttttttataagtagcagcatatatattgaccacttctgatattttaaatcttgttctatgagttttaaatcttaatacttattaagtgcatgcagcgcatacactacttaatctttgttacatacagaataagttaatttctatttgatctttgtgtcaaaagtaatacatttaacacttttgaattgagagagtaaatgcagcttactagaggaagaaggttttgcaaaattcaaaacctcacaaataggaggcgcggccggcggcggtggaggttggtttggcacgaggagacgcggccggcgacgggagaccggcttggtgtggtgaggcgcggccagcggtggacgaggctggcttggcgcagtgatgcgcaaccggcagcgaggaggctggcacggcgcgacgaggcgtggccggcggtgacggaggcgggcacaatgcgaggaggaggagctgccggcgggtgcggtgcggactacggcgcacgaaggctggccggcggggggcaccggtgcagtggtcccatatgtcagcagaggttggatagtggtagagcatcggggcgccagcatggattcgcaggtggtgagcggcgtgtgaaaatccagcccggcctcagccgggccggcaatgatgacgcttgaagcgtcattcccctcctgatggcgttgtcgtgcagtctcatccctcttgtgtagatgccgggcgaaagctcagtcttggctctcttttagaccttgacggacggcggcggcagtgctttccgtcgcttctctacttggagacgtcgtttaggcatcccctagccgaaaccacccaaccaattggtgtaagctcactgtagatttcatcctcttgtggcggcgtcctagtctctacaagttagccacgtcagaggcctaaggggaagaggagtttcattcttctctctcaccctctttccctaactcctgaagacttggatagagcgggactttgtgttgattgtaagggttgggttttgggcgatcccggctgtgttttctttgttggcctagcggcagtcggtcacgcttagtggcggcctgtcccgtgctagccttctcctggttcaatgttttggcgttgtcggtgtatgggtggtggtatattttttcctttttcctggttacaacctgtaatcttgtattttttcttctgttctatcaatataacttcgcaccgtcttatgcgagtcgttcaaaaccgcgcaaataatgtcgctggatgaattaagagagggtccactatatgtcattaaaagtttacactagctcagagatttgttatggactttttatcccttctctgtaacatactccctccgttccataatataaggcataactatttttctttggatgttccataatataaggcatgcatgcatgcatataattaattaggacatcttctccattaaattattgcttttttaaatcatccatcctcaagatttctaattctattggatgcatgcattacatttattagggtgatctaaactagaagataataataattgtttcttggtctttgggttaatggtagttgtgccttatattttggaagggggactactaccgaagtaccgaaaactgatttcattactcgtgtgccgacccacgcccatctggacccgccaatatgacctgacttccgttgaatctcctctgctaactgctactaactgattttactgtgatttgatttatcatcaaatattatttatgtatggtttaaatattattagtttgtaaaaaaaataataagatgaatgattaaatgtttataaaaaaattaacggtatcctatattaaaaaaaacaaaaggtagtatgcccgaaccctattttaaacgtctaagagctgaaggagcatttagccatttaagaactatacgagggtaattacgctcgtatgtgtcttgagtctctcttgacctcttaacacacgctttgaactagatttacgtatgaagacaactcatcatttgaccccgaactaaaaacaccacgctataccacatgcgtttccgtgtcttcctttcttgcactccttcccaatcatattccgttgtgtgtatatatttttgaaacgattcgcaccaacacgaatttatatatatcgtcgtgtatatattttttatccctcgagaaaatattcactcatttacttaaaaaaaaccattcaaacggtaaaaaattctggaaaaaaattgaaaaacacttatacaacatatatctactccctctgtttcacaatgtaagccattctagcatttttcatattcatatttatgttaatgaatctagacatatatatctatctagattcattaacatcactatgaatatgggaaatgttagaatgacttacattgtaaaacggcggaagtataaaacttcacaaaatcttaggtccaaacttaacccatacgttgagatataaaaaaaaaatccagcatatgaatagtgtatattgtttacgtttaaatttatcttcttttttttttctcaatgttgtgtagatcaaacttgaacttaatgtttgatggaccgatagatatatatcattacatcattgtcaacttttttcaaaatctttcgtaacatttgtttgaattttttaaaaaaaatacacgagggacatccgcaaatccgctcaacggattagaatacaccccaccgtgtatatatatgtatagtagcgagcagatcaatgaccaagcctcagctagcttgcttacgtagaagtgcatacgtcacgtcacgtcaatcgattccgactccgaggagccaattaatgggcgccggcgccggcgactggcccgtcttcgtcgacggaggaggctcatcgtacaaaacaagctggtccggcgccgccgccgtcatcgtctgcctctgcgccgtcgccgccgtcttcctgatcatggccggcatcacgcagctctgcaaacgcgtcttccctgcggcgccgcccgcgccgccgcctcaacgccggcgcgacgacgacgacgacgatggcattgtggtcgccgtcggcatcgacgaggcgacgctgcaggcgctgccgctggtgctgtacggcgaggcgaggacggcgcagacgagctgcgccgtctgcctggagagctacggcggcggcgacgtgctccgggcgctgccggagtgcggccacctgttccaccgggactgcatcttcacgtggctccggcgccgcccgacgtgcccggtctgccgggcgccgccatcgccggcgccgcccgccgacgttcttggtctgcagctctctgtttaaattttatggttaatctttctttctttccattcattaatttatttgttacaccacaattaattaatgtcactggctagaagtagaagatggaacgaaattgcttcaatggatgtaaatttgggttccttgtgtaattataggttgaatggtggtcaagtgaagaagagtaaattccctgtgtacccctgaaaactcactcaatccctttcatacccctaaaatttacccgatcccttctatacctctgaaatttcaatttgattccttccatgcccctaccgttacattttccatcattttactgttacgtttggttgcaaatgtcttttttgcccttgatgctttaggtttaaatataagcttcaaaaataattgaaaattttgtttgagtgcacatcgtgtgcattttataaaactaatgagactaaataattagtgcagaaaattttgacataaattttgaaaataaaataaatgtaaaaaattaaaatttttatttgaaattttaataggacaatggatttttttatcaggagcattcataaaaaaaatgttgtgaacattggtatacctatctttatatgaatgctcctcatttttatgaccttttttttaaaaaataaatacgtattttttttatttcattatctaaaaatatttttttgggataaataatgcatcgcacaacaaactcataactataatagtctcatgcgagaagcttttatatttttaataatgtaattcatgaatttctttgttcatccaagggtaaaatggtcatttttatagaaaatacacggtcaactaacggtcaactgacgggaggggtatgcaagggatcaaaatcaaattttgggggtatataaggaagtaagcaaaattcaggggtatagaagggattagaaaaaatttcaggggtatataagggattttctcagtgaggaaacttgatcactagctataattctctcttttgtacataaatgttttatgagtctcaacaaaatttgcttaaattaaagttgtcattaatattggaataatgttcttgagatgatagaaatacgtagtactccctcctttctaaattgatcataatataatggaatttaaaatttctcaaattgatcatcatataaccgaatggacacgaatttcatcagaatacaattaatacagcatgggagaatgtgtgcgtgctaaaatgtaattgacatgatgttttaatcgatacatacattgtaaaagattcaagagaaaaaataatttgaattttcgatctattgaataggcttgctaaacctgactgcatgcaccatgcaatgtcggtaatgttccctcgggctcatccatttttttttcttccatttgatggcaagcatttctcttaaggccttgtttagttggggaaattttttaggtttgattgtcacattggatatacggacatacatttgaagtattaaacgtagtctaataacaaaacaaaattacagattctgtcaggaaaccgcgaaacaaatttattaaacctaattaatccgtcattatcaaatgcttattgtagcaccacattgtcaaatcatgacgcaattagacttaaaagatttgtctcgtaatttacacacaagctgtgtaattgatattttttttcatatttaatactttatacatgtgtccaaacgttaaatgtgatggggtgatgggggaaaagttttgttttagaactaagcgaggccttacttaccgtagggaaaaaacgcgaatattaagaaatgatctaatataaataattagaaagggtgaggcttcgaactcagatcgtctagcccaccaccttgtggatcgagctagccgaaagaccctggtatttctcaacttaccgtaggaaaacatcggggagttcataggagggataagagcgcgtagcgggaaagccaggcttggcgccaagaaaaatggcggtaaaaaggaaatggcgggagtccgtgctgctcctccggttaatctcgctttcatacacctctctatgcatctgggccccacttggcaggctgctctctctccctctcactgccggtaggacccagtctggctgttgatctgtgtgggcactgtgctgtatagccaacgtccaagccatatttttttcagcgtatttatcagattattgaaatgttagtttatttatcgaattatttgctctaggattaaaaaatgtgttttctaaaaaaagacttatactgcattacttaacccatttgttttaagatatttgtcaagtttatttctaaaaatatttaatttatatgtataattaagtacataataataaacagtgataatcctctcaataataaaattcaaacagggtcactcaccagaacagctaacaagcgttcatccaacaggttacacacagtacaatgatgattggtaaaatagcagaaatcctgcagcatcaaattacagatgcatgaactgcagaactggcaagcttaactgcagaactgcagcactcttattccacttgcctcaccccacaaacaaacggatacttctgaggggcaaggaaaggcaattacatcacaagataaaaatagactcaatatcaactctcaaacatacagagatactggtatagacacaaattttcaaaagcaatgaacaatcagaaacacatgcttggtgttggtgcagcaacgccaccagaagcccgtccagccatcttcatcgcgagcggatcccatgccttgccctcagtgtcactgcaattgccagacttgtttggatacatgtcagccacggtggtggaatcggcgtcgccctttgcagccaatgccttcagacgaatgcgctcggccctcgacccgattgtctggccaataatggaggctgctatggtgaatgccatggcagtcttgggcatgttcacagatttcctcagcattccgatgaatggaacagcggcatggacagctgcaaaccactgcggggagaatttcttggtgtgctcacgccacaccccgagagggatgtttgctgccattccaagcaacgcaatggctaccatctttgcaggcaggggctggggacggagagacttcacaagttcagtccgtgcaagggctgcacgtatagcgaccacagcaggcgggcacttcagcttcacacctgctggtggttgtaaagcctttgcaacaaggggcagaatgccactcattgctcggtaagaccgggcaagtgggcactgcccattttccatccattcgttgctcattgcctcgtgcgatgatgagttacctcctttctgctgaaaatggttcaaaacgtaacatgagaaaactgatcggattgatgaaaatcctagctatgcaactatggctgtccgatcaagaacattagcacttggatacatgaaaagtaacatatagccaaacatccaaggaaatgccaaaatgcctacttgtgaaccaaagtcacaatcattaacttcaactgaacaaattctggatcagttcgttataacaaaatggtaaaaaagttagtagggaacattcttactttgaataatagacaaaattaagatagataattgaggcttgcattgttattaggacttgattgcgagaaaccagataggatttcacaaacatagccccataagaaaaaagaaacaaaataaaaggaaggaatgaggacaaactttcatggaattctggttcggattgctgggcttcttgtttgactgatttagattgttgggcttcttgttctgccttttccccttgccattaaagaagttaaaaccaaatggcccaaatgcagatagacttattgtggcagctctagcagccaatgggttaaacagcagagcaggttcaggattggcatcaatgctctcactgttgctctcatcaggtaaatatgactttcctgaaagcggaactattccatcccatccatggaaaagtttaaatgctgaatcaaagcctggtccgtcctcaaaaattggaccatttcctcctcgggcctgcacaatagcacagattaaggatccaatgcacttttgatattgatattgtcatcaccagaggtcatgtaaagaagatcttacagctactggcaaagcagaagaaaatgaatatgttgtagctccattgatgtttctcaggaatgggcatctctcgacatttggatgaccaaagaggttctctgatgatgccgattcattaagaaagctgctgaagaacatttccatcctggagaaaccatgccaaatgaacataaatcatattatggtaaatgtagttcaataaagcataaatgaggattgtgaaagcaacagacttgagcatgaggaaataaataatatcgtcatgataattgaacatactcagatcaccttcgaacaaacagcatgtatgcgcatgtgagagcaaaagacaagcctagtaagttcaagcaatgcattgagacatagaggccattaatttagttagttctgtgattctacagtaccctaaatgaattacaaggccaatagagtatagtactttcaggagtgtttgctttacaaagagagaaatataacagaacacacttagtgccatgccagatcaatcatttttgttctactcaaaacagcacacataccttttaacaaactatattttctaaaagggcagagaaacagtgcataaccatattatgcatcagaaggaataaaacctcttacaaagtcaagctatataagtacatcctgggaaaaaacgagatgctgccattgcagcattgcccctgctaatacatgcatgacattgtatatctacgttggtggccaacggcgcaccaagcgacacccaacttcttgtatggtcaaggccgccacttggttgcagagccaagaagacgggtcttagagaaatggctcattgaaggtcaagattttgccataaatggctgaaacatgatgtgcacttttaggaacgatttgtgctaactcagagttggtcgggctcagtgaaggtcaagatgttaccataaagggctgaaacatgatgtgcacttttaggaatgatttgtgctaactcaggagttggtcgcgccgtatattcctattgtggatagattctgttgtcttgtgtgttctagtagctgttattggcccatggcatcattgtagttacgagtactagttagacaagattacatgataagacattgaccaaagtcgtctcggttatctttcacctcacagattcctcacggacctgacgacttggttcatgaggactcatggacctcaacaactagaaagaactaggatcagtttgctcgcgccaatacagcaaccttcgttcaatccccacaaagtggggcggcattccattttcacccaggccttaacggcgcaactagagcaaacgcacaactacaaagcactaggattggtttgcaagcgccaatacagcaatcatctttcattccccacaaagtggggcagcattccattttcacaactagagcaaacgcacaaaaactaattgaatggggcgtgtgccatacaaattttgtctgatgcactttttgcacaccaggccaccacccaattctgaagaattgggtggagtaactgggaggggaagcagaccgaaaccaatgactaacacacaaattggacaccaagtccagtcgattgtatcagacagaattggggtcaatccgtctcgacgaggaggctaaagatcccgtccacagcgatcaccgccagatccacctaaacccaccacacccacaccacaccactcgcaccaaaccaaaagtagaggaaccaagagcaaattaaaccccatgccgccgcgcgatcgagcggggcggggtggatgatcgatagtggaagctaacgaaaccctaaaagccttaagagaggcggattaattcattcaacgatgggggaggagatggaaacgacgaagagagagagctcacctcgccgatctgccggacggtcggacgaacacgacgggagggggggatcgtgtggagggcacgcacaggcaccgcggatgcgggaagggagcgcagctaccacgcgacgcgacgcgacacacctccccctacccacctaccgcgacgcgacgggcggcgcgggccggatttagcgagacaaatgcgattgatctaccgccgccgccgccgctgccgctgcctccgccgagggatccaggggacgccgccgccgccgccgccgccgccagcgctgatgaggtgggaggggaggaagggtggggatcggatggcttcgtctggtctcgcgccggcaactcttcttctttttttttttcttttctttctcgccttcctctccgagttaatttttttccaaatatttccattgacatgtaaataacgagtgctaactaatgatgtactccctccgtttcacaatgtaaatcattctagcatttctcacatttatagtaatgttaataaatctaaacatatatatttatgtaaattcattaatagcaatatgaatgtggaaaatgttagaatgatttacattgtaaaatggaggaagtaacagactttgatcataaggctagctcagcccctgaaattagtctctgagtgaccatgcctaagaattcttacctccgctatactcgctcagtccctaaatacctttttaaacatatttgatcgtttattttattaaaaaaaataagtaattattaattattttcttatcatttgattcatggttaaatatactactaaagttaaagtctttgaataatattcacaaaagtttttaaataagacgaacggtcaaacatattaaaaagccaacggcgtcaaatatttagagatggagggagtatttgccattctatgttgttctaggttgtttagtataaattaaagtttaagtagagagaattatagcactttaaaaatagtacctctcattaaataatattatatatgttttttaatatatgaagtcattgactttttaacaaatatttaactattcattttatttaaattttttatataaatataaaaattttaagtcacgcttaaaaacatttgacgataaatcaaatcacaataaaataaataataattacataaatcttttaaataaaacaaatggtaactatagcatagaaaatcagcaacgccatatattaaaaaacaaaataagagtatatgattgaaagtaggagggtgaatgagaataaagtagaaaaatatatttaaatgagaggtcaatgatgggacatatggtactgtatagtgatgtgtatagtgatgactattttaagatgaaattttaatttgggacggaggtatagtaattggaatcttgctaaacattggcgtatataccccgcaaccaagttggtaccaactaaaaatgatgaatgttaatccgatgactgtagctaatcacaaggaaccacctagaagaccttatggacttctacacatatgttgtcgtcagggttagagaaaagacatggaaagaaacgaacaaaaacatgtcaaaacttaattaacctggcgtgttagcacacaactaagcagaaatctagccacatctagaattcaagatcctagatattaagtacagacaaacaattgaatccaacccaagctagcaaacagtcgtaattatttatttttcttgcacattcgtaattaattaattaattaagtaagcaattaatccaactcattgaccttgagctgcaactaaacacgccacgctaccacctgcgtctccgtttccttctcctcctccattggagaccatagcttgcttcttgctgcctcaccatggtcgacctcagctagagcttgcttgcttgcttgcttgcttgcgttagctaggcaatgagcgcggggagcccatcgccgggtggcggcgatggcggcggcggcggcgggagtatatttgggtcgggtggcatcggcgggttcggctacggcgtcggcgcctccgtcggcgtgctcctcgtcgtctccaccgtcgcgctcgccatctacttctgcagccgcacgtccatgccggtggccgccgccgccgccggccgcccgccatctccgcctcgaccacgcgacgacggcgacgtcgagaccggcaccggcatcgacgacgcgacgctggaggcgttcccggaggtggtctacggcgaggcgaggaaggctcgcggcggcgcggcggcgacgcagacgtgctgccccgtgtgcctggagaactacggcgacggcgacgtgctccgcgcgctgccggactgcggccacctgttccaccgcgagtgcgtggacccgtggctccggcagcggccgacgtgccccgtctgccggacgtcgccgctgccgagccccatgccgacgccgctcgccgaggtgacgccgctggctctcgtcaggccgtcgtgacgtgacgtcatcaggtgagccgtgtgttcttggtctgatgctctctgtttatttttcttttctttttttcgtttgtaatacatcagaaaatatcactagaagtagacaaaaaatgaagcaaatttgtttgtttccacggatgtaaatttgttcatttgggaatttgacgactagagttagataaagattaagatttttatggtacgcttttcaaactgttaaacggttcgtttcgtgcgaaaattttctatatgaaagttgctctaaaatatcatattaatctattttcaagtttgtaataattaaaactcaatcaatcatacgctaataccacctcgttttgcgttaaaaacttaatcttaatcttcatcttcatcttcaggagaaaataacaccacctaattctatatttttgtactactttgtacatataaatgttggatgagtttcaacaaaatttcctcaaaagttgacacaaatggtctgaacagtaatagaataaaaagggattaattgagggtaagaacattcttcgcatgctgtacagctcaaaataaattttgagtgtctgtccttggatgtgaattgattgagaacaggaacaggaaccaggaagtcaatcaatatactggatgtacaaatctcccctgtgatacagaatgcattgaatttgtcctgaatcccagattcacaagcattttcactagataagtaccagcatttttgaatgtattgtctattgagttcacatcagaaatttccatgccatgttcatattcaacatacacaaatttcatttgctgtaattcctctatggacatgaaaaataatgctaatgatacacaagaagaaaattctctctacaagtaaaggagacagagaaagtaagattatttcagagatcaagatggagcaattttaactgctccctacacagataattcacaaatgttttcactttcacacccaagatttgccaccttcccttgcaaataccgaagaatgagcggaatcgaaaccattgcatcatttccaggccttgtgcacaacctagcaatgatcacaaggttccgaagctccttggagtcatagatattgccaagatctgcatctaccattttgtacattgtgcaggcaaatccaggctcctgcacccactgcacgagctcgccttcgccgcccggcgattgcccggtcactagctcaaggatcagcacaccatactggaacaccaggtcccttctcctctgctgaatttcatctgaagatcacatatatggaatgctgtcagtgtcagttcctgccaatgttccacacaaggtgatatagaagagacaaatctggagttgtttctgttgtttgggtggtaactagaccttcaaaagatgcagcattggattccaccgttcgtttcgggtcgtaaccgatgacactgatatctgataactgaaaatggtacaagcttcagttggtcgatcgatgtgcttcagacatgtatgaacaatggttactgtgaatcttacctttgcgacaaaattggcatccatcatcacattgcttgagttgaccgacacatggaacaccggaggatcacagaagtagtacaggtattcctgcatcaccacacaacaaagaacaatgtgatgtgatgtcactcactatacaagttcagaaaccaaatctggcatcagatgactttaaattgcattttcctgccagtttgtgtaacatgttgagagcaatgtagtatggagatttatagtaccaatgctgctgcaacatctatggcgacctgcaacctggtcctccagttcagaggcgtcctgagaggatctgccaagaaattaaccatcatcacaaacttgactgacaaaaccacacaatttctgaagaattctgccacaaaatgcgcaagcaaatttaccatggagacattctttcaggctcctgttctccatctggtcgaacaccagaaacctgaaacatcaaacagaaaaaattaacaaacactgtaaccaacaattcaacaccaaacaaacaaacgaaaaacaaaaagattcagatgaattcaggacagtgatgaactgaacctcacctggagtggccgtcagagtagccatggagcctgacgatgtggcggtggttgaggcgggcgagcagctgcagctcgcggtagaaggcctctctgtcctggtcgccgtcgccgccggctcgccgcaccgtcgcgacgaggccgtcggcgaaccgggccctgtacgccgcgcggccgccggggccggcctccaggatcgcgctgaacccgttcgtcgccgcctcgatctccttgtgcttgaatttccttaggaatggcaacccacctgccaagaaaaatatgagaaaattcagcgaaaattcaggctgaaaatgtggaaaattcttctgcagggtgtgcgcaaaagactgaagaaaccaaatgatatcaccaaaattcccttgctttaaacaactggttccaaaagaacaaaaaagagaaaaatctcaagaaaactaatgcattactgcaacaaaaccaaaggcaagaatggccacaaggcatcaaatcaagaaccaaatatttcttcagaaagcagctacaaagaagaggagaagaagaagagggccgtacggttgccgccgaggcagagctgatgccggctcaggcagcccatcctcgtcggcgccggcgcaagagcacactcgtcacctccaatgggggattggattgcagcagccagtgactgaccaaccgactgactgacagacagacagactgacgagtggatggaaggatgaaatactgtttggcagtatggttgcctgcagcctgcagctgcaggattggcttcttcttgctgctgctgctgctgctgctacttgccttgttgatggagtcatgcaggtacagaaaacctacggacgattgatggcgtcgccaaatgccaagattactggtaatcgagtatgctacagtactgtgcttgagattgttgttgtttgttgttgcctttgtgtcggtccccttccagcctagcctgcttttggttcccccagcttcgtctactccgttcacaaatataagggatttatacacagagtttagaatatctgattatcggtacgatggttatcgaagaagtaccaattttccagttcattttatttattgctgtagttgcaccgctagacgtaatatttcttaatcagatagttttagctcaatctagaactctgctaaactgtcagggttttcttatatttgtggacggagattgatattttacattgtgttacagtgtgagtgatgattccgtggcttttgggagggtccctctcttcaaagttgttaccctcgccgtttctctaatttaaagttgtcgtttaagtacgattagttatattatcaccttttatcaatctattaaagataaaataataactacacgttagtatttctcattataatgaaaagaatttgtgttggcctccttacttccagcataaagccctgaactagggccagtgctgttcttttctgaaagatggccgatcagaattcttgtttagttgcatggaaatacttgttagattagttatctgtcaggaaggtattaaactgtttgggttaatctctttttccttgcccaacctgagggaaagcactaacactgttgacatttttatccagccattgagtaaccacatccaaatgtgccagctcttggatttcttttttttttcttttttaccttttttcacttttatgctgctgggaatcttttcacatcatgggaaggggatattccaacaatcttggacacaggaagagaaaaaaaagggggggggggggatggaaaaaaagagagagagaaacattggagaaattgcagaagtgtcatgcttccttgctttcagtttcagccaggatttgcagatgtgacattgttttcagagcctttcatctcaagtgatcctcccaaaagaagagaagagaagaaagggagatgcatgtacacttggctgcttgcaaaaaatgtttggttttcttttgtcaattcagttgttcggtgcaaaattaccctgccgtttgatccctcatcttttttttttaaaaaaaaaataaatacttaaaaggtatgccatactattaattaaagtaccatattgtatcctaaacattccgtttatttaaaatttcctaataatcaaaatcgtagcagaaatgattaatgatgataagtaaatgaaaatagaggggtagggagatggtttaaaatgttaatggtagtagctttttttcgcgaacacgcaaaagagttaacgctaaaatattagaagaaagtagagtttaagttacacaacaaaaaggttaaaaatagcattgccgaaggaaaaagaaaaggaaaagactgaaaagattgctaagattaaactacgaaaataaagttggtagagagagatccgccaccactagccaccgcctcctaaacactaacagtcggatccaccgtctcctagccgtttaccccgccacgaacgtaggcccaccgccctcctctatctccgcggctttggtgccaccgccgacacctcgctgcccgtctgtgtccaccgcccaccgccgagccggcgcctctcatggacatccctctaaacccagcgattcccccctcttccccctcccccacccccatcctagcccaggaccctaaaccattctactgttttcgtcggggtcgctagagttggagaaggtgttgccggagctggaggggaagagctaaggttaccggagcacaatcgtgaagtaaatctcaatgtcagtaatctgcatgattttaacataaaaatcattcgctagccatttagccattttgatcaaatattcagattgattgacgcatatattctccggacattttgatcgagcaacaacagatcaattaattaatcacctgcaagtcaaacacaatttttttttatctcttggttaacgcagagatctagtctagttgtagtagtgtggcactgtggcgtccttggcacgtgtggtgggcgcgcgtggcgcacgtacgaacgtgtgctgcgcgacaccccacgtgccgcacgatccaacgcaatacgcaggtggctacactccaaaagaaaatgtacgtgtatatatactcgatctgtgcaaaaaccctcacgtacgactaataaatactgtacacgagtactcggcagcatgtgacagtgcgtagtaccagtacattgtgtgaaattaatcctgcacgcttgggtagttcattactttggtttctcagttgccatcttcttcctttgtttttttttcatgcccataacttttgaagacgttttactattcattttattaaaaaaatataattatcgtttacttggttatgatttgttctactacacttatatttttatatatttgaaaaaaaatatttttacacttatattgctaactttgttgcttatactagtattatataatcaatgaacttttctcaactcaattatcttatttccgtcatgggcaactttgtctatgaagtagggttcctcctatcgttttcgacgcggttaccgaaccccgcggtaaccacgagacatagtgtgattaccttataaccgccacacggttttgtaaaccttgctataaaaaaggaagcttgccgtgatctttctaccttcttgatagcaacaaatttatgacacaactacaatcattttcaataagggaagcagtgtccactgaaggacgtgagagatgctttccatgtatgcaagcatatatttgattctaaggcatatcactacagtgatctatcgactggccaggaatattggagagcatgaccgtcccacagtatcatgttgatacccaccctgacagtatctctgatctatctaccttcgtgatacccagcaatatctctggtaatggtgctctgactaaccaaaaggataatctgatttttggaaatcgacaatggatggtgtcttcaccgtcaaatccttttataaagctctgaaattgcaatgagtcccttacacttcttaaagacttttgaagttgaaaattcctctaaaaatcgaagtttttaccaggttcctcttaaggagtagtatcttgagaaaggataatttgcttaagagaagttgtaaaggaaaagaagtttcaattatgtgttgaagatgaaaccattgaccatacttttttgaaatgtgtcgtatggcaaaactctcatatgaagtgcaatttttttttggtggatggttaatgcaatttgatatgaagacgggaaacctgatttgcagttggagtatcagctgtgatttggcctatttggggagcaagaaatgcggctggaggaaaacgaatgaagacttcaacaggggcggggcgcggctactaaggtcccgttcatttaagtggtaggggagggcaactcagtagtttttccgttactgacacgtttttcaatatgctaaacgatgtgttttatataaaagttttctatataaaaaagcgtaaagaaatcaaataaatcattttcaagtttacaacaattaatattcgattaaccaagcgctaattgatgcggacatcactgtctcggatacacgtaacaatcctccaacggtcattcaaggaccgataacaagagctcgtgcgcgacaattaaatttagaggtgagttcattcctatgttcttctttgtatgaattcaagaatagattgctacctaataattatattgtgattaggaacaatggaggggacaaggagacacttggagaaggacttagagccatggaggatcatcggggacgtccaagtcaaggtggaggcctaaaccaagtcgacgtcgggtgtaattcggagtccaggaccagtctgcactaaaatggacgcccaggtcgcatacgtgctcggattggggcgttctttatatggatgaaaagctaagaagataacctttccaatggttttggtcccacgtccaaattctttccgagtcaacgggaattgaccgaacaagttgacatccagaatctgttccggtgctgcgtcaccgtatttgggcttttggcccgtgtatcgtgttggaacccattagggttacgtcaagaggggtttgcacgaccctaaactctatatatcagtacccgccgccgtctttaggtttttgggttttgcttagattaatctatcaagaacagtttcgccgctagatcggtttgtaagaccccaactcgtgagcttaatcattcatctgcaattttggttgtttttctatctcgttcttgtttgtgttcttcgattggcaaacaggaattagccttctcggcgaggtcatccgcgtttcgacacgggtgataaccagaggagacgtggtgctgcgattgcggggctcaagagcgtgcgcgttcaagaagccggatcgatttgtgtcgcgactccgtccaaatcattgtttatcagaacctttcagaagatcaggaaccctagtgcacatcactaatggattgtctcgttttaatacacacagcaaatgtgagatgtatagtgcagggcatggtggaggtttcacgctggaccgatgggaagaaaaaagacctctgaaccatccgatggtggaggtttcatgttttgactagaattatagctagcatttttatatatacccaataccttctaagattcttatcatcaaatttgcaaacataagttggagtataccacttcccgcagcaacacgtaaggaatcatctagtatacatatacatatgtattgggatgcaattcttttaagagtaaattgcattagtgatacacaaacttgttaggtgggattaattcagtacataaacttataaaatactagtttggtgcacgaacttgtctaattcgtgcaaaccaggaccacaatggcttgacaaggttaattttaccacgctaatgttgattagaatgtgacgtgcatatgtatagtgagtatacataagatgtgctatatttataaatgaggaatttcatatatttcttacccttttcatatatgtctatgctatcactatatctcattttatcttttcattgaagaggtgtatgtctaaatataaatcttctcagatatgtgtttatcctaactagtacctaaatcaacaggattagccatatagtgttcttttagccttggtccaaacgcaccggacaagttcatgtaacataacgagcattttacaagttagtgcactagattgcacctacttaacaagaagttcgtgtactgctaatacaatttactcttcttttaattattatgtaggtacttattcgatcatgagatgttgggtgcgagaataattagccgtttaatatgtatcgtttacgcaagttctcctaatatagcttacacaatcctccatattttttgcgccttacacgtagggcccctttgaatcacaggaatgaaaaaaatagagaaataggaaaaacatatgattctaacaggaataagtgtgaaacagaggattacaaaacaaaaaaaacataggaataaccgtttgattgagccacaggaaaaacataggaatttgaggagagataaagattcaaaggattcttaacatgaggtagaacctcatgttaaatttcctccaaaacttacatgggaaaaggtatttcataggaattttataggattcattcctttgattcaaagagctatatagggaaaaatcctataggaatgaaatcctttaaaattcctatgaatttcctttgaatcaaagggggccgtaaggttcgtttcaaatttttcacacccaaattatagtcatacaagaaagttagtgtttctcaatgtcaaatttcatgtgatataacaatcatatatataactagcctatatgaatttaagttatttaagttctagatttaacatagttattcgcatttacgactaattattttttcagtaagagatgacatatctcttgataacagacacgtatatatcagcctaattttacggagatgtatatagtgtaggatgtacgtgtgtgcgcgtaggtgtaagtgtgcgtgtgtcgtgagcaccggcatttcagccgtatttctaaaaggaaaaaagtttaaaattttgcagcttttatatcccgatttggacgtggattaatttccagctcaaaagtcaaaaaccaaagagtccacagccaccggtctcatcgctaaccaccaacacctaatcgtcattatccgagactgttagatccccgggcccacacgtcagtctcaccccgcgaaataatctaatcctttaaacagaaagtcaaaagcgaacgcgaagaaaccgaacagatccctttcttcctcacgactcctggatttttataaattacacccccgaaagatttcttctctcacaatccagtcctcgaactcgaacccagccatggcgaccaagcagagcctcctcctcctcctcgccctcctcgccgccgccgcggccgtcgcctccgccgtcaccgacgtcgagtactgcagtgagtgtccctcccgctcgcccccccaaaaccccctttcttccgcggttctgagggggcgaaggttacgcgaagattggatgatttggggttcttgatgatgttgctgttgcttttgcgtgcagataagggcaagaagtacccggtgaaggtgagcggcgtggagatcgtgcccgatccggtcgcccgcggcgagcccgcaaccttcaagatctccgcttccactggtataataaaccaacctctcccgtttcccccttttgcaaatattactcttcgtgatgcagttggggtacttgttccgccatgaattttagtgtactagcaccggctctgaagtcaattggcagtataattgcgagaattaagctctgtactagtggaattttaaggtggtggtagaatttcgcttgctgtttggcctggagaaggaaaaaaagatgaataataattttgcttgctgctgaatgctgaccagaattttcttgtgattgtacggtgaggttaggattggcatacgcagatacactattatctgtggcgattgatggcttgtgttttgcagttttgtttggggatgagtctacactgtgtagctatatgcctatggtgtattaacagcaagtgacagtgcgtgccatggagagtctccttttagaggtgttagggtgtgtacaattagagtttaatttagtggttgagagaaattgcagttatgtttagtaaattctttagacatcggtggcgctgttcgcaagtgcgctccttattatgctcgccctgtagtatttatgtttggcggtaatggccatgtagaacgctgcagagccctagttgatttgtgatttgctgatcacaacctagagatttaggcgtaacatggcattgatttcttgtaagcctttatcagaaatatcactttccctatgtaacggcttaggaatttagggccagtcaagtactcagccataatgaaaacattttttgaagattgtcataccaccttttatgttatgaatggccttctctaggttaggtagcatatattttagaggcaggactgctggctcatttcccctgcttgcctatgagaagcggtctgggtcgctggcgttgccagaaaaacaggagtatggttctgaagatgatgcaatcatgtgtatagtgtgcatcctgttagtaggacaaatcatgcctttgacattttctgcttatcagttcatgtaggcgagtaaataagggaactttagttcctgtcttttttttttgaattaatgttttggttcttaactttctgtataatgcgcatttaacatatctgcacaataaatctataattgtgtacatttaaggaagttgactaataagaatctttatcggcttaattacacctgagaagcagcatccatttgcctattattatgtaaaaggaagctaaaactgaatagcaagcagtgctttttctaatattcaaaatctgtgggcttgatcagtaaatccaccagattgagtcatctccatgttgcctgcagcctaccctattttttacagggcatagcaaattatgtatggacatgattaaattcagtgtatgcacgttgtggtgacaatgatcatttagtaatttgtcctttgggacaccaaagcagagtccatcttattgcatcattagtttccgcatcagtatactgtcatggtaggaataggcacctctgtaagtgaaccatccaaaactttttgttagaaaaaagggtgaagcatccaaagcattggaaatggcactgtgcctcagactcagtcatgcccactgtacccaattttttttttagtttttcctttttcttgaaacgtagtgcttaaaaccttgcaagttatagccttataggtaggtgatagatgtatgtgaggccattttgcatgtggtgtagcatcacagttggcaaaacccgtgacctttttctttcaaccaaatctaaaaaaacaaccttagtgatttgttttaccatatgagtgagtcgaatgtagctatgagtacatttcattataaaccctgatggtttctagatccaatccttagtatatatattatgcttgtcaggactcaggaatctagtttaggatcacaagaattgtttatttctttctgccatactgacaattaatttataatgaatctcgatgacctgctgcagataaaactatcggtaaagggaagctggttattgatgtgaaatacttcttcttctatgtccactcggaaactcgtgagctctgtgatgtgacttcctgcccggcaagtggtgacttcttggtagctcatcagcaaaccctgccatcatacactccaccagtaagtccgaaatttcgcttctaagtctgaaatgtatgctcttacacgataaattcagctcaaataccactgctaataccaaattgtgttttgtgatcatcttacttcggttcatgcttgatgacacttgcttcttcttcagggctcttacaccatcaccatgaagatgctgggtgataacgatgaggagctgagctgcatctcgttcgggttcagcatcggtttcgctgcatcagaagccaccatctgaatgcatccagaggcagaattcagaaatatcacaccatggatgtaattacaaaagcacctatgtatcttagatcatagaactcaaatacaatgcgcatctgccaacacattgtgttcaactaagacgttttatccagagttgaacatacaataaaaacatcactcactagtgtacctaactccgtttagctgttgaaatgtgttgcattgcatgttgaattgagcctggatgcatcttgatcttgagaaaaaattcctgaacttttgaggtgtgaagcttgtgcaagcaatctgggtggttggtgctgtacttaaccactagccacatgggaaaaccatgttatgttgacagcttagggtactagtatttggagtttgcgtgtcaacatcagtaaggatgggctaattattctctcaagttcactctgcttcgttatttgggttaatgtgatcgagattaggtagggaaagcataggatttctgccgctcgaaaacgagagactgtatataaaaaaaacgaaattgggattgctacttttacctgccatgctaacatacattcagtttaattcgcattaacaccagttgttaccacttacgaccagacgttaatttaatttgcaggacacaagttgttagcaaacgttaatttaatttggagcgatgcaaagtgtggatccaacgatttggttaataaagaatccatgattaattttaacggatttaatcatgtgcacttagtgtcaacttttcgtgtaataccttttaaggcaccgaagcaagatcatttaaccaagcaaactcatttaatcaagcaaaccttacgttcaacttttttttaaaaaaaaatccgttcaaaaatctaatcaagcaaaccctgtttaataaacccatttaatttgcaaaccctgtttggaacgcagtaatcccacttaatttcgtcatggctgtatcaattttcgtagtaattccacacaaaatggatcaatttcagcattgatacaaatttttttaccgcgttccaaacaaaacctaaaaattatagtatcattaggcgttgatcacctgaattaatgcttaattaatcttcttccatccctctgtggctctgtgctagaggaggttaatcaagctatttaagcaagcaaaccctgtttggaacgcagtaaaattccatttaattttgccatagctgtatcaatttccgtagtaattccacataaaataggtcaatttccgtatgaaaataaaaaatctccctccttccaaagaaagcctaaaaatatactactactccagtaagtatgattagtcccttgatcacctggattaactcttaatcttcctcatccatccctatatgctagaggaggttaagcaataattaagcaaccattagccatgaaaaagacttgactaatgactagtacaaaattcaattcaaccttgttgtcaaaaaggcggttaaaaaggaagcaaccccaacccccctctccctccctccatccctcttcttcttcattccttcctcctccctcctcttcaaccatcaccaaatccacacgcttcccaaaaatccaaacccaaattgcaaccccccaatctccattgccgtcgccgccatgatcatcaagacgctcaaggcgcggatcctgtgcgcgctcaagtcctcgcttccggccgccgcgtccccgccgccgtcgccgaccaagccggggcgagccgccgcggcggtggtggtggtcgcgggtgacgcgttctccgacgacgcgtccttctttgacgcccacgagaccccgaccaagaacggggcggagccgatcgatgattgggagctcgtcgacgaggagggtcgggttggggttgccgcggcggcggcggaggaggaggaggaacagctcagggagttcccggcgaggtgcccgccgggaggggagggggcggtggtgctctacaccaccacgctccgcggcatccgcaagacgttcgaggactgcaacggcgtgcgcgcgctgctggagaacctcgacgtcgcgttccaggagcgggacgtgtccatggacaggggcctccgggacgagctctggtccgtcacgggggagaaggccgtgcccccgcgcctgttcgtccgcggccgcgacgtcggcggcgccgcccaggtgctcgccctccacgaggacggccgcctcctcgccctcctctcgccgggcagcaacaaaaacaggagcgccgccgccgccgccgccaagtgcgacgcctgcggggggctcaggttcgtggtgtgcggcgagtgcgacggcagccgcaaggtgttcgacggcgagcgcggtcgcggcgtgcggtgccgcggctgcaacgagaacggcctcgtcatgtgcgcgctttgcttgtagtagcaaagtaaaaattaattagcggttaattgtcaattaccacctcccttttcactcactctaatctgcttatatctttttagtagtaattaattacccctcttgatggttttgagtgtgtgtctggacttagtggttggcctgtcatgtacataaactaccactactgctactagtacttgcttcagttaaactacatatgtgaatgtgatgtatatatgcttagtttagatgtcaatttcacaaccttaatttgcatcattgcatgcatcaatcaatcagtttcctttctgatgaaacttggtggtttcatgaaaaaagactttgacaaatggcaatcagctccaaattaaactgctggatttcatcatcttttggtgtggatttcagaatgtttcctgacataattcagcagcttagcgcatttctgatttctgacagaagcaacttaggattctcttgctgtggtggtcctgtatatatagagagattattattacagattagaagagcaagcaattgcagctttacacttttgctgtttgtgcatagccttttggattaaaagaaagctggtgtgttaatgtcttagcagctttgcatcattgcatgtcaccactcaagtttctgaagattttgatgcactgaatcaatcaattcccaagtcccaactactttatgatgtatcacattcagcaaacacaatgcatcacagtagcaaaaaaccatttgcagaggtgttacaaatgcttgcagccaaatggagaggcaattaggggactgcatacataaaccaatctgatcaaagatttgcaatagcagcaaaaagtagagcttgagtacttacacttgatattatcaattatcatgatgtgagatggtacatcagcatcaacattgtcaacatcacttttcatttttagggagcactagagattgcacctcaaatgaacagagcaaagagataaggaggatacttataggggggattaattattgatgattgaacatcacttgatttgatagttgacaccagcagtgcacatgtgagcattgcaggggaccatgatgaagccatggctgaggttgatgagcccatatgttcatcttggctaagtccaatgggcctgagctagcttggagaaaagtggctccttgcaacacaacaccaagcaatggtccaaggattgtctacccatctgtaagcatctcaatagttgtggccatgtagttgtgggtcacatttgctcatttgcattcctatctgttagcatctcattagtgatagtttagaaggaaggaatattgcataaatgttttaggaaataggacgctccccacattgttttgtatgaaattcaagtgttttttttatgagttctgctatacgtacgactagagccgtacaacccacatccgaccaacaatcaatacgttcaacatctctttatgtaggcctaggtatgtagcagccctacactagtcggatacaagtcgtacacactagtcgtgtgtatagacattttttttatagatgatgctatgtcaatatgtacttatgaattcactcttacctctacttatctgtttacgaggaatgcaatacatgaaaactcttagcttcgatattatgcccaaattaattagttatgtaaaattaattggccaagggtaaggaacatgtgtaaattattttatttcctatagaatttgaatgttttacagatgatgctatgttgatagacttacaaaatcgctattatctctatttacctattgacaaaaacttagcacatgtgaaaaatcatgtactctgtaaatatgcccaaattaattggtcatctaaaattaagaggctatgactggatagtaactataacacatgaaaattcgtttattttcatggctggacacgaaagctcaatacgtattcatttagggcctcattgtttggcatatttatatgcttatcatccaaaatttgaattttcaacgttaaatttggagctgattttggggttttttcatcgaagtttatttttcagcctttgcttttagatcgctaagaacacatatataaaagttttattcacaaattgattctcgtttgcaaatatgccatttggcatattcagaaaatatgacaaacgatgaggctgttagatagaagtatgaaatcggaaacctaagggacaaaactagggcgtaaaataacacattgatctataagcaaaacaaactttatatgacaagtgtgtaagactcaaagtaagactaaaatccataggcatgagccgtttacatcaaaatacaagtgtgtaagactcaaagtaacataacctctatattactaatccaatcgtgatacgaggtaagctcatacaagaccagtgaccaatctagctcccgggctagtcaagcagccaccaagaccccgccgccggcaactccactgttaattagtgaaaatgcttgcaaaatattgctaaggactaacaaggaaatcgctatgcaaacgacccagctgtccgacacacgtacgaccgaatttaatcaactatttgcaaacgaccgcagtgcacatgaacatactctccttgattgatatacggccatatatctctacttgtacatgagttttataactagattgtatgcataacaatactcagactaacaaaaacactccatattatctataaaaagaaacaagtacactccatctttcgctgctgcgggctccccccccatggctaacactctcacaagtcacaaccaccaaagtgcctttaaaaaaaacaattaatactaatcctccacgcccagccaaaaccgcaacagaaatccaaatccccaatacgcaagccacatctccacagccacgcggcggcagccatccacccacaccacaccgctgctcgcgccgcttggctggcagcaaccacagcaagcaaagcaagcagtcaaagaaacggctacccagccagccaagcacagcagcagcagcatcacatatacccaagccccgacgagtcgacgccccaaattcctccccggaaaattttacaaatcccagcgatcaaacgaagcgaagccacaacacacagctcacttcccgcacgcatcctcgccccccagatcccatctcgccctcgcctccgggcgatggccaccgccgccaccgcccaggcctccgcctcctcctccaccgcctccacccgcggctcccccgccgcctcctcctcctcccactccgccgtctgcctcgtccccttcaggtatatgttactcatcatcttcgctgtgttttggttgtggtttggttttggttttggttttgatggggcaatgtgggtttcgcaggtggtgggcgagggtgagggaggaggcgccgccggaaggcggggtgaggtacgcggcgaccgcggcggcgtcgccctcgtcgtactacgggcttcgcttgctccacagcttcctccacccggatctcgtgcttcgcctcgagcgcgggggttgccgcggcacgggtgccggcgccggggggcggagctacgcgctcgtgccggccgacgagctctcgcgtgtgctcgcgaggtgagagactcgctaatggcacttccgttttccatttttttgggctactcggaggggggggggatattggtggatgctagtgagcgcaaaatcgaatttagttcaatcatgtggctaagggggatgatctccattacttccgttttttcatttttggctactcggtgaggggtattgatggatgctagtgagcgcaatagaatttagttcaatcatgtggctaagtggaatgatctggtacatgcattcctgattcctatgggtacatacatgacctttgacctggttgattcagcattgagatctaattagtttctaatgtattgtgagttccatgattttttgaacttcaataagcttgaattctagttaggggaagtgtatttagcaatccctgaaactcgggaatgctccatggcttggtatgtgacctcgaaaggatgaattcagcatttcaagctagattagtgcctcgtttgtaacgtgagggtggcaatcatctatccatactagagccacaacgtgatgctgagggcagggcttgtaggttgtaccagaccatttgctaggtggtgaacttgtttcttgcattgcttgatggttaaatatgttgtcccctttcagtctagacacatatgttttagcccattttagctctatgcctttgctatagattctttcctccaacttttgaacctctaacatagcaatactggcaatttggcatggacagttgcaaacgcaacggacttttaaaactgtagcgtttcatgcagcttcacttctgatttgtgggaagccaggataaattactcttaaagaaatttctctataagctgaagttctcaacataatataattgcatgtaaaataaataaaactgtaagtcatgatatagttacatacttacatttcatgcagggctatgctaacattgttcgcatctccatgttgcgcaaacttggagggtgcagttaggattttttttttgtttggctttcttaggaagcaaatcaaacctgtctcaaaatgattgcttttaataatgcataaattttgcattcattatctagtgagagtttagtgtctcaacagcaatgctgatgggttcatcttcctttctgcacttaagtttgtgctgtgttttcttacttgaattattgctttccaaagtaaggtttctgcaatatgcttgtcaataaaatcatgcatgcatatgatgtgtgttgctctgttctgcatctttttgcaaataggatttactgagtgagcacataccaagtgttgaggctcaactgtttagtccagtagaccccattggttgataggtgcaattttttataaatacatttttgtttcttgacaaaagacgataataaatacacatgtgcacatttttgactttcgtggaaaatatagggccttctggtctgtaggatttattcaattattgagagggaaagcaattcaatatgggttccctttaatcctaggctggccctgcttttatgacaggggcttttgttgggtttgattttatagattattttggtatcacagaagcatccatgaatatcatctcatgttttgcattttggtaacctagactttcattttagaaaacaatgtgcaacctagccactatttatctctcttctcactatgttgagtagcaagttttggtcaaacagtaagcataatcatcaattctaattgtgattgaaattattcgtctatgttcagttagtaatacccctatatgtgagacatgagtaggattatattctgaacctccatattcttgcacctttaatccagcttcttaggctatagctctccctgaaacgagtttcttgggaccctaattttaatcttcaggagttctatttggttttaaatattccttacaagtaacgaagaagaagacttggtaacgaaggtaaacttgttttgctgaagttaggctagaaaatgtttcatatagaataatataaactttctattgttacatgcgattcctatttcctctcaagtctggacttatatttcaataacaaagaatctgcagtctagaggattgatgattaattgaataggataactagaaagaagctgctgttctatatattatcgttttctctgtcgctggcaagtacctaaatgtattctcagtagatcccaatgttagctaaatatgacattattttcttggtatattttaataccattcaagctccactttgtcactatgtttaccattatgcctgtctttgttatactattgtgcattttgagcacttttggacaatatacttttggaccatgtggtgatatctgtgtgctgatagcatcctctccttgcttagcacatttcatcaatgtgctcagttcttgccttccaccaatcacagcagattacatcttccttttcagctcagctctcagctgttcactgcagcgtgcacttagctttccggcctcaccatatttcctgtgcatgtgcacgtgctgcttgcagcatgaggtgtggtcagcactcacacttacatgagtagctctttccttgtctgggtcagctaagccaagtgagagagagcagaggattaattttcagttctaggaatatatatattctgcagtgctgtaatgtcgtccaattgttttgtaccttgatgccaaagatgtttcttcagaatatcaattttcatgaaatcttgtctgtgttatttttttatttgcctaataggttcaatttacagcttccatcttgccgcatctatttctgctgactttatttctgttttcttctccaggcaaaattctagtttggcattgcataataaacattcatttgctgaggatagtgctggtgcgtaccctttggtgcttaggatatctgttcgagaaacaagcattttgactgtgaagatcagcaaaaaggtaatgctatcctatttgacagatgatatatggctctatcaaatttttttctcatgcccatccttacaatttctattctatttcaggacaatccagttgagaactataaacgggcatacaagatttttaatattgattctcaaccagtatgtcgctgtttgtctgcatttcaagttcagcaatatactcccacttgttcagtttacttaatgtttctttatccaggttcatgtttgggatttttcaggccagacaaacctaatattaatgaatgagtggaataggtcaaatcatgactgctgccactcagagctagaggtattatcagttgatactcccctgcttgatacccttgtttttctgtttcagaatcaggcataaaatttccttcctagatccatattcttatcattttttttggcatgtgcagaatattcttgaagtgcaagtctatgcaatgtctgactccttaacttccaagattggtggaaccagcaaagagtatacagaacaatcttctgcagatgttaatgatatggatgttgatttgtcctatggaagctttggaagatctagctcgcatgggctaattggattggaaaatcttgggaatacttgctttatgaacagttcaattcaatgtttggcccacacatcaaagcttgttgattatttcctaggagattatgacagggatataaatcggactaacccactaggactgaatgtatgtatagtttgtcatgagtttactgtttgtttcctttgaatatatcggctaaattcactgatgttttcattacttagggggaacttgctttggcatttggagaattattgaggagattatggaacaccgagagaaaaccagtttcaccacatcactttaaggcaaagattgcttgttttgcccctcagttcagtggcttcaatcagcatgattcacaggagcttcttgctttcttattggatggcctccatgaagatcttaaccaggtcaagtgcaagccatatgaagaagctaaggatgcaagtgggcgccctgacaaagaagtggctgatgagtactggagtaatcatttagctcgaaatgactctgtaatagttgatacttaccatgtaagttctttaaatttttcatgtgttaaagcaattacactattattttctcctgcttctcctgccattgacccttttctgacatctacttgcaggggcagtacaaatctacattaacttgccctacttgcagtaaaacatctgtcacttttgacccatttatgtacttgtctttgcctgtaccttccacggcaaagaggacaatgactgttacagttttcagcactgatggtagtatagagccaatctcatatgatgtcactgtgccacaatttgggagtcttaatgatcttgttcaggct

SEQ ID NO: 6205 - DNA, 62866 bp, Oryza sativa
acggagggaatagcaattaggcttaaaagattcttctcgcaatttacacgcaatttgtgtaaattagttattttttcgtttatatttaatactccatgtatgtgtccaaacattcgatgtgatagggtgaaaaattttgctaggggatctaaacagggccttggtaaaagggatacaagttacaaccgattcgatatgactattttgcttggtgtcctactggaaatgagcttcggttttaacttttaagttgctccaaaccccacgcagccaaaaaaaaaaaaaggttaaagtcatggcgcgcttcatttaaaaaaaataatgataagctaattatagaagtggcatgacaaggagaaaaaaaaatactgctcttatgcagttatgcttgtatccatgttatgtgattattctgttcctttactgtagctaaaatggaaaagagaaagaggatagcctcaaaagaagacctgcatggacaaatgatgaagaggaagaaatggagacttcagttgagcaacctacccgaggtatgaaatatcgatctcgaatttagcatcttggtcctcctcacaagatgatgttgtatttgttcgctgttcggcctaatctttcagtcgacccggcaaaaagatatttagtatcttggtcctcacaagatgatgttgtatttgttcggcctaatctttcagccgacccggcaaaaagatgatgcaaaatgcctttagtagaagaacctctccgtatctctattcgctaatctgtatatttaatctatttgtatttactgcaggatattctctgcactatcgtgtcaaaattaccgttaagagaagctgctagaacgagcatattatctagccaatggaaccgcacttggtgcagccacacaaacctaaaccttagttatcgatcaataatgtcaaggcgctacatcgaaagagacataagacctgaaggcaggaagctaaatgctgaagagtttatcaggagggtggacgcaatcttgcagcagcacaacggtggaggcgttgagaaaatcgaagttataggacttttagaaaatgaaaatgcgtatcacatcaatggatgggtgaacttcgccatcaaatcgaagacaaagcaacttgttcttgatttcagatctttccactggcccatagatgagccatataactttgcatttcagatttttgatgctgctaacatggaaaatttgcagtctttgaaacttggttccatttctctgaagccacctgcagattttaagggttttcagaaccttaaaaggcttaagctactagatgtgggcattactgatgaagatctacaacttttgttgtccaattgcaactgtttggagtttcttggaatatattgctgtaaattgattacaagcttacggactactcatctttcaacccagcttaagcatttgtatgtctatgaatgcccatgtctcaaagagatagagttaaactctggcctgacaacactcgagtacattggtccattgatacctttagcacctcctggaatttatgtgcttacaaatttacgcataaagtcattggacatttctgattctcttcagtatattttcaccgaacttcccagcactcttccacgtctcgagatgctgactttgcaatgtcgtgaacttgaggttgcagacacatcacttctttatattcccaatttacttgtagacttccatcttacaggttaactcaagttacactatttttgttcattgttatttgtgtgcatgtttcagaggattactttgccagacaaaccaatcaaatttatttatctaaaacatctgagattggaattggcattttctggcccaaggaaatgggatgctgacattctagattttgcctgcatcttggaggctgctcccttgatggaaaagcttgaatttcatgtaagtttcaagtcttaaattatgtattttgccgacaaattgtcagtgaacttataaatgcttttcattagttgtcattaaggatgctgaaatgaacagctccattgaattatgaattacctttacatatactgattattgagcaattggcaatgcatctaatttgatcctgatattggcctgaccatcatataatcatatatcatgctcgtgtgtttaatttataacatgctgctcttacaaggtctattttttttggtctgtatttatagatgtggatgaattgtcgtgatcacctccggtatcgcaaagctcatggtaaactaagaactcttcctccatgcccccactaccatctcaaggaggtcaatatcgcaggattttacggtcagaaagaccagctggagttggcacatcatattctcaggaactctgtcgtgctccaagccatgaacatagatccgaggcctatagcagcctgtgatccttcgagaatggcaattcttgaggcgttcaactttgtggatggatctaaagttgccatgaaatatctctgcaaggcagaccaccgtaacgtcgttcatgtttcagatgtgtcacgtaaggatgtcgaaaatgtaccagcttaccggctggtatctccattttggattgagtttgataagaccaaacgttccggcttgttaattaggtgatcttgacatctgggattaaagctccattgaggcgaaatggttcgttttgagtttgtttcactttgacgttgaaatggaccttgaaggaagcttgcggtggaagaatacacataatttccagtttattgagattttttcatgtgtaaattaattgtgtagaaaaaattgcggtttatcattggaggagtaactatctttgttgtccagaatgttatgttatttcaaatctccgtgcaactgcatatctttttaaaaaacaaatccaaactaagagcatacccatatacccaatatagctcccaatgcaaatattttgagcctccaagtaaaaattaggctccaacaatttctctaaacaggtgcctaaaattggatcccccaactccgggtaaatcacttcacaaggtagcgctcccaatctgccgtcccaaatattgtttgattcaatttggaagttgttgattgatgaacaattgtattttcctgaaatattgaactcccagatatcagaattgagcagaataacaatggctatctgtgacatgtttgcaccctccttccagtaaacatgaagaattgaaaagtttgttttctctttcgagttgtttattctctacaagttcttgaagttaatgccagttgtgcagcttgaacagttgaacatgtatgtagatattggctcttctgtacacttcaattttctgtagatattgtctggggttttatcatatcgttcaaatttgcagtgaaaaattttctgtagatattgtctgggggttttatcatatcgttcaaatttgcagtgaaagtaggaacaaatgcattgtgacttagataaaataagagacaattacattggtactagataaactgaaggactattgcctttggatttgatatagtggagggtattctagtcctttagtttgtttattggtatatatgggacggaaaagctaattctcacgcgcgccgccgcggcgcgtgttttaggcccacggccgcatacgcatttctggaccaccagctataggcgattcctattccgtccgatgagccaacaagctgccacgtgcatgcgtttacaacgggatttgaaaagatcatgatttttttggggggaatgccattcggctagctttattgataggatagatcatgattagtttaattaagtagtagttactaaattaagataacctttccttttttattggcgggagatttttcttttttctttaataaaaaaattgaaaatctatacaaaattttcttaactttcaaattaaatataaaacttcctaaaaaaaattaaaattcattaaaaatgtaaaactttcaactcgaaatttgaaaaaaattcaagtcaaatttgaaaactttcaacttaaaatttgaaattttcaatttgaatattggaaacttccaagtcataattcgaaaactttcaaccaaaattcaaaaaccttcaacttaaaattcaaaaactttcaacccaaaaattaaaacttttaatttgaatttttgaaatttcaagttgaaatttcaaaaatttcaatctgaatcttaaaacaaatgtacctaaatttttgaaaattttcaactcaattgtttatttattatttcattataaaggactacttaattctaattgttactccttgttagcgctaacattagctctacggcactaggctgtgcggttgccagcctgccacgcgtgtatgagccgaaaagttacggagtcgaactaggctaggaatacaacaaaagaaaaaagtgcgctcgacctacccttcttgcgcgtctgcgcgaggtaggcatcccctatatgggatggatgaaaaaattgagttattttgtgaaggcggtggtataagcaaagaaagaaggttgagagctaatgttgttttcacctctgtactgtttgaaaattttaaatttgtatttgaattgttgtgtttgaaattgtgaatttggattcaattgaaatgtatgtattagaaatattcatatttgaaatgttatgtggtgttaaactagccatagacatacaatgcatgttaaaatataagagaaaaacgaatagggctaagagatactccctccgtcccaaaaaaacccaatgtgttcaggttcaaattcagaattgggttttttttttttgatggagggagtagtggttattgctgaagtcagagatacctttaagagaaaaagaaaagaaaagatatatgtgtgttttgtgtgtttgacaaaaaatgaaaaaaaagaaaagaaaagatatgtgtgtgtttgacaaaaaatgaaaaaaaattacaaaaatgcgtttgccgggagtcgaacccgggtctattgcttggaaggcaattatcctaaccgttggactacaaacgccttttattcaaaagtcatactactaatttctagtgcttgttttgaaggagggcacgtggtccaacgatgccgtgccaccctccaccacaagacgacgtccacggccacgcagatggatcacgtgcccacccacccacgcgcgcccccatacatacctctcatcatcactcgcgaactctcgcctcgctctcgcccccacttcctccgccgccatggccaccgccgccgccgcgctcctccgcctctcccgctcccgccgcccgctcctccccctctcctccctccgcctcccgccttccgacccgtaccaccaccactcccactcccaaaccccaccctcctcctcctcctcccacgcccgcctccccgccttcctctccttcctcgccgccgccgccgccgccggaggaacgaccgtcgccctctgcgactccggcatcgaccaccggtgctcgcccgcccgcccgcccgcccccacaccgatcgctcagtcgatcccgcggttgcgtattgacgcgttgcttttgttctgcagggtcgggggcaaggagagcaccgagctggtggtgcgcggggagcggaagcgcgtgcccaacgagttcatcgacgagctcgcttccttcctcggggtgatgagctcgtggccttttcagtgaggatgctttcgccgttgaggtgagctgagctgagctgactgctaagtgtccgtcctcgcaggagaacctgacggtggactacgaggagaggcactaccatggcacgccgcagaacagcttccacaaggcagtcaatgtgcccgatgtcgtcgtcttcccgaggtataacctgatctaacagtagtactgattactgaatagtgatagatactgattgataccaaagttcgtcttgtggggttatgtgttgaccttgtccttctctcagagattgtaatgccggcccaaatcaaattttgcaggtcccaggatgaggtacagaagattgtgatggcttgtaacaagtacaaggtatgtctcattaatgcaaacacggtgcgaatcttttgcatttttctttagaaagagccgcatcagttatccgtctgctagactttactacatttgattgtgtgaattgtgaaaatccactttctatcacactatgctgagctagatttttatatttcagatttcagactaattttattggttgttttagtttacatgaccttggtactgctgctaatcacgtgtgatgtaacgaatctttctggcttctcgtttttctcgtctgactcttgtactttgttacacgtgccatttaaaatctgtttagaaaattggaaatcaattttcaccttgagaatgccatattctcagtaaaggaattctttaccttcatttgctgtctccagcaatagtctataaaaggagcagacagtgtggatgtctcccaatgttttcatgatggctaattacttgtatgagggttccactatagaactgaatgatgatgcctttttcttcgagacaggtgccaattgtaccatatggtggggctacatcaattgagggtcacacgttggcacctcatggtggtgtttgcattaacatgtctttgatgaaggtaaacattgataaatgtaactagagaccatatagttgtaggcactaataatttcgtggaaattaaatctttctgaattaattacccttgtttctaatccttaaaaggtgcttcagtatatgttccatcaatttctttttaccatggtttgattgtttgatactacttccatatgccaaacagacaaaactgttactagcagtgagctcttgatgcaggatagatgagacgatacaaagctgtttctctgttaatttcactttcttctaatttgtagtttgctttaaatcgttcacagaaaatcaaatccctgcatgttgaggatatggatgtagttgttgaaccaggagttggatggattgagctgaatgagtacctgaaaccatatggcctctttttccctcttgacccaggcaagtccattgtttattgtttacgtgaaacataatctgtccactaactttgacataaaacagtatgaatttgtactggatgtcatttggttgctgctaactaaatttagtttctgataattttgtttaactttcttgcatcgtctagacatttgggtgatatgtacatctttgtgcctgtgataacatgacatgcagcatattcgtccaacttcacccatccttttgggcatttggtaacatgatatgaagcataattttgtgctagatcggtggtttagctcaagtattcttatctgatttgcagggcctggggccactattggaggaatgtgtgctactcgctgttctggttcactagctgtgaggtaattctccttatatttctcagggtactttcgagcttttatagtgaaacggtccaccccatcgaaaaataatgtacaactgtaatccacgtgatggtgcattcttttatggttatctttatgatttactgttaaatggctttgatgatttgcttattagtttgtaggtacggaacaatgcgggacaatgtgattaacctccaggttcttttggctatccttgagtgagctattttcaattgactttcacatacaaatagtaaaattttctcagtactgcaggctgttctacctaatggtgatgttgtcaagacgggttctcgagcccgaaagagtgcagctgggtatgcaagatcccctcccgaataagtttctttttatgtatcttgggagtgaatcattatttcactggttcctatgcccattaatgtgttaaatacatgtgggatttacatgtattcttggcatcaatgatgggttttttgttctcttctgttgaatgtcagatacgatcttgctcgtttgatcattggaagtgaaggaactttaggggtaattacagaagtgactgtacgtcttcaaaagcttccatctcattccgtggtaggtcttctatttcatctagacactgtccaaacaatgttttgcttacagtgtgtactggacttgaatgccgtcaactctctgcatattggtgtgtgcagttgttgtgttagcatatacactattatggctttatgtagtacaccaattactttcatttgctcatagatctttctttttggagaaatcctttataatcatgctatggcacatagctattatcttgcatattgggaaatggggaacatttgtgagtctgaacaaataaaagcttctcttctaagcacctgctgtgtgctctgaactggaaaaataacatggtctgaagcctatcggtgtgatctactccctaaatttctaaacctaatactgttgaaagatctacgcacacacacacacactggatttctatgttcattttgctgtacgaactattttgtactacctgtctattttgttccttattttactggtgaagacactcctaggtgctctgctatttcaggttgcaatgtgcaattttcaaacaattaaggatgctgctgatgttgctattgcaacaatgctttctggtatacaggtttgtctttttttcttctgattttagttagttacaggtttgtcttttttctgctgatgaagctcatatatgaaattgtcacacctccactttgtaatccatcatttcgatcaatgaaatggctataaggtagctctaccttcttacatcaaaaaatatatgagattgttacacctctgtttcagattgagcaaatccgcttgtctccataggcaagtgttaggttaactaactagggaaatttggttctatgaactataaatattgaaatgctttcatagaacttctgcaggtgtttcagtaagcaatttaaaaaggttgtaggttatgactacttgtatgttttctgcttgaccaggtctcaagagtggaattgttggatgaggttcagataagggcaattaacatggcaaatggtaaaaacttacctgaagtaccaaccttgatgttcgaattcatagggacaggtaacctaatttttatttgaatagttaacacttcacactgaactttgacaaaaaagtctactttatactgtattgtgcatctatgtttggcagtactgagtcctctagagttaagtgttcaaataataaataaaagatggaacaggaaccaataggcatagaatatcttagttttctctagatatgttgacactataattgacaaatgcaactccacagttttatacttttaccgtcaattagtgtttatgaatttggttgatgatcaacggtagtgagtaaagaactctcgaataaaactaaatttactgtgcacactgtttctgtcaagataactttttgaatagtacgtattaaatagcagtcggtatgtagtcaagtttggtttcaaagagtgacatacaagtctgggcttgtgatcttcctgtcttagggacaaaaccagcacatttcgagtaatataatacctgggttttgttatccacttttgagcagttccactcgaaactcaaagttccttctcattaaaaaacttcttaagatgcaactatttttttcagcttgaataccacaatctatttttttatttgctaatatatttccatcgtgaatacccagaagcctatgctcttgaacaaacactattggttcaaaagattgccacagaacaccatggatctgattttgtttttgtagaagagctggatgctaaagaggagttatggaaggtcagccaattttttcatctgaacttgtgtagatttcctagtactcatctgaatattgtagacttcctagtaaataaagtagtctttattctgcataatcttacacatgcctgaatatggtatcaaactatcaatttgcatccacctatatctgggtaacagtggcagtggcagtactgaagtatgtgtttctccttttgctgaaacatatttatgatagcattttattcttatatgtgcagattaggaaggaagcactttgggccggttttgccatgaaacctgatcatgaggctatgataacggtctgtttacttataacttgtcaacatatatttttttgaacaaaaaaatatattgatcaagcatagtcggtgtactttgatgttacacatcatgctacctgatgtttgattatgtagttgtgaatctcagcatcttccttcgtagttatcatcctcttcataaatgtgagaacaattatgatctcaaaataagtgctgcattcaggaggacaattggcaaccaaacatgcttacggctatgtaaatatgattggtcttgtatctcaactctttctttgaatcaagataggacttctccattagcaagctggtctatttaaatcttgtgagcaccatatttataggataaatccataatatgctactcactgtgaggatgacatgtggctcccgtatcatgtgcgtctatagattggacaactcaatggcataaaatggatcccccctcccccttctgatttttttttatctcatatgcttatatagatcgtccaaaggtcgtcacaatcatcatacccttacaagctttcaattttcagtggactgactctatcaagtcatctaatgccacatatatgtttatttatgcaggatgtttgtgttcctttgtctagacttgcagaatgcatatctgtctcaaaggaaaagcttgatgcatcaccattgacttggtacacgttctctcttattatgcaaagccactgtgtaaaattatgttctcatttatatctaatacaaggcatagtcatgtgctccattatctaatatttgaagtatgcataaagtagcatcaagcatgttattatctcgcaatggctccaataagacatcatgccatctttttttaatcatgaattccttacctctgatttttgtacgttcctagtttggttatcgctcatgctggtgatggaaacttccacacaataatcctatttgaccctagtcaagaagaccaacgacgtgaagcggagaggctaaaccatttcatggttcatactgctctctctatggaaggtacaatgaaaaactgaccaagccagcatgtaaaagctgcctgaaaagattaatattgactctgatgatgaacaggtacctgtacaggagagcatggtgtaggtacagggaaaatgaaggcaagtgtctatcacctgttttcttttattatgttctgcacttctgctagcagatacaagagccatctttgctgatacgattctcaaagtgatggcacaaccgccaagtgccaatcactaaccattctcttaagataggaaaattgcaagaggctataccagtacattcatgatggttgaacagattaaaagttcatgagtatctggcccagaacgtaccttcaaaacttcaatttcccttgctgcctattgtaaatttgttaccctacgggttatcaagatgtactttatttttgaatttcctgataggacctcctattgtcttgctcatggctgtcatcacccccattactgacttttattttttctatgcattttggcagtacctagagaaagagctgggcatcgagtcgctaaggacgatgaaaagaataaaggctgcgttggatcccaacaatatcatgaatccagggaaactgattccacctcaagtctgcatttgatgatacagacgttcccaagttgctggctgactcactggctggttcagtgacttccactcaactcccagtccagcaaggcaagtcgtggcgttaccactgaatgcgcattgaacggcgaagactcaggactgttatacacgagttgaatgcaaaaataaacgtgaacgctagaactgttactctgagccattcatataccgggaataaatgagcaaaacttcgttccagttgctatatgaaatatgagtgattctatgataggcttggtgatagaaaattctaagctatttcaaatatttggagctaaacaacgtagtagtagatgtttggtgaattgaagatttgccacgttagagctgataatatgatttgtcactcatgtgtctatgatatactagaccagtgagtgttgcgtgagttacttggagtagggtaaaaaatgttatggatttttctgtccggctatcgttttccttttatacccaccttttgttttgttttcgaattgtctggaaatggaatcgaatggtaggggatctttattgactgctttagcagcataccgttttcatttgaaagttttgtagaaatcacctgttgatgctataatattatttgaaccattcagttagagatatttagaactcattaatatcatatgcatgtcatatagagaccattccatatatcagctgagacgcaaaaaaaaaaactgtaaacattggtaattaactaaattgtttttcttatattatccttcctctctttcccctacccgtagtaaaatcactctcctttcatgtttctgtcttctcgctctcctccccacaccagtaaatttgtttagctgtcagttttacgggccacttattacatatttctctctcctcacttccttctttccacatcagtaaatttgtctagctctggtaattttatgggtcagccccaacccccaaatgacaagcggtaaatcatgaattacacacaggcacacagccatgcagtgcagaacgccgatttggtaagcatcacatgtgccagtctgccagacatagtggtgaaaaatcatgaaggaggtcaaaaccaataccctagcagaagggaaacgactcccagaattcatctttagctttggtttttcttatacagtttttttcatacttatacacaccttttacttctactatgtttaatgaaattggtacactctaagcgtcggtaattcgttagaaaaaaaacagatgttggcgtcgaaaatcgccaacacgcggttcgtcaagaacaaattttgataacaagataaccattacgctttcgcggcaatgagcgaccgattttcaagctaatcggcaaagaaaattgaattgatctacttctaagaagaaaaagcaaaaaagaagaacgtaaaaaagaactataatgaatttattgattgggttggagaggggaatctctccaatcggccttaaccatatgtagggcgcctggtctttggcatgttccacgtttactgggagtaaattaagcgtcattattttaaccgattgaaggtaggaaacacaattatctaatgacggtaggcaatccagcggatttctgttggaagcttttcttgcctgctgcattctgaatatagtgtgcaccgagatcttctgtgcctacttcgcatcatacctcgcccttttaaccttcactgctaccagataatccctaatatatatcttcaatattggttagcttcggctaaattgcttcatctaatttaattaatgacaaatataattagctctctatccaggtcaatactaactaattttctcctaccgctatttgcttgattaacagccgaatcataccatataaacttttattatcatatatgccaaatttgactatcaacaacaggtgccagacagaccgaccgtacatgcaacgaaagaactcctggaacggtttttgtacccttgtgccggccgagacggcaccacgcctttctcgtctcgtctcgtctcgtctcatctcataccgcaaccacctccaccactccacgcgcctatatcaccacacgtcacgcttccacctccacctccacctcactgtcgatctcctcccgcttcgatccatccatccatcgccatggcggcggagcgcgtggtggtcgacgagtgccgcggtgtgctgttcgtgtacagcgacggcgccgtggagcgcagggccgcgcccgggttcgcgacgccggtgcgggacgacgggagcgtggagtggaaggacgcggtgttcgacgcggcgcgcgggctcggcgtccgcctgtaccggccgcgggagcgcggcggcgggcggctgccggtgttcttctactaccacggcggcgggttctgcatcgggtcgcgcacctggcccaactgccagaactactgcctccggttggcggccgagctgggcgccgtcgtcgtcgcgcccgactaccgcctcgctcccgagcaccgcctccccgcggcgttcgaggacgccgagaacgcgctcctctggctcgcctcgcaggcgcgccccggcggcgacacgtgggtcgccgaggcggccgacttcgggcgggtgttcgtctccggcgactcggccggcggcaccatcgcgcaccacctcgccgtgcggttcggctccgcctccgggcgcgccgagctggcgcccgcgcgcgtcgccggctacgtccagctcatgccgttcttcggcggcgtggagcggacgccgtcggaggcggcgtgccccgacgacgcgttcctcaaccgcgacctcaacgaccgctactggcggctctccctgccggcgggcggcgccacggcggaccacccgttctccaacccgttcgggccggcgagccccgacctcgccgcggcggagttcgcgccgacgctggtggtggtcggcgggcgcgacctcctccgcgaccgcgcgctggactacgcggcgaggctggcggcgatggggaagcccgtggaggcgctggagttcgaggggcagcagcatggcttcttcaccatcgacccctggtccgccgcctccggcgacctcatgcacgccgtcaagctcttcgttgacaccgacggcggcggcggcgcccgcctcgacggctgatcagccgccgcgtgctcctctctcgtgtgtgccttgtcggcaataataaatcgattcggatttcaaaatgctagaaaattcatttatcaaatgttcaaagttcagaagggggtatatgatccattgccagccatttgcgtatattgcagcttgatttgcgagaggctcctctaactgatgggtgtccctgacatgagtctacgagagtgactcctatctgttaaagattcatgtccctctaaaaattagagaacttattctgctttatttggtaacgctatctattaaggatctatgtccctctgaaagttagcgaaactttctttaatcgaatcagtataagatggtgctatttcattaaatatagcgagagaaaagtacgaccccaatagggaaatagaaaaaaaaatgctatacataactatacgtgtgaagaaagaaactctctaagtttttttttctttagccagaacccaagttcttgcttattcctttattttggccaacggtttagggtctacagtctccttatgttctgagacacgctgatttctctccttttagatctcacaaacaaccagaagaagaattagggtacacaagtctttcttagagacatcttttttattggatatcatttcacaccaagtatggacgtcttggcacggctctaattgaggcagatctatcggtggataaatactgtagcaaatactgtagcgatttactattctgattttactgtgccgaatcttttttggccgttagattcagacatagatggttcagattgtgtacagcagttaatgtgcagtcctagtagcaactgcatttgatctcgttcgctgacggtcttatcgtaggcaaatttactcgcctcggtagtcctccaacgcctgtcacctgcggcacggccccgcgtggatcaaaccgagcacctccagtgtaacacgagccacgccgccacgcatccatctgcacaaattccagcaccggcttgatcaccctcctgtgcacaactccatttgcatttgtgtaccctgcaaaacaaccgcctcgcaaactaatgcagccagctgccagtaaaatcaccatgcaaacattgatctcagtcgccaaatctcactctcctatgctactgctgcatgcatgtgaccagcccaagccaactaaacggctgccgctccccagcatcttacacagatcagccgagcaatgcatgataagttcctgcacatatatacttcgaacttcgaagtactctcaagcagaccacatgataattccagcaacctattctaaataatttggcctgcccaaatatactaactaaatgccaaattatgatgcaaacacatatgtgtcagatagagaaggaatgagatataagtcccactattatttttaaaagtttttttactgacttagcatagaccattgtctaaaccattaatggagctgagctaatttgcaccgattttttaagttgagagaagcattatacctggttttgggttgagatatgccatttgatcatagacaaaacaggagataggtagaatagacttattccttcccctcaagtatacaacccatatatgtcagttcggccagctttctgtagcccaattaaatttgcacacataaagcaagaaaataatcattttctttacatagctagattcaatcttcattgtcagtccgagcgagcgaacggcgactgaatcgtgccgaactaaaccgatacgacaacagaaacaaatcggacgacgtacaaaattttcaagcaaaaacactttaaacttttaatagtagagaagagaagagatagagatgtgtgtgtgtttgccatgtaatggaaaaaatgttagtagtgttaagtccgaaacggtaaagaacatcagagtgggctacgatgggctgatatgttggcccggcacgttggcccacacttatcggcctgatcatgagcatcgaaccaaggccaaggctcaatggttggttccgtatccacctcaaattgtgatttcagatttggttagtcctctgataaaactaatctttgctttctgaagaaagagagtagtaagaaagtcccttgtataggacaaaatttgctatagtacacttgaacggaaatggtttttgggccagcgtcatgaatcccaaccagacccgagctacattctatgccgatgacaatcccccctctccaaaaccctagcgataccaactaagccacccccctcctaatccaatctacaaaaccatagaaattggagatagtggcaatggcatccacgacggcggcgacgagctatgggtattgatctgctctctcctaacatgctcaccctctctctcaaaaaccttagcaagtagcgggttcagacatactttgcttcacacctctcatcgctgcttctgtcgctgcttgccgtgggcatctccaatttctagggttctaaataggggatctagggagggaaagtggcttgggtctggtccaagttaaacccagttaggttagaagttgttggtccgagggataaacttgtcctttctaattgtttctctttatatggcgcataaataataaaataatgacgatgatgtacttcatcaaattaccgggtttttaggtgtccattttaagtgttatgcagtaaattttcttgtaatagtagtctatttctaatatgtaatcgtcccttttttttctgcgaggaatatgtaatcgtccctgagtattcaaatatgatgtttgaggcttacaagattctgaatccaggtttttcttttccatcattgtgatctcctttttgccctaccattgcttgtgtttatcgatgaagactctagagtggttaagagggtgtgacatggtgtcatactctccaaatttccaactcactgttctctttttcagatttttgttctcccttcacccaaaaagattgtgttattgtcacacatggcttcaaatctttttctgaccaatggggcttctggctgtcaaaatctcagtgaaatttaaatcgtacgagaagaaaccttatcttatttggttttcttttctcctgaagatgaagattaagtttttttttatacaaaacgaggtggtattaacgtatgattgattgagttttaattattacaaacttaaaaaatatattaatatgatattttagagcaactttcatatagaaagttttcacacgaaacgtaccgtttagctgtttgaaaagcgtgccacgaaaatctttatcttcatccaactcttgttagagaaaagaacggaacctgacaatctttttcgttctgatatctggatttggacatcacagcagatatattctacctgatggtccctgatccatctccaagctaggattcatatttcttcgccttttttttttcggttttgtgatcatctcttgatccatcaccatttctatctatctatctcttggataagttcatgacgtttcttctaccttccatcactgtcagctgtaataagagcaacaggaccagtccagcctttgatattagatgatgcagacgtgtggaagaacggtcgctctgaactgttcttcttagttaattagctagtcccataattcaagattttttttaagtatgaaagtaatctttttcagtgtgccatcatgcatgaattgatcttccagtagttgtgtttgatgcaatctttaataattcgaagtcttaatccattcaattttccaaggcttctccttcagatagatataattttgtcagctgtcgcccggattttcatgaaagatttggctcttttgtcattaattattaattaagaaagagatgcctctgcctatccgagattactctgacgaccatcttttttctgtgacggaatttctactctgaccaaactttgcaatgttatctttttttcagtagaacatttggcttctttctgaatttttcaagatcaggttggaactgaacattcagtcgcctgtgccacattcatcagagctgctgacagttgtcgcttgcttgaaacagttgcaggggtatcatctctaaaagtatctcctaatttgtctttgatgtttacaactgaactaaaattttgtgatatttcaactcaatttgtagtcgtttaatgtgctgacctactatagcatgcagtagcacggtgccatgctttgaattgtttttctcatcatataaacgcaccaccatttcttgtttttaatggagatgtcactataatgtaaaagaagtcaaaggattgtttaataatcctttggtttcaatacgctcaaatttttaagggagtatatagcacttcaacttaactttgttaatattacggttcacaagcttgctctgaagtctagtaatataaagactaaaaaagaggcaacaatggcctataaattgacattatgattggagatagcatgcatgtccatgttggatggataaatccagtgactgtgagtaatgacaataagcaaaaaaaaaaagttaaaaagttatcgagctgaggtcaagagttcagttaacctgctaccacatcacaaattaccacagactccactatatttaattacatcaaagctaaagatgaagtgatataatgctatacaactatcgattaaaagtgcttagttacttacatgatcagtccactaatggtggccactaaattcaccaatgtcagtgtgtgtgtgcgcgccactagtaacactccagctgccatggactgactcaactccaatgtgtctgcaactcaacgttgctatcaaactaaagaggttttgtacatatatgtttgcatacataatgcgttgtgatctcatggacatgatgcaattcgccaaattcagccaactcataaggccatgacacaagttggacattgttaaaccaaaataagcaaaaggtgatgggggccatagcctctgattgatcaattcgatactcaattaattaatcaattatgctgacaaaaacaactaaaaaaggactcatcaccacaaaatcctagcaaataatagtcactttcatcgatatatttgagtacacattttgagaggatggttcagttaggccctatttagatcccacacaaaaatttacaccatatcacattaaacgtctgaacacctacatgaaatattaaatatagtaaaaaaataactacttgcacatattataactaatttgcgagacgaatcttttgagcctaattgcttcatatgatttgacaatgtggtgctataataaacatttgctaatgacagattaattaggcttaataaattcatcttacggtttactgaaggattatgtaattagtttttttttgttagtgcccgaacatccaatgcgacaccctatataatatccgatgtgacacactaaaactttaccatgtatctaaacaccctcttagtgtgctccaatgattcaggtacagtgctagtttcttgtgctggttattgagcaattactctttcggttacaaaagaatgtctttatatatcttttctaattaagtaaaaagggcacaactttggttgctcaattaccctgcataaattctgaaataattatatgtgtaatattatgaaaacatctattataacaagcttggttacatattttttaatggctcaaactctaaaacaatatatagatcaaaattcacaccgattttggcctactatatctttgaaaaaacatcttttggttgaataaatatacattacaaaccttcatttggacaacctagaaggacaccttgacttgtaccaccatctgatgtgactatgaccaatcaaactatctaatgtttgtatattatgtttaagaattaagtgaagtattggtcttttcctcatcatcctaatctttgaggtaaatggaaattgctatgatgagactgatacaattttattactctctccgggttgataatacttatcacttttgacacgagcacggtcttcaaaaactaactttgaccattatttatcattataatatgtataaaagtgttaacaaatatatgattttattaaagtacttatatatatatatacataaaatgattatgaatcattttaaaatattcatctttcaaatacagtgactatatatatatagtcactgtatttgaaagatgaatactttaaaatgattcataattaaagattctaaagtttgacctcactcttgtctaaaacgacaagtattatcatcctggtgggagtacgacactaccttccatgattgtcgattgggttgaaacatcccgagccccatatttgccgcacacacaagagaataagtatcatacgctctgaccataagaaattttatcgtatgtatagcagtatttttggtaaattggctgatgcacacgtaactcagaatattaattggccttgtgcttctttttttttaataatgaagatgaagttttcgcagaggctttctctagatacttgacagtgctttaaatataagaaatgcaccattgttttaaggtttgggagttttcaccacggctgctataaaacacacctatgcatcatgcttgatagactctccggtatatgaaagttcaccattttttgaagttttgggtgacagcatcaccctgaagtgtaattaagaatattccaccttttatcactcaaaccactttaactttgatgggttggttaagatttaacttgcataagtcacccttgactatcaagtactaaccactactaccttttaatttggacacttatgggaaaaacataacaaagctggaaggttttatttgtttggatgaaaggcatttgaaggcattggcatacgtgagcaacgattttaatttcacgagtacaattggatgcaatttatctttctgtagaagcgatatcatttcttacagtttacgattctagctacatatataaaatttaatttttgtaatttctatcaatgtcatattgaagtcgtcactgaatagttaaattgataataaatataaaatttctaacctaccaagaaacattttttcacccctagatgcacatcgcatatcacctatccatcaggctggatcatctctgtttgtacagcggcaacaaggcgtccagattgcaattatttatttttttacgtgcacgtgtgtagattgcaacagattgcaactccctgttcagcaagctgcaaaatttttgactctactgttgatgttgataccgctgttgatctgagcaacgggtgttacgttgtcgaccaccggcgtcgaacttgaccgtgcactgcgaaaatacaatatacagtaacgaaacgatctttcggtgcaattaaagtaaaccgggtgacttttaatgttacaaaaattaaggtcccgttctaatcttgcttacagggagctacttttttatttattgtaaacatgatttttaaactgttaaacggtatacttttatttataaaaaaaatcaaagctttcttaattgttcggctaagccaaacacctaaaacgaacgcagcctaaaaacaaaatctaaaccaattttatctaaatacatccctaatgaaaagagatgtaaattaacttaatccaattaggagcaggtacattgtgtggctatataagcgaggtggctatgcagtgtgattttaggtgattactactccattcttgcttagctcaagagtgtcgcaacagcttgtggacacaaacatgccaaccatgccggccgtcgtgtccgccgccggcgccgccgcgccgtgctccaacgtcgtcgaggacctcgtcggcttcctccgcgtcctcagcgacggcaccatcctccggtcgccggggccggtgttctgcccttccaccttccccgacgagcacccctccgtggaatggaaggaggccgtctacgacaagcccaagaacctccatgtccgcatgtacaagccgtcgccggcgagcggcggcgtcggcgccggcggtggcgggaagctaccggtgctcgtctacttccacggcggcgggttctgcctcggctcgtgcacgtgggccaacgtccactccttctgcctccgcctcgccgcggacgccggcgccgtcgtgctctccgccgggtaccgcctcgcccccgagcaccgcctccccgccgcggtcgacgacgcggcgggcttcctccactggctccgggaacgcgccgtcgacggcgacggcgacggcgacggatggtggctcgccgaggccgccgacttcggccgcgtgttcgtcaccggggactcggccggcggcaccatagcgcaccacctcgccgtgcgcgccggctcggcggcggcggcggcgcccgacgacccggtcgcgatccgaggctacgtcctgctaatgccgttcttcggcggcgtcagccggacgccgtcggaggcggggtgcccggcggaggtgttcctcaacctggacctgttcgaccggttctggcggctgtcgctgccgccgggcgccacgagggaccacccgatggcgaacccgttcggcccggacagccccgccatggacggcgtcgagctccccccggtcctcgtcgtcgccggcggcctcgacatgctgcgcgaccgcgccgtcgactacgccgagcggctgtccgccatgggcaagccggtggagctcgccgagttcgccggcgagcaccacgggttcttcacgctcggccccggctccgacgccgccggcgagctgatcgccgccgtggcgcgcttcgtcgacgtggcagcgccgccaccgaagtagggtagtgcatcgagattcgtgcagtccatgtttttttttcactctccttttggtcgagggcgacatgtgcaggagagacgggtgtttgtcacgtgtcaatgatgtgatgtgatgtgtgttgtcatgagacatcagcggagtaaaatgaaccggatgtccaagtgtgatttgcatgcagtatctttgcttttagccagtcctgtaaaatatcggtgatttatatctttgccaaaaaaaattttgggtaaatttggatgtttgggtttttaagtacagtactgtacgtagaatgtaaaatactagggtgccagattgtaagggtattatgtaaggcagtagaaccaaagatgttgtgaactctattgatgttaccatctgataaggataaggataacaaaccaaacacattttacaaaacttttcggctttgttgaaattagcagcatcaccacattaaacccaaagggcaaaggctaatgggcaaatgcgcgtgctctctctttcaccaagcaaacggcatgcattttgtttttttatattgtatttctctttctgatttctggtaattttatatatggaaatgactccagcttggacgcccgatgggaggggttaaaatcgggcgttgatgtcagcatgacgtcagcgccacgtatacgtgtaaaaccattttaaattgatttttctcttaaattacttatctaaatcatgattcgattgcaccattaaattcgttgcaattaaatcttcaaaacaagaccacacatggatatatttcgacgaaaaaaaattagcttattattgaatttatttttaaatgttgcacgatgttccactaggtatatcggaattgtttcactaagtagatcgaaaatgtttcactcgtttaaatagggtgttgtttcaccttatataaaaacaatatttcagcaaatagcgaaagaatgtttcagttcactacaacattagatctatatatagtgaaacattgtgagtacaataggtgaaacattttttgtggaacaaaagataaaacgaattcccttaatagagggtttttaaaatatgtaggtgatttgttgcaatagagtatttctgttcactataacattagatctatacatagtgaaacatttgattgcactagatgaaacatttttggtggaacaaaaaataaaccaaattcccttaatagagggtttccaaaatatgtgggtaatttgttgcaatggagtatatggtggagataagtggcaggtgagggcagagacgtggtggggcccagaggcaggcagcgcgcgtcgtgggggggggggggagggagcgcccgatacttctccctccccgagcgaccgatccggggcattcccttatatatcaatggtttatactttatattccttgtcctatttagtattattcttttattcctatttagaatcaaagtttctatctagaaactttctataccagaaagttttgtattcttaaaatttatagacatgtgtctcttggtaggctggcatgtggcctaggcatgtgaatgttcgcccattaaacctacctcgctaagccaacaagaacatttgaaaaagaaaattaaattgcagcaaatgaataactcttggacctcggatttctacggaactttatgaatttatatgaagttcaggtgtcaaaagtgaccttagggagaagaaaaaaatataaccggaggggaaaaaagaagtagtaaataaaaacaagagatagaaaagcaaacaagttaaggcacatgaaagaaagctactcaaaaggcctgtgctccactgaagcttcttcctttttggatttgatagaacacctaccggactaaaagttttaactttccccagtaaaataacatttctttcttgtaagaaagtgtaattaaatgaaatatgcttctgatctccccacatttttaatgatgtgaacagtggaacttttagtagtccttatctagtccatagacttcgacaagatgggggcaaaaggatcgaagccatttagcgactggcatttaggaaaaaaaaagcatatatttaaataatcgcagttattacctgaaattaattacaggtaagagtgatgacctcaaccatgtaaggcacagttacacatgttaagaactcaaatcctctacagcactgctcctgtatcagggtcatttacatgtactccatctgtcctaaaatataataaattttgattggatagaatacatcataataatgtaaatctagatatgctttttatctagattagtagtactaaaatatgtcacacccaatcaaagttctttatattttgagataaaaggagtaggtccttgaataagtagggctcatatgtacatattgaccttgtttactcctgtaatttgtggtgctgagtgcaacatactttgacatttccatgcaactcacttggaaggaattaaattggttaatgccaagagtgttgcagtaagggcgaatctttgcaagtggctctgcagtgagttgaatctttgcaatccatgccatatccaatgggaccatgcaccttcatgtcatgttgctaagaaaaaagatcaacaagacaagatacaagatcatcatgggagctagattacaaattctttggagaagatgtgtatccatatatgaaaccataataatccggcctgctgctagatctaccttatctgggcatgtgatgtgtgcatatctaccagtgcccgaatgtttatagtcctgagggacatatttatcatatataatctaatttatgtttactattttgatgaatgtatttacagttgcagcttaatttagagttttagtagtttagtcatactttaggattgattcaatataaaggttagggctgagcttatcaactgcacgtaaaataagacaagtgattatcttgagtattacttttgaaataatagatttatttgaatttttaaagagacttttataaagaaagtttatgtaaataacacattgtttaatagattgggagttactatattctaatatgctcatgataaataagaatgcagtaactctaaatagaagcaaattgcatgtacaaaggtagagtctaatatgagctctttatattaattaatatcactagagattatccttctacaatgatagtaaagacaataagatttctaaaccattaatgtactaaatatctttttttattatacttctttccttttctacaccctcatgcaacaaacttttcgttaataaatgctaagagtcgactctaagctgttatcatgcgtagcaacgatgtttctcattcattccatctctttcttccacgtcaccaaatttacttgcatgataacgaagagagcctgttattagacaccattgtatactcttaacacacactctcctctctctctctctgataatctgattgttggatcattatcacacaagaccaaaaactgacaactcatatctgttaggtactatagccgaatacaatgtctctcctcctcatttgatctggtccaagaaaatcacaagtgattagcatgatgatgtgtacagtaacagtacatcgtaccttcgtacaataacagctacatgcacaaactgtcaaactgtatacctgcacacgtgaaactgtaaatttcggctttatatgcaggtcgacctactgtgctactgttttttttttctcctgatacattatccgaagcctatcaattagtctgcattagaacagactgaataacagactatagccgactataaacatattttaaatagataaaaaagaagatataaaagtagcggggcaacaggctacagatttatagccagctgcagtataaactttaagatacatgtgtgtatgataggtgggaccaaacattaattatgtagtacatgtttatagataactattgtacgaattagctattaaattaactatatatgatttgaagccaataggacatagccatggtttgaatcaatattgtcaagctagccaatcaatcaggtgaagagaagtaatctaactttattattattgttattttcataagagacaaagtcatgatcttcttcctcgctgtagcggcgccccctatttgaccatttcgagtcgcttccacgatggtcaatatggtgaaggatattgccttatgcatcgtgcaaaacctctcaaaagtagctccagaacacacggtaatgggttgtttgattagcgaccaaaggttgtcatgtcaaaactttggctgccattatcccatatccctgccctagcgtccaacgtcacctccacctttgtctctttacatatgtacactctaatcaatctcgtcgatattaatttgcgataagaagatgctattagaccgttgataagcttgaaatttaattataagtataaaagtgatcttttgcaataaaaaatgttagagatatggaggaaactcaatggtccatacgaaccaaacataactatctattgtaattaatatatactcttgtcaaacatgctgcggagtgcatgggcaatggaccgatggttgcatgaagggaggaactctattatgttgttcacttgatgaatggaggaactcattgtatccagccattttccctttactttgattgttactactagtgcatgctggcttggtcaaaacactgaatagttcagccttatcttctcatcctaatgttcaacttcagcagcaaagcagggcaatttggcacgtgaagaagctgacgtggcacaaccatgcacacacgatagtcaactatacttgccacgtggctagatatctgcccccaaagtcaatggacaaatggatcactgccacttgggcccggatatcgagacaatgggtcactgactcgtgggcccggatatctagttctattgataccgcacgtctcaactgcgcttagctttagtactatttatagacgtcacccgtacagttgtgctgagacaactaagctaagtgggcagtgggcaccaccatgtcgtcgtcgtcttcctcgccggcgccgccgcacgtcgtcgaggactgcctcggcatcgtgcagctactcagcgacggcacggtgacgcgttccggcgactactccagcatctcgctcatgcgcgacgtcccgatcgacctgcccgtccagtggaaagacgtcgtctacgacgccggccgcggcctccgcctccgcatgtacgcgccggcgaaccacggcggcgaggaggggaagcttccggtgctcgtctacttccacggcggcggcttctgcatcgccagcttcgagctgcccaacttccacgccggtgcgctccgcctcgccggcgagctcccggccgtcgtgctctccgccgactaccgcctcgcccccgagcaccgcctccccgccgcgtacgaggacgccgtggccgtcctctcgtggctccgcggccaggccgccgccgccgccgacccgtggctcgccgcgtcggccgacttcgagagggtgttcgtctgcggcgactcgtgcggcggcaacatcgcgcaccacctcaccgtcggctgcggctccggcgacatcgcgctcgacgcggcgaggctcgccgggtgcgtgatgctctggccatacttcggcggcgaggagaggatgccatccgaggcgccgccgccgccgccggagggcgacgcgtcgccgtcggcgatgggcatcacgctgttcgaccagatgtggcggctggcgctgccggcgggggcgacgagggaccacccggcggcgaacccgttcgggccggagagcccgccgctcgacggcgtcgcgttcccgccggtgctcatcgtggaccccgagctggacgtgctccgcgaccgcgtcgccgactacgcggcgaggctgcaggccatggggaagcgcgtcgagctcgtcaagttcgaagggcagggccatggcttcttcgtgctcgaccccatgagcgaggcctccggcgagctcgtccgcgtcgtcaggcgcttcgtgcacgccggctaggtgatcgtccgaagtaaaccaagatatggaactcggatgacttgtgtactactccagtgttctagcgcgggagatttgcagcttgatcctttcgtcttcatcttgtcatccgtagccaatatttcaattttataaattgtttttatagttgattttgatgttttcttatcgtagtttattttttaaaatattggttttaagtcgttaaaaacacgtgtacacaaattttgatccttaattagtttttaatatcgctaataaatgttatggtataatcctcattttagatgttaggatctaccaactacttttcacttttaagcgctgtttgggttaaaaaaaataattaaagcgaaatggtttgtagcctaatggttacaatagcctccctaacaccttaggtttttggttcgactctccatgggagctgtattttgatctgtgttctctacaagtttgcaactctacttgctaacagttatgcatttgaaaatataaatgaaatcgtgcagagacaagcgacgatatatattggacacaattgttcttttcatttatttattttcttgttgatttatactcgtgatatgatatacacggttggaaaatccgagttttttctctctttttttttttttgctctctacaagtttgcaactccacttgctaacagttatgcatttgaaaatataaatgaaatcgtgcagagacaagcgacgatatatattggatacaattgttcttttcatttatttattttcttgttgatttatactggtgatatgatatacactgttggaaaatccgagtttttttttttggtgaaagatagatcagtcgacaactcgacataaatacaagtccttttcgtattgagacgtatactggcccagcaatcagcaaatgggttgttgatggtccgtggcccgtggtcctcccttcccttacatcggccgcaccgacagcccagaataagttaagcccatttaaacattttctcgcccaaaaatttaattaaacttcggtggcatgtcatcatcttcaaactcatcttttttttgacacagtaatattctcgaattatctccccggatttattaaattaaaaataaaagtaatccattttttgagaagaaagtgaaataatttttttttcaatgatatgctcgaattacctccaccgattttttaaataaaaaataaaagtaatcacatttttttccgacgaaagtgaaataacatttttttttcaaagtgcatgccgtcctacgacaactacaagacaaccaatggcggagctagaaaattttcattgtccgggcaaatctaactacaagtatttactataaaaattttgtgttcaattctatattatatcaaattttggaataagatttcaaaattttacttatatcaaccccctcaatacggtattatttcggccaaattttttaattttttcatgaattttagtaatatttatttaaattagactaaattttgttcaaaattttgaaaataccgtcatatcagcccacttgatacaaatactgaaaacgaaagattgaacccctgaccggaccactgctactttggtatagggatgaaaacggtcgaaaatggtctgaaacgatattattattttattattttttcgaaaacaaatggaaatggccagaaaattttcatatttatgaattcatctatttaatgtaaacttcaatgccacgctaatagaaattaaaaaaaagtaaattttaaaaacagtaaccatcggtaaaaatattattgttatattagttttacgaaaacggtacagatgcggttctactttggtcgccgggcggtggctccgcgaccgaaggctacaacgaaacgttttggtttttagcttttagcctcatcaatcggatcgtggatgcgctcagctagttagataagcatattgagcttcgttcgcagccaagcaaacgctcgcgcgcgcagccggcaatggcgtcgttgtctgacccgaactcgccgccgccgcacgtcgtcgaggactgccgcggcgcgctgcagctgctcagcgacggcacggttgtccgcgccgccgcgccgccgccgccgttctacgtacgcttggacatcgacgacggccgcgtcgagtggaaggacgtcgtgtacgacgccgcccacggcctcggcgtccgcatgtacaggccggcggcgacggggggagcggaggagaagctgccggtggtggtgtacttccatggcggcggcttctgcatcggctcctgcacctggcccaacttccacgccggctgcctccgcctcgccgccgagctccccgccgtggtgctctccttcgactaccgcctcgcgccggagcaccgcctgcccgccgcgcacgaggacgcggcggcggcgctcatctggctccgcgaccagctcctctccgacccgtggctcgccgacgcggccgacgcgcgcaaggtgttcgtctcgggggaatccgccggcggcaacttcgcgcaccacctcgccgtgcggttcggcgcggcggggctggacccggtgagggtcgccgggtacgtcctcctcatgccggcgttcatctcggagaggccgacgccgtcggagctggcggcgccggccaccgcgttcctgacgcgcgacatgtgcgaccgctactgccgcctcgcgctgcccgccggcgccgacaaggaccacccgctcgtcaacccgttcgggccggcgagccggagcctggaggcggtggacgtcggccgcgtgctggtggtcgccgccgacggcgacctcctcagggacaagaacgtcgagtacgcggagcggatgaaggcgatggggaaggacgtggagctggtggtgttcgccggcgaggagcacgcgttcttcggcgtgaagccaatgtcggcggccaccggcgagctcgtcgaggtcatcaggcggttcatcgccggcgccgccgcgtaagtgatcgtgatcgagcgaacgccggcgacggcgaggtggtttgcctcgtgcgccacgtgttcgtaggcttattccacagatgcgacatggtggcaggcactgtgtccttgcaacaataattgagacaagcttaattacttcgtactacatttgtgttttttttttttgtggttacaaattgggcacaatggcaagcaacaaaggtcgacaaatttatgtcattgttgtgaaatagtggtcgcagtttatatggctgcgaaggaagtgtgacagtgaccgtaagcagaggtaataaagtcagcgtgcatttattattattttctgaggaacaaaaggaatatagtgtttccattcaaaaatataaaaatttagaccaaataagatattttctaagactacgaatctgacttgggacagattgagtacatttttttttcttccctgtggtatgtccttattcagtgcgaacatttaggatgagggagtcaaatagaaattagagtgaaatgagctcgaaagaaaatgaaaaaattggcaagcttccctctccaacacagtactatataggcttttcacgttacttgtgattaatcctagacaaatcttcctgtttcgtttattacccaaacgaaacgaatcacaccaaagagaacagtgatcgtaattttttttagataatagaaatggattacatcttcggcttctgtcataagacacacaactataaatttaatagtaataaaaatgtaagataaaagtaaatcaaaatgagaaataaagtgatgggacaaatccccaactcccctttattattgactagcgttaaaccacataaaatattttagctagcaattcttatggaattacgccacccatagtggaataagagacccttagctaccgattccaagagtgtagcaacattgtgcatagtatcctgctactcctgtggtagcattgtagactaaaagtggagccagtagaaagacatgaagataacctgcatagggttagatagttgtttaccattaaaaactttatcattgcgacaacgccaaattgaccaacatacagcactaacttcaattagaatcatcttcttaatggacctagatacccttctaagccaattaccgaaaatgtttttggcgttacggggtgggggatattaaaagcaaaaaacacatatctccaaacaaactgagcgacatgacacaaagaaaagatgttggattgtctcttgtgcatagcagaaagaacaatgtttgtctcccccattttcttttagctaggttatctttcgttagaattactttcttgtaaagaaattacataaagaccttgatctttagtggaatttttaagtcccagagaattctctttttatccgaacattacagtttatgatcgtggcatacagtgatcgtaatgtgatcatacaattactgaattgatgccaaaagcttggcaatgctctctaaaagaatactactccagcttagtagtgctaatatgttgatggaaaggccaaataagagattgtggtaaccgtggtaaaattttgacggcaaactagacattaaaatttttcgattttttttttgcaacacctgtatttgagttcatcaacaggttagtaaggtttacatcgattacaatacacacccccttcaactttgatcatcctgacaaaaaaaattacatctatatcctcgctttcttttttttttctgcatctatagatatatgcattattctgcttagtttgcagaccagtgatccactcatttgacctaaacttggtccgagtgaattttagggaatattattttcttcctttagcgtgcatgctcttttataacattttgaatgattatacattatattaacatactttttttttgaagataacatgaacaactttattcaacaagacagaatttaggggatataccccagtacatcgcacaaggatacaacttaagccaagaaaccatctctaacaaggtagagagtaaccactctaaggaagcaaactttctgatgaaacaaaacaacagtagggaattagatcgacagagttctgcggcaaagccacgacgattgaatcctttggcctccattgacatgcacaccgcttgacagactggaaggctactacagctgtcaccacggaaacggcacagatcagaggtttgttgtcgagccgtagattttggtgtaggtatcaccggactcagcagattggttccatagagtctttcattagatatgaggagcagagattgctcaacccgaatgatagaccctgcatggatactgctgttttgaagcaaaaggaagcaagattcaggagaacaggtagtccacatgacatgagaaatcagatggttgcgataaaacttctgtctttgtagaaggccgaggattgctgcaggattgtagaactgaagcggaccacaacaaatgaaaaggagcaagctcccaacgaagaagtaaccttcagattggagaaataagatgccacacccacacaatgttttcaccgttgcagaaaagcagcagctcaaggtatcaccagcgcacggagcagtagtacgaagagctccaaggctatcacaagaagcaacagcacctggagtttgaagactaccacacagagcagcaacacttgggctgccaaggttgtcgctcggagcaacatcgccagaaatttcaagaccgttgccaccacacagagcaccggcacccagagatccagggccgccaccgccgctgtacgaagcagcgccatccagagatccaaggcaaccgccgtctgcacacggcgcagaccaacgagttcagcaccagcataagaagaagattctgtccttcaagtcgcagctccaactccggcaatcatcaccaccagcaaccagggctcttcgcttgaacgtaaccaaatgagacatagccacaggaacaggaaaaacctgacaaagaaactacaacctagctacactgtactaataggagaggtggccggacccctcctccaaccctcaccggcggtgaaccaccggaatttggggggcaagaggggccggagaagaagaaggagctactgtagcaaaggggaaagttgggaggagaggagatggggaaagttgaccatccaaccagagctattaacatacttttaaaataagttaatcggtaactgatgttgacaatatccttttgacagtaggtttctctgttcgactagctttcggtgggggccaatttcttcctgattcacatatgttctcatggttacctcttacaccatttctaagttgcaatctacaaaacacatatactccatgccatagacgaatatatatactccataacatggatgacaggttgaactgcatgccttggtgagcacctcacaagtcacaaccatgctcagctactccctccgtctcaaaaaaaaaagacaaaccctgatttccgtgtccaacgtttgaccgtccgtcttatttgaaagaattatgaaaaaattaaaaagataagttacgcataaaatattaatcatgttttatcatctaacaacaatgaaaatactacctataaaaaaatttcatataaaacggacattcaaacgttggcacgaaaattcatggattgcctttttttttaaatggagggagtacttgtcatgtgatgtgacttcattttttccatagaaccgttgactcctctaccctaatgggtaataaaataaatcactttagtggctataggtacttgattattaactctaattcaataaagtcaactaaaacatatttcctgatttaatattaaacaggacgcgtgataaccccaacgggcccacaaattaactcttttgcatttcagtcctttgatcgtgattaagcccctacactacattttaatttgtacttctgtccaaactttacaataaggaccacgttataggaaaatatatctcataatacccgttgacccactcggcaacctaaataaatgctacaaactgcatctctttactctgaaaaacaaatattcatctctttcctccttaacatagagatggtgtcgtcgctatgaaagcccgaattcgatggcgtctccataggaatgtcgtattctgtattcaacacctatctttagggaagctcagattcgaggttgtcttccttatgtaatgcggtttagatcgaggcggagtgggccaattaaagttggccaaaaggcccgcagcccaacagcctggtccatggcacgaagttttggcccggcctaggcacggcccgacccgaccgttgggccatgcctagacctccttctcgacaggacgtgccagcccggcacgacacgaccagcgctcccgtaggccatagcccggaggtggcccacccaaatagatgagggaggcaaaatagacttattgtagccatataaggcacaaccgaaggaaatgagggagagaaaaaagacttatttcagctatataacgcgtgactcaaagagatgagggaggcaaaatatacttattccaaggacaagcacgataggttgctttggaccgacatggcacaacccgagttttattgggacgtgcctgagccgtaggtacagcccatgggcgggcatggcacaacacaactagtcgtgcccaggtgcgggccgtgccgaatggagctacatggtgacagggctacaatggctaaaggatgaacttgggatggcttttcctgatcgctagcaaaggcgtttcgctaaccttatttcgggtgtgtttagttcacatcaaaattggaagtttgattgaaattggaacgatgtgacggaaaagtttgaagtttatatgtgtaggaaagttttgatgtgatggaaaagttagaagtttgaagaaaaagttgagaactaaaccaggccttcttcttttctcacgacaggcgtggagctaactagtactccctccgtcgcataatataagggattttgagtttttgcttgcaacgtttgaccactcgtcttattcaaaaaattctgaaattattaattattttatttgtgacttactctattatctacagtactttaagcacaactttttcgttttttatatttgcaaaaaaaattaaataagatgagtggtcaaacgttgcaagaaaaaaaactaaaaatcgcttatattatagcctgtgggacggagggagtacgtgaacagaggcagcatcgaggagacgggggatggtgatggccgccgccgccgtagcttggcgcgttgggtgctgacatcaagatggagagggcaaacaagcagtgcacgtgaggtgcttctcgtagtacttggatttgccatatgcttcctggagcatcgccatttcttgttgtccggctgccagcatcaccctggcttaaggtcatccaccctccgcttatactgcgtcgtagcacccccactactctctcgctaacctctatcttttcttcccaagctaccgggccctctgcaggtagtgctaacaccctacaagggcactccttcccttcatagtggattccaaggctatgtggatgtttgagcatagaactgaggccacgcattgtacattacaagggcacttctttccttcacgagagtggttagttggaaactctctcaaaagaactcagttctaatgacccattagggccgctgggcttatcccatttttcttatttttgtcttatttcaactaggggcgattctacattatgtttttttttggggcctacgacacctaataaaatctagaacttcaatattactacctccatattttaatgtatgacgtcattgactttttatctagtgtttgatcattcattttattcaaaaaatttatatagttatcatttattttattttgacttgattcatcatcaaatgttctttaagcatgacataaatattttcatatttgcacaagagatttgaataaaacgaatggtcaaatgttaattaaaaagtcaacggcgtcatacattaaaattaaaatacggagggagtaattcataataataagagtataagaatatgatactagtacatgttttaataagtatgcacgggacactggataattatttttttagattctcactgattttaaccccaaagggcaaaggcccagacctaggggtgaaaacggtacggaaatttccgaaaattccggctaccgtttctagtttgcaccgaccgtttcagtcggtattggtaattgtcggtatcggaaatggaaacggtaatctcttccgaaaatggtagcggaaatgatatagggtgttttccgaccgttttgtcggtaaccgtttttttatcggtaatttccgtcaaatttccgacaaaattccgaagaaggaagccggctgggccttgctagcaggagcagcccattaggcatttaggtcggaaagaaaaaccctagggcgtcagccggcgtgtcgcttctccttctcatcctctccctgtcttatgactctcgcgctatcgcacagctcttcgccacgccgccgccgccacaaccacatgtccatgccgccacaccgccgcttgctagtcctagccgtcgcatcctcgcgcctcgccgcgtcccttgccggagaagcaagatggcacctgccggaggaaaacgccgcatcctagcttctggatctatccgacggcaacaacagagaaatgagcattgagttcgccaccgttgcgtttgccaggtccactaggtataggcgtatagcttgaatgcttgagcatgatttttttacatgtacagatgaatgcctgagccttaatgttttttagcacgattttctgttgatgtgcgagcgtgatttttgcagatgtacagcttaatccttgagcatgtttttttaagatgtatagcttgagccttgtgttaatcgttaatcacttcctctttttttaaatctcaatctgctgcatctggaagtgcaagtggaagtcatcatgtgggtgtgactgcatcatcatcctattgtatgctatagccacattgatgttgaagtatcgttgaactttgtttatattgtttgtcgaccttattgtcaacttattaatcatcatataacggtgttgtgtggcagcgtgatcatgcaagggtgaaattataaggtcatcttcatacatagttaaatgtgggatgataccacggttcgctgtttccgacatgaattttcgacttccgaccgataacagtagattcccgttccgatggttccgtttccgatataccgacattaccgatatcgttaccgtttccgagtataccgttccgattccattttcgaaaaaacaaaataaaaatggaaatggtagagggtttttccgaccgtttcctagcgttttcatccctacccagacctaccacgtggaaaaatatgagtgcttctagaagacaagaaaacgcctttgcttaccgcaagcgcagcagaaccacgcgacgtcatcgaatgcgtctcccacgggcagtacggccacggccacaccctgcacgagcccaacaaaagccagggccctgggtctacgtccattcgtcagtcaagttaattatcagctgaccgtccagaaggacaataacagtgttgacatattcagaatattctgaacaaagtgaaaataccatgataatccatgcttacaactctagtttaattcaattataaattcgcataatatatagttgccatcacgtttctgtttgtttcagctatgatttataagccgcatccaatttataatttagaattaatttatgtgtttttcttgagaacaccctacaaatgtaaatactcataaagcatgcagactcacctctataaacacatatgcacactctacctacgtcattacgagtagttgttgagattgatgaagtcaccataaacgtctcgctttcaagggtatgtcgtctaccactaaataattagcagtaaatgggagtaccagtgtcaagtctaagggttgattttggatgggctagttccaccacaaataacctaaacaattgagctacgctcatttcacgtgtgttttttcattgttttttttaatataatttggtctctaaacctttaaaccggtaataagaatagaaatgtaaaagctttatcctaagactacttttctatttttgcaagttgcaacgtttatgtttgccattggattataagccgtggtccgtggaaaagaagaagaatcttctaaacttatttgccatttttctcacgtctctgcttttggactagaagagtaaaagcttccctattctagaaggcatctcgttctcttccaagttccctatataatgggctccacgtctcgctctcacaccgcaccgacgcatcagctaccttctacgcattaacgcaaacatctgcacgacacgacacaagcaatggcgccggcggcggagccgtacgtggtggaggactgccgcggcgcggtgcagctgatgagcgacggcacggtgcggcgcagcgccgagccggcgttccacgtcgacctgcccgacgacgccgacgccgccgtcgagtggaaggacgtgacgtacgacgccgaacacgacctgaacgcgcggctgtaccggccgcgccacctcggtgccgccaacgacgcgcgcgtccccgtcgtcgcctacttccacggcggcggcttctgcatcggctccggccggtggcccaacttccacgcctggtgcctccgcctcgccgcggagctccccgccgtcgtgctgtcgttcgactaccgcctcgccccggagcaccgcctccccgccgcgcaggaggacggcgccacggccatggcgtgggtgcgcgacagcgccgcgcgcgacccgtggctcgccgacgccgccgacttctcccgggtgttcgtcgccggcgactcggcgggcgggaacatcacccaccacatggcggtgcggttcgggaaggccgggctcggcccgcaggtccggctgcgcgggcacgttctcctcatgccggccatggcgggggagacgcggacgcgcgccgagctggagtgccgccccggcgcgttcctcaccgccgagatgagcgacaggtacgcgcgcctcatcctgccgggcggcgcgacgagggactacccggtgctgaaccccgccgggccggaggcgccggggctggaggcggtggcgatggcgccgtcgctcgtcgtggcggcggagcacgacatcctcagggaccggaacgagcactacgcgcggcggatgagggaggagtgggggaaggaggtggcgttcgtcgagttcgccggcgagcagcacggcttcttcgaggtggatccgtggtcggagcgcgccgacgagctcgtccgcctcatccgcagcttcgtcgtcgagcacatggactcggagtagcaaagcactagctagctacatgatcaaagattagtcaattattaaaagtgatttagactttttctacataattgatgagttgagagcgatttgtatttgttaggtgtgttttgatcttatcttagttattattgatatgtttcttggtaatttgagaatgaatcaataatggaatgccacatggatggcaatgcttcttgatcaaatttattcgagtgaagacagaagaacaatatttctttttcttttaaagaaaaactgagcatccggctttgtggagtggtaattgttttgtcggggcactaactagtggacttatacataaagttgttcaaacatgatttcaccgaggcatgtaattaaacaataaggggatgccgattaggtattagcaatgggtagtcctaggtcgtgcccctagcgatggccgttcgcttttccatcggcgccgtcccgtccccctgcgatggaacgcgtccctctgctgggggacgcggctctctctggtcctcgccagcttttcgtggggagacgcagccaggcgtcgcgttgagtgtgtgtggagctcgtgggcacggcatcgtccccccaaatttctctttgcacactcgcctcactctcgctctcctctcggtctcgtcgcgccgcgcctaccacggttccacgccttagagggagagagagagaagagagaggcgacgaagacgacggatccgcgacggcaacaaccggatccggccaccgcgcgtcgtggcagccgtcggccgccagccggcgacgggcggagaaggcttggcgcgcccatgctcgccgccgaggagcacgaggacgacgtcgtggtggtggtcgttgcactcgggaacgacggcgacgcgacccggccaccgcgcgccttgcccgccaccgccggcgccgcggggggccagatccgcccactacggcgccggatttggcacccccgactggccacggcgcgaggcggaggatgccagggaggacgccgatgggagagaggggcggcggtggacgccggaaatattcctccatatttgacgatttattgcaaatatccctcccccctcctacttcatcttggtttgagattcccccaattgctattacttgcccattttcattgccgcaaaccccacatgataacacgactatggagacgtggtcaccactcatatcggccaggcatggtaacatgattgtgaaatctcggctcaatcgctcatgatgtttagcatttccttggacgggtcataagttttcgctcttagacatcgaggttgttgaaagatgaactgttatgcttgtcttatagggttcagcagtggcttgtttctttaacagatttaaagatgagctcggtatgacactgtatccttgagaaaaaaaaatgtgtatatccatcaaggaatgtgctaagtcatataacacaagcaaaaaacaggcaaaaaaaaaagaacagcagcaattgctaattggggaggaacagcggcaaacacacagaaagaggtaaattagagggggtatttgcaacaaacattttatagggggtaatcttaaaggtgacatttggagtggtttttgtaatttttcctaaatagaatggcctgccacattcaattttcttgagttcctctgtttgtttagaaaaaccagtagtagcctgtctgaagccggtagtaattagttgtcggaacaaacggccggaatactttaaaagtttatttaaatttcaaatttataataattttgataatttctcatagaagcattttggcaaccggtagtcttcttgttctatgtcatgtaacaagtttttgaaagaggtacacataaatgaccagtgtggcatgatctgattagaacattgaacccaaaaaaaatccaagcagaagcaggctgggattacctctttctgtgtcattatccttattttttttagataattgtcattatccttatactgccatcgatcgttgagaaacttcccaaaaaaacaccggagcatcagtttccagagatgacatagcagcataatacgtgtaatgatagtatactactgaacataaggaattctttttctatatataatttaacttaaccattggtacatgagggcaaagaagcttcaaagaaaaaaaatcgtataggagctcaagaaatcatgaaaatttccagtattaatagtgatggcgccattgctctctctccctgccattctttattttatttttcttactagtactagcaaattagctggccaaaccaacaagcccaaccgagtcaacacgctcatgcatcttttactccggtgaaattaacatctggagtcattttcatcagatgatgatgcattcatgcatactagtactaagatctacaacctacgaaggataaattaagacataacatcacgacttaggccgtgtttagattcaaaattttttattcaaacttccaacttttccattgcatcaaatgtttggatatatgcatggagcattaaatgtggataaaaaaatcaattgtacactttgcatgtaaatcgcgagacgaatcttttgagcctaattacgccatgatttgacaatatgatgctacagtaagcatttcctaatgacggattaattaagcttaataaatccgtctcgcggtttatagacgaaatctataatttattttgttattagtctacgtttaatacttcaaatgtgtgtccgtatacttaaaaaagaaatttgacacacgaactaaacatagccttatatagagttatactatctcatattgcatcaattgcacagtttatatatgcatgcaaagttgcgaatgcatcttcttactccaagttctgacgttattcaaatacaaggtactagtatgaactactcaacatgggctacagaatgtcaagatgctcaatacctgatttgcctgattcagaattgatccttacccccaaaaaaaaaatcagtgatgcataaacaacctttgttgctgatgctagagagcaaaatagccggctcttattactgaaaccagaatacaggaaacagctcgtctggcgtggtaagcgtaaaggcatagctaaagacaaatttcagtgagcacagaactgaggacgtacaaaaacagtacacaagagttccatgctgcaagggattatactcaatttaaaaatcatcttccaattgcattacattcataaaggccatctcacatttgtaatctactgaaaagtatatgataactttagtagatttttatagctaatttagctttgatgatattgaccattgttggtgcgacacacagattgactaccgcttgcacttggcttttgccattttcttcctcttcttcttctcagcctttgggatcttatctttgcgagcttctctcttttctgcttttactttcttcttgttttccttccgagcagccttcctttcctcaggtcccaccttcaaaatctcatgccatgaaccgtcttcatcggaactagtgcaagattcactatgttccgaggagcacttattttgcagatccaaaggttcttctgattgtacttgctggtttttggtaggctcgtttttattccgcacaaatcctagcaatggttggttgtaaagcttatccgctgttggttcattcgcgaaggatgggcgttgcatcaatgacatgttgacaatatctgcttcgcattgcttcacataatccagcgtctatgaaatagaattaacaatcaagcatcagtaattcaaacatacgccatcatacagcatgcagcacaaacattacaaacgaaacaaaatgaacacaacgtaattacaaaatagtgtaagtcatagatctagcaaagatcacggcctatatatactgtagagcaaaagcatgtagaaccaacaaaataaatgtagagttaaatattgaattatccatgattgatgagtaacataatgtttagtaaatagagattttttggcaaactgtgcaaacaatgatattaacttattcattatcttacctgaaccaagactgttggggtgatttcatcgtcgtttgcaaccatatctccattttccaacatcttttgctgaatctaacatcacaacaaaattgttaatccatcagacattctgcccatcataaagcaacatgatcagggcacatctagaactcagtggctatagaaagactgaaaggtgacattgagaaaataccttttccaggtaatgatcaacatcttcatcagcaatattttgatcaatcacaaaattaaatagttctgttactgacatgacagcaacaccacgttttttaaagaagtcctgcaaatagcatcacacacatttgaatatcacaacctacgaatgtctatgcagtgtcaattcaacttctactcacagtaacatgcaagcaatcttccttcaagaattccaacgctgaaggatgatcaaggtcaacggactgcgaaacatcaatgatatacaagtgtccctgcacaaggagaataaatggtgggaatcagagccattgatctgaaaaaaaaaatgatgttaaaaaatataataaacagagttcaactacctcgaaataaagaatgttgtattcactcagatcaccatggaccagtttgcatttttggtagagtgtccgcattgtcgtaattaactgaaaaagaagttgcatatgggaaaactgaaggtgttatacacataaaaaatacactaaacagttcccttacgaaaaaacaataagtgcatattgcaggagtacttatgctcccattgttctagaggcaacaccttaatctgccgaacttttctgaatacttgacagtaaagatacaatagtgtccatgggcatgagcaaatgaaggatatatgctactgcttggatatcaggggaaaaactatgcaaaagagttttcatgcatgaacattatcaccacacattttgcatgatagcacatcaaaatgaagtgggcatttaattaggttcaaacccaaaaaacaatgctgaacatgttgctaatagagactctcctagatccacggccctactacccacttaaacctttccagatttctaggaactgaggaaaatacggccttgtcttcagctgtcacattgcattcacattagtgcgtatttattatctgtaaatagatacaaacaatcctttctacatgacattatgataggatgtgaagaattcaatgtcaatgcgtcatcagacacaattgatgacagccactgcgtgttgtacatggatacagcaagttttctatcctgggtaagaagcaatgtaatatagagcagatggatctattacagatttacaattaatatgaactacaatattatctttatcttcacaagatacgtcatgtacctcaaaataactttcacgcaacttatcatcagataaagcagcatccttgagacgaggagcagcccaacctccttttcctgaaggaaaaccaaatcgaattacaagatgtactgaattattgataattccatagaattgacaaatgttaacaagcatccaaattttaccctttttatagatagagaagttgacaagcatccaattgacaaatgttaaaacacaagttttacctataaattccatcaccagtacatgaagcctcaggagcaatggttttgggcatcggattccagctgctccaactctgaaacaatggtaacaataagcatatgaaattcaaataatcaactattgtatttgcataggattgttcctgttgaacaattgaaaacatttggctaaaccaaaacagaaataagtttgtctctaattgcatccctttataacacaaaaaataattcaggcaacagaagaatcccgttgaaagaagaaaatttactgagtaaagcatgaatgatgcaaaaatgagaagaatctcaccgtaaaagatttctcatttccttttcagcccaggtcttcaccattttccgaggattatgcttgcagtaaccatgtctaaagcggtaatctccatggacatatcggtctctatccctgcaagaagagaataatgtagtttgttcacatgcaagttatttttagaacaagttgttttagtaaaactagaaaacacagaacatatccataatcaacatatctgcagtagctgtcaaaaagtaccctgttacaaaagaatacgtagatagatctatgccttacttaaaaacaaggacagatgttttatagactttgatcgctaactcctggccatcagcctttgatgcatgatagacatttgcctgcatagagaaaagaaaattgcacttgcagtccaggccagattctgtatcttttgtatacagctaaagtgctctatactatgtatatattctcaacatgctttcttatccacatacgaaagtaaattgcaaatagcagaaagcaatgtcaataagatatgcagttgaactaaaaaaatacctctttccctgtagaaatgcacccatttatggtattaaaaaccccccggtttaacatcttgaacagaaccatgcgtgttcttggatcaatagcctgcatgtgaacaaacaaaatcccgtctagttgtcaaaaatcatttcacaaaaatatcatcaatcatataagtcaaaacatgttatcacttttctagaagatcataactttctctagataggatacaagagatagatgctgcagctataaccactgaaaatttcattgaatcataacctcaaaaataagaaaatcacatggctaagagagcattcttatggatatcaagcacacaaagattataagtattaatggatgacatataaaggagaaatgaaaatatgagataatatgctagttaacaacattatagcaaatgcactaggcattaagtcagtgttgttcaagcttatattaaaaactactgcctaccaaccttgtgaacacaacaggccataaaaaaaatacatcttaggaacttcctaccaaagcagtcaattgcactagagcgattttcttgaatgatacagtccaaattattgtccatgcggtacagctaaacaaggcattatataatatataacacacggagttggtgtacacataataagagcaaactcggatgaacagagatggatgcttttttagtttgctattaaacacaaaagggggcagaagtgcaggcagcacatagtaaatttaagaagcacaagagtgaaatggatacaacctactaagaaaatgtgtatacctgttctactgtagcacgatcagccttctctgtgttccttgttttcccaattgccgtctcccttatgctgtcccttatcgcagtcgtcactgaatttgacatccccacgttcattctaccttcccattcctggacaattcaaaattcaccacattgcatttcagcacaacttcacaaagtaccacaacacacaggtgaacaagcattcctcacactcgcacaacgcgcacacgcacacaggtaagcactccgatttgctacagggctaagcaccgcagttttttttttactgcaaagttacatgaaatcaagttgaacaatacggggttctaggatgaatggattgtctaaattccaaaacaaaacaatatactccaaaatttataacgtaattgcatacactaatcgcttgcaaagtgaaattacgcaaacatgggatcatcacataagcaggcccagtgaaaaattggagtgtgcaaccaacacaaagcacgaggcaccgactactacgaggcgagagagagaggagttggaagctgcatacctccaggggtgtggcgcggatgtgcgaggcgagcttctgcgtgcggttggagatcggctggaacgggcgggacagcaccccgccgtgcgcgttcggcctccgcgccgcggcggcgcctcctgccgccgtgaaggcggccgctggccggccggagccgtcggggccctccgcggcgtcgagccagtcgagcgcatcggccacgtcggagtccgaccactcctcttcatcctcctcctcctccacctcctcctgatccttactctcggccacctcgactggcctcaccgtcgcttcctcctcctcctcctcgtcggcgtcggcgaagcggctatccacctcgggaaggtacacggcggcggcggcggcggcggtcgccatggttgaagcaaaaccctggaacggtcgtggcaacacgcgggggattacgcatatgggcttactactacttatcgtggccgtatggtgggccctaatgggctacggcctttctcttgtgggccttaatatcggcccttctatatagattttgggcttaatttttccagcctgtacacatgagttacaccgaaaattcgtggaaaataaattatatcaccgaaattttgacgagtttcggagaaagttagagaaagtaactggtctctttctcttctgctattatatatcaccagtggcgggcccaggtttttgaacttgtgtattcgaaatgagaaggggtaaaaaaaattgttcatacacctaaaagcctaaacatatcaaagtgccaacataataacatatgaaatacaaaaatgaaagaaaatgataaattaggaagaaatcttacaatttagagattaacttttcgacgcttgatattttgaaaataatcgatgatgtccttgtccttagcttgcaaattgaattttttttaatgaagccccatcttgtttctccaaaaaagagtttaaatcaacagctggcccttcttcgtcttcatgtttcagttctgaaaattaaacaaatttgataatatggtatgaactatgaactaccgtccagtgtccactagaccactacaaactaagcaagcaagtacactctcactaaatcagtgaattgcagctcccaatcctaaaattttcactacatttattcaaatttgtgtactcactaaatcagtgaattgcagctcccaatcctaaaatcttcactacatttattcaaattttgtgcatgtacagatttagtcactcactgtgttgtcactgttgtgctgctcctgtcctgcgcggcttgctgttgctgtcctgctcctgcttctgcggtcctgccctgcgcggctgagccggtcagccggccaggccaggtgccggcagccctcagtggcgcagccgcctaccgccctgcgcccggcgcggcgccccacatcccacgaccacgagcacgagggcacgagtcgcgcggccgggccggcgccacaagccccgcctgctcggcggcgcgccgccagccgcacgcctgcgcaactgtcgggatggatggggaggcgaattagggttagatgggaggggaattggggatatgtcgaaatgggctgagatgcaaggttgacaacggcccaattagaccgcgggctgagaggaaagggggaggggagtgggaagttttggcccaatagagaagaaatggtgaaataaggtccaatatgagcagtttaaggtttcttttttaattttttaaatacatatacgaactatagagtatatatacctattttttgtccaaaaatcttgcgtatacatctgaatacccttgaatatacactgggcccgcccctgtatatcaccacgtgccaactaccaaacatttttcattgaggaggagacctttttctttttttttctctatcttagatttgttaatcgtgtttgaattacaaaattgtttgctaagttttttttttttgaggtagctagccgggtacgtctatactctatatgccgtacgttatctcagcctgagtgacagagtgagagtggcgatacaggacaagacagtcatactctacgaaaatccgcaagacaaaagacagcgtttgcttggctcgtattctaccactgaattgcaccgagtttacacatttggccgaatactaataaattctacctttcttgaaaaattgaaattaaaccaaatcaatttaccaccttatgtctgtggactgtggctgccgtaagcccgtaacgcgacgtggaaagcacaaacataacacagctaacatagctgcattaaccattaaccaattgatgattaacttttctttttggtttaatacggagtacaccaaatcatccaattttaggctgagtttgtttctgcaaactgggcaagcaactctctcatattctattagcatattttccctaactgctaaacattgtattttacataatagaatttctacataaaagttttagaaaacaaaataattttttttaagcttatagtaattaatatttaattaatagtatgtgctaatgatatagtagtatctcattttagtgctagtgagtgatagagtttaatcttgtcattaattagaatatatgcatggttctattttgtttacatgtagtataggtcactgcatatttagtttggctccagctcattggcgagatgccgacgtgccgtgcgatgcggtggtgcgagaatggagcaaacaacgttcatgaagaccaagctcaactgcatgtggagtgctgcgagaagtagccgaattgcaagaaaggcaaggtcagtattagccgagtgaatcggtcctagctgtgcatgagatttagttgttgctagtgattagctgcatgtgctgcgattagtggtaatcatgtaaagggatttcttggcaaataagtaggattagttagttacttagtgcatgggcatcccacgtttgtgtgcatggcgtgagttgtggcttagtgggtttggccattgttatctctttgcatgtactgagtctatataaacaagaaaacgatgtgagctagttggctgcgtcaaccaaaagcttgagtgtgttctttcagttcttctgtgagtgtgtccacgagaaagaaaatttgagtgtttgtgattaacacctagagagtgaggagagattcctaacagtgagctcgcacaaatagttctaatcaaatccaagctatccaaacggcacattccaaagcttaacccgcgtaattccattagcttcccgagcgcgcgcgcgcgcgtcgaccggcttcacctgcacgctcccatggatcctatcgccaccgcctcttggccgtcgacgtcggcgtcgtcgtggccgcggtcggtgaggcgccgcgtgccggaggcggaggaggagagggagctcgggcggcgggtggaggagatggaggaggcggtggagcggctgcgggcggagaaggaggcggccgaggcggaggagcgggacctccgcgccgagctggacgcggagcgcgccgcggcggagacggcggcgagcgaggcgatgctgatgatcgagcggctgcagcgggagaaggccgccgcgctcttggaggcccgccacttccgccgcctcgccgacggccgcgccgaccgcgacggggagctccaggacgagctcgcctccctctccgcgctcgccgcctcctacctctccctcctccacgcccacggcatcgaccccgacgacgacgacggaagcaaccagcaagagcagctgcagcctcccgtcgaacacctggacgcggaggcagacagggagagccgctcggtggttgcgtcgccgcctccgtcggagaaggtgttcgcgtacgcggccgcgacggcgccggccgcggattgcggcgccgaggtgacggagaatctgtacgcgagggtggaggcgctcgaggtggactggtcggcgatgcggagggaggtggcggcgctgcgggcggagcgcgcgcaggcggtgctggcgagggaggtggcgcggaggctgtgccgggaggcggcggtggccggcgagaggggcgccgtcgccgtggcggcggagaggccgaggttctcggtgctcgccgtttgcaaggtagaatttcagctctgtgcatttgtattggatgatcaatcttgtcttgcttaattaatgttctgaacaaagcacttctggctcttaaatggataaaacttgttcaaattttgcctgatttcactgagctgttattcgccatgttgtacacttttaaaatgttggccttaaatcccttaaaaaaaatgttggccttaaataaaagttccctttcatgctcaaatcaaaatggtgttttaagtagtattggaggataaatgttatgggtttgtaggaacattttggttgcaaccgaacaccgtcaaaatactattcaaaatgtcaactgccaacaatttatagggcacattttggcttcaaatcaaaatggtccttaattctcctgccttgcaataacttcgaaattttggtttcggctagttgatgtaggccgtgtttagattcaaacttttttcttcaaactttcaacttttttcaacttttctatcacatcaaatgtttaaacacatgtatggagcattaaatgtggatgacaaaaaaagcaattacatagtttgcatgtaaatcgcgagacgaatcttttgagcctaattacgtcatgatttaacaatgtggtgctacagtaaacatttgctaatgacggattaattaggcttaataggttcgtctcgcagtttacaaacggaatctgtaatttgttttgttattagtttacgtttaatattttaaatgtgtgtccataaacttaaaaaaaattagcacacgaactaaacatagccgtaattattaaacatggagtggttaactgtagtcgttattgtgtcagcaattgcatagtagacgtgttgactgtcaagatcatttcctcgaaccatttttggttgacttgttccaaaaggcatagagcctcgcagggattattcctgttgtttaatccactttgtgtgtcctcctaatgccaagtcagagcttttgacataatctgaataggatcactaaacaggatgctgtgtgcatgttggctagcatattttctccaagattatttcatttttgtttggtgcaatacgtcatgtattttctgaacaagtctgtcatagcgttacgcaagtacggttcattttacagtggatttcgccttaaggccttgaatttcgttgttgctctgctaatgttgaaatgttcaatatacttggtggattattatgctatgtattgctctgcaaaccaatggtttctgaacttttcatttcacttccatgctacagcttttacagcttcgttagttcaaattataaattgatcattccaatgaagggtgtgtttagttcacgccaaaattgaaagtttagctgaaattgaaacgatgtgatgaaaaagttaaaagtttgtgtgcataggaaagttttgatgtggtggaaaagttagaagtttgaagaaaaattttagaactaaactcggtctaagtatcctgctatgctattctaaattctagtactatatatgcaatagttcaatgccacatccgcttccaacctgaaattatcactcgagaaatgataaggaaaatgttctttgctgctgtagtcttttctgcattagaaatgtgctcttgaattaaacttaattttctactgcctccagaaaccggcaagtctggcaacatttacgattccatctctctaatagtaatatcaccccttaaatcattttcacttttacagtggatttccttcataatcttcaggagaaagagatgtcatactgccaggtacgtaagaggcttttatgacttctgtttcgcctgtttctttgtatacttcaggagaaagagtctgactgtcagtagcagtgtcggatgaacatcgtgagcttattatgcaaagcaaattttgtcaaatctcaggtttacgttcagcttgtcgactacgcttctctgcctgcttctactcgtcgacaaatccgtcccgctgcatcgacgacgacggccacaaatgtgacatgtattcctttaaaaaaaaacatatgtgacatgtacaactaatacacgacgcagttcaaacgaccaagttcagaaatcagaacatagcagttttctcaattgtaaagccaaactgatgaactcctgtaaaatttgataacttttacggtgcaattaactagactgataaattatagcgtaaaagttctcgtaccgtttctgtcttctagccaataatttactgctacctccacttcatgttataagttgttttacctttttctaagttaatgttttttactttggtaaaatttttaaaaatacaatattttttaacataaaataaagaaactattaaaatatattcaatgttaaatttaacaaaactatttgtgctataaatattactatttttttataaaattgatcaacctcaaaagtttaatttttataaaattgattaaccttaaagtttaattttaaaaagttaaagtgatttataatataaaatggatgaagtaataataggcctagtggcggaaacaggggtagggtagctagggctactgccctactcctaaacctaaatttccactaaaatttatattttaaaatctcaaaacatataagatgaagataaattatgtaaattatactagttgacttgagccttatgtttaagaaaattatctgaattaggcccgaacatagactcggtggatttgaaatgctagtacgtttgtacttactactgtcatagaaagatgagttaaaacttgcaaacccaaaaaaggattgaacagtactacccaccaaaattggcatttggctcggatggcgccacgtagcatttgcaggcacctgaaactgttcctactgttcgtgcggctgtgccgcggcgcaccacgacgcggcggacatcgtgacacgtgaagaacgctcacgctcacgtaaccaaatacaccaacgcgaaaagcacggatcaaacacaacacagagcaaattcctcgtcgcattgcgtcaggacgggataggatgtggtggtggccggcgttcctgtacccgccgccggcgccggcgttcgtggcggcggcgtcggtggcgcagttcgcgttgctggcgaacgccgggctcggggagctccgcggcgagcacatggcctactccaagttctggcaggtcgtcgccgggaagaagaagaacggcggcggcggcggcggcggcgcgctgctgcccagccggcaggggatgctggtggcgtacgtgccggcgttcgtcgccgcggcggcgtcgttcgccgtgcccggcgccgtggtgggcgtgcgcgcccaggtcctcagcgccgcgctcaccgtccactttctcaaacgaattctcgaggtaattcatggccttgccagttgccaccggtttttgcaatcaactatgctcatagccttatagcgatagagtttacttgcgtacgtttatatgggtgagtgtgcgtgtgttatgagtttctacgttatactgtgtaattcttagaaaaaaatccatggaatgatgaaaattaaaagatgattgtttagccacaattcttttcatcttttctttaaggtggcaatgcacagtagcaaagttttttcggtctgctttgtatcccccataccccataaccacctcagcgtgttatcgatatatgctacttttttttctaatatattaatggataaggtttttacatgttcacgagaaaaaaaaagaacaattcaagatccttgctgaatgctagtggaaaatacatttgatttaagaacaaaactttaaatgcaaatgaaaacatttggcctgtacaccaccactaggtatgcaaagctaacgaaatcaaagcataaatatgcatttttttatttttctgcaaaattatataagtccagttagattgctcaaattttgaagttaataaaacattgaggtgtgaaaaagtgttgaattacagacggtggtgtatatcagtaccaatttgctaaatttgagttcattttgcttacttttccaactcatctctcgttttccgtacacagttatttaaactactaaacggtgttttttttaaatattttatatacgaaagttgctttaaaaataatattaatctattttttaaaaaatcaactaatatttaattaattatgtgctaattagatgcccaacacaggcttaaatattcaatgcattaaattgttttttaggtactgttcatccatcagtacagtggaagcatgccactcaacacggcggccaccatctcctccagctacctcgtcatcaccgccaccatgatctacgcgcagcacctcgccgccggcctcccggacccgccggtcgacctcctctaccccggcgtggccgccttcgccgtcggcatcgccggcaacttctaccaccactacctcctctcgcagctgaggaacgcagccggcggcagcggcggcggcgagaggcagtacaggatccccaccggcggcctcttcgggctcgccgcctgcccgcactacctgttcgagatcgtcggcttcttcggcttcgccatgatcgcgcagacggcgcacgcgctcgccgtggcctccggcacggtggcgtacctcgccgggaggagctgcgccaccaggaggtggtacgagtccaagttcgaggatttccctgatagcatcaaggcgttggttccatatattctgtaaatctttttcattttgatgaaaatttatgtaaaatgaataaatactgtacaagaaatatcttaggcttttcgtcgcttcgttttgaatttagactagctgtgacttgtgactatgcatgcaatgaaacaaataattatacgtgaggacaaataattatacgtgaggaaataataaatcccaacaaaaatgtggtgaaatttgattgttttttatctggtttttgatgtgccaaaacatccaacatctgatccgaaattttaaaccctgtgtcaattgcactagaagaatttctatttccttttgaaatgaaattaagcgcgagaagacctgttagccttgcccttaggttaagtctaggtcgttttccatttcaaacaatttcagcagacgatgcgactttctgtcattaaacatttttttcaagagaaaaacaggggtaatggcccagtaccatagatagatgacaaagattgaaattgaccctcatgaaacatataatgttccattgtgcgtaccataaccgttcttcaaaataatatggtaatttaaaattttcagttgattgtgatttcttagtttcctcaactatgactgactgaataaggattcgatcggatgtgtcagattcatgaatagtaactgatgggttggttttgaatgttcgaacatgttgaccttttaagcttgatagtgtcatctcataagcactgtaattaagaggcatgtcaagttgcagataattcaattgacatggtctagaatcctgcctatatgtattattggtcacggaaatcatgagatcaatcgacgtcaaagttgtcatagactgaagaagtacgcaaattagttgagacttgagaggtatagtattttacaaaaatgtaaattctcgttaagatctttcttcagaagttcagagatcatgattgggattcgggcagtcaaggatgaaaatctactctatttcaagttgtgcagattaatttactaagtaggtcatcattatctaaaaaaaatttactaagtaggtcatatgcttcttgcagggattagctgaaacttcactggatgttttaaatttgttctgaatgtttcttcagatatagcattttcttagtatcacatgaaaatggtcaaaagaaccttcttggatgaggataaaatatgaatgttttatgaaaaaaataaaacacctccaaatcaagtctagaacacacttcatagaacatccctggactcagtgagtttatttgactctgtcagaccgtcacacggcttaattaatacatgccgtgttaatttcctacatttcctaccaaatgtatcgaggttgacatgagcaggatggacagtagaaagcttgcttggaccttgtcatgtccgagtgaataattggcatttggtaaaattagtcattgtcatgagtcgtttgcagtcaggtgaagaaatctactcttgatagcgtgttatcgtcttaattatctgatgctgacaagttgaaatgttgttttgcctgatcaagtaccatgaatgaatgactctgcaaatgcagtcttatcatgtgttcacgagaagagaacatgcttttgtaaaccagttcacagatgaattttcacaccttcagtccaaatcgacctataaattgatagagaaatataaaaacagagtacgctgtgaattctcagatattattagagggatctgttctttttattttgacatgtatagattgaattcatcttaactacgcagtaatttattttcggtttgtttaacacaaatttgttttcaggatttgctttcagaattgtgcatgatcatttaatttagatggcgttcaaaagacggtgatacatgccctggtgtaaaatgaatttccctgatctcaagttcagataatgcctggagcttaattttcagaaagaaaaagaagaggaagttcataatctttcagtagaagaagcagttgaagatctgcaaagtaaaatgcaagtgctttttcacatggaatttgccttagttatccaacgtgcaaaaagcaaccatacttccaaaagatccaacaatggctagacaatttgtaatcaaacctatgtaaatattagatttatatttataaatatatatacacgctgtagaatccttttctacagtttttaacttcaaaacaagagaggaagttcagataatgcaaagtgagaaggctgatgtatattggttaaataaaatcaacaaattaattgcacttaatgtgttaactattaaaatgatcaagaaatgtacagtgccgaataacaaaagtaaaataacatccgaaggagcaatataaactgaaacaagctacacacatactacagaagtacagatcggttagcacttcgagtgcgactgttcgtgctaaattttcccctaatcgagaaaaattttgcacgaacactgtatgatctgatacaaacattgattagaaatttagaactctaagacataattagaacaaaacgcccagctcttgcaaggcctgcatcgtggtcggcgagaagaagaggctactcggcgacagaagagaagcagccgccggagatggaagaagaaatggatgcgccgaatggtcgtcgtcgtcgtcgtcgttgtcgtcaatcgccggcggagcaggctgacgctgctgcccaagcgcgagcaccagtgggtcggcggcggcggcggccctgcctccggccaccaggtccggcaatgtcgcggttggatccgacggcgccgtcgccgtcgccgtcgacggcttgccggtgagcttctgcacgatggccctgaactcctccggctgcgcgtggacgaccctgggcgtgagctcgtacacgatcaccggtcccatgtcgccgccgccggcgacgacacggggtttcttggtcggccgactcgcctccgccgccgccggcgacacgatcagcgactgcggccgcgggccctggatgctaccgccgcctggcctcttcgccttcgacggcgacgacgacgacgacgacatggctcgctctcgctgcagtggccgcgacgtttgttctcgtcagaagttgctgctgctgctgctgctagaaaacaacacccgcgaatgcttatataatggcgccaagcaaaaaaagatgacgtcaaaagcgcgcgaaatggtcagacagagttttttatgtgattaaattgaatattgctccaagcagcctgcagcgtatttaactaaactatgcagaccaaatcattatacacacctaatcatgcaccttaacacaaagatccgtcattagatatggttggtgttagtttaatgataatctaattacttgttaattagtagccgcatacttcctggacagtgcaaaatgctgtcgacagtgcactagacggtcccaaatatatatacttctctgacagctgcacgcgggtgcttcgtttcaggtggtcaggaactcagattgatcatcagcagctgcatctgcatccagtgcatatgaacttaattagcttgcttgtttaacatgaggttcaaaatgagacgcttgattaaaattaaccagagcgattaatcagagagagagagagagagagagagagagagagagagagagagagagcgactgagcgagctttgcgtagcggatgatgcacgcacgaacgtagtgcataatggccgcctggccggccggatcgaaggaggcagacagtagcttaattaaggtactagtagttatatttgactatgctaattaattcccatgcaaatctatctatctatccatccatccatataggcaggagtccttaaaaaatctatccaagcaggtcaaacaacgcaccactggtagagaaaccatctttcgttggtcggcctaattccacaatagtcccggttgcaacaaaaaccgggactaaagatgatatttagtcccggttaaaaagggtaacgggcatatttaacaccaatcgggactaaagatcatcttttatcccggtttaaatgctgtcagggcttgtcaaggccccccccgggatcttagtcccggttggtggagatcgtactttagtcccggttggtgttaccaaccggggctaaagatcccggtgatctttcgccccggtt

SEQ ID NO: 6206 - DNA, 2623 bp, Oryza sativa
ttagtaatatgttaatttactttaacacttgattaattcctatttaatatattcagtctatattgatatcttagtataaagtagtatcggagtagtagccgatacgcgttaaatctacaacatcggctatgctatgaacatatataatctttatattaaagtacttttagacataagtgatttatactgtctcggcaagctggtccgatctatccgaatcacttggtttaaacatatttcgatttatagattatatactgttaatatctacagtcgatcgactagatttaactttctttttgctttatatatcattgccgatctaattcacgttacatcggctagcttacaaacgatacgtcatcggcatgtggccgatcgactatcgtttatggatttaactatgtttctttgtttgtttcttgttggttgcaggatcaaaccaactggcatgcccttaaacccaagagcaaggtcctgcactagagttaagcagatctctcaggccagcgtgtgtttttcacatcaacaaaccgtcattgccaattagagatagagctcaattaagacaaatgtatctattaattaagttagttatgtcggtttgtgttagttttggcaagagagcgccgttatggtcttgtttgtatcttatctttagaaatgtttgagtcatgtccataatagactaagtttgtactcgggtgttgacgagaaatccgtgctcggtcgagccggaactgtgttggcgtgaactaagtcgacgaacacaatggcctaggagatctgcttagctccagtgcaggtccaaaggttgacgagatgcggacgtgccagtcagtttgatcttgcaaccgacaagatatacaaatagcagatcaatgagccaatcggctgataagccgatagagcgataccaactgatgtcgataaggttttgagcaatcagccatatgtttgatgtagaatctgatacttaatgtaaataaaggcaatcggctgatgataattgttaataatggaatttggcatcagattcgagtaagaaggaatagatcgaagcggatttggtgttggatttagttgaactcagaatcggactgtgtatcggctggagaccgtatcggtaggaaacaagggctgaagattgatcaagctgaggggactgatggccgatacagctgatatggcatagcttgggctcggtatgggtctagattggactaaagatgaagctcaataaaggcaattgtatctaatataacttcggcgcgccgaagctcaataaaggcaattgtattaaagcaaatccaatacaactttggcgcatcgccacccttttcttttacttgttttcggcgagttatctccacagaggtaacccgtctcgatggctcgtgctatcggggctattatgtcgttttagatgtattagttcttgtattatgaccatcgctgagtctgtccaggcaagccagcggctctgtgtgtgtgtgtgtgtgtctcggtttccgtcttctgcctccataacaagaacgtcttctcgccaagttacgtggtgaaggcagccgcggtgtcggcacgcccggggcccgggctgccttcgatcccagtaggaatcgctcctccttctccctgaaggaagagcatggaagtttactagggaagtaacacggagatatctgtccggttgtaccttcctctgtaaggtacactagaaatatcctaactaccgctttaaaggatgtcaggggtgtgaccttaagtcctgacgggaggtgtgaagtctaagggccagttgtaaggcaatgcaccccctctcatcatgaaaccaagcttatagaagatttctcccgctgacaacggagagacttcgacaagacttgggtggcaaatcgttagggtcgatggcacccccgacacgtgtcacacatgcccacggacgccttccctcggcctagccggtagggaagagccgtgtcccgccgaaggtagcctaggccctactaggcccacctcgcaccacgtggtgtgcgagctggtggaagcccaactacctctgacaggactttggagctcggggctgtgtgaactgcaagacttgaagggtttcttgaggatcacagccaaaaagtcagacggcagagataagacaattgacgtgaaggtttcaagggtagttaggtaatattgtgagccccaccttacactataagggggggactagcaactatttaaggggtcggtctttttggaaggccggggacattgccatacattgcttctaattcttcccttaggctagccaattcaccttatactccgtcggccggccttccctacggtcgtcggcctagggtagttagtgaaagtgtagcgcccgttccgtcgtggcgcctagcgggaaaattatctctcaaaaaccctaattgcgaaattttgttcctttgattgttgtctagtgtccgtgccatctcaagatctcaatccccgatctatcgtcgagttcaaattccgaatccagatcttccgaatcaattcctccgcaaagtctaccttgcccccccggcccatctctccccccccggcccatttccctctctctctctctctccctccccgg

SEQ ID NO: 6207 - DNA, 9751 bp, Oryza sativa
cggcgtgtgcgtttcgcctgggtgcgcgtagcgggggagacgccctgcccacgtggcaggcggtcggcgacacgtggtggtggcggtccccaccctccagtgagtgtcgtttcggtgcgcgtcgtgaaaaaggacacgagttgagttgagtgcggtggtggagggtggggccctgtagggatcccttgcggcgtgggacatgtgctgcccctgccgctgccctgccttcgaggttgtatacgaagaggctcggttttgcgggttaattacgcggggtgccatgaggtaccatagcgaattagcgatcagatcaggggtagtttgggaagtttgtcacgtggaacaggcgtctctgggtggcggccccacctgcacgtgtctgtctgcatattgctttgttggtgtggagttgggtagtgtggcaaatactgtataactgtacagtgcctttcttgtaaaaatactagtgtgtggtgccattagctagctttccttcagttcagtgcagtgcaggtcaagaaaggtgttgctgattacgcgttctaatttgtgttcttaattagtggtagtagcagtgtagcacctacttaactttgttagtgatgagtgtatactatagtatgggccggatgggcgctaagcataaatatcttggcttcctttacttaatttgatatcttttcgatatcttttcagaaagttgtgtcgtagtggaggccgaaagttgtctgaaaagagagatcgatcctgagactgagagcgagactgccggctgccgactgccgacgacgacgtacgaagccccgatccgtcgacaatgcaaggtactacgtacccaaactgtacagaatatgaactgtttagtttacctctattcctaacttttcatcacattatatcacatcaaaaactatcctacatatataaacttttaacttttcttcaaactcctaactttattcaaacttttaacttttttttcaagtaactagacacatcgaatgggtgctgctactagtgttcgctacgtgtcattgcctggttgtctcgatcttttcgttccttccggatgttttggcacacctgaccgttctcatcggtggatcggtcaatcaatgcaaattagtaaggcccagtttaattcgcgaaatgaaaatttttaggtgtcacatcggatgtttgaccggatgtctggagggattttcagacacgaatgaaaaaactaatttcataactcatatggaagccgcgagacgaattttttgagcctaattaatccgtcattagcacatgtagattactgtagcacttatggctaatcatagactaattaggctcaaaagattcgtctcgcaatttcccccctaactgtacaaatagtttttgtttttatctatatttaatgctttatacatgtgtttaaagattcgatgtaatgtttttgagaaaaactttctggaaactaaacgcactctcactccttatcatttcggtcgcatgatgatgttgaaaaacatccagaaacaaaaacacgcaaaaggacacatcagactagctagcgtgtacgtacgtgtacggtgtaccggtgtacacccacggaaagtacaatcaagagcaggagtgatccttccattattctccaaatctttatatttcgagtaatagtacaacaaatctttagatttcgagtcatcaatatatgtaaagatttaaaggtatgatatgcaaaaactaataatattaattaggtggatcgatcataaaaaatagtataacttcacgcagcaaaaatgagcgtacctatcattagcttccttgtggaaatttgattaggtgttcgtaactaattattctttaagcgcaaattactatatcaataacaagatatgtcagagatattcattggagtcgcgtgtgtttgcaaaggtgagtgtgagggtgtatatataagtgtcatatgcgtgtatgtgttaaaaaaaaactcatgcaattataactatttttttttacaaaagtatgatttagaaaaatagacatgtcttaggagacacccacaaacccttcgaactcatccatgatccatgaagcttcaccgctcaagataatagttaagctcctttgggttcatttagctaaggactttcatccatgaagaagagcatgaaagggtcatttgggctgggccaatgggccaatagactaatttaagctcaagggctactgcagcagtgtgggccatctccatgaggccggcccctatatagccacggtccaaaggcccagttattagcttaatcctgttatcttgtcacaggaggcggcccataaattaatgagctaaagtttacacaaacttaaaacccataaaatccatcacggcccatcccttgcaaaaggcagtctttcaagcccaaagtccacagaaatatatgctgatagattattaagctattcatatcaatctcggttcggccttctttagctcatagattcgataagctaaaataatctatcagcggattaatctcatgactatttaggagcagctagctagctagaactaatactgtattgcggtcatggcacggtcgatcgatagcgatcgagatggatcaactagtaattagtttgttattatatatggtcatcaagccatcattttctcttttttttttgacgcgaaagccatcattttctgatagcgagttggatcgagttgccactggctagcgagcatgcatatgcagtagatacagccatacaggagtcacaactgaattaaaggatatactccgtatataagctagacttgtcgacggattgagatgttctacgctttattattagtctaatcaccatcatatcgatcatcagtagtagtacttcgaccaaattaagcgatactaatttacagattcagtgcatgcagaccaagctgggtgaagatgatctcttacctagtacagtacagaaccagacattatctgtgacgggctgacggaggccggcgatttgtcaggtattcatccgtgtcagacaaaaaaaaaattcaaagattggaccttttttttttctcgagaatgtgaagattgggcttcacggctacgcctacgctcattaccgacgaccgagtcacctttaataatcggtttgggttgtaacccatcacatatgagttatccgtgacgggtgaattgaaccatgaatattgaaacccatctaagatgtatgacatctgtgacagtcgttcgcccagttttcacatcattgatcacttatcggataaggtcatatatcctctgtcaacacagatgaggatggattaccgattgtaaattccataatttcatgttcttgccgctggctcctatgtaaagccaacactataaataaagtcagccaattacattaatacttcctccctttctaaatatttgacaccgttgattttttagcacatgtttgaccgttcgtcttattcaaaaatttttgtgaaatatgtaaaactgtatgtatacatataagtatatttaacaatgaatcaaataataggaaaagaattaataattacttaaattttttaataagacggataggttaaacatatttaaaaaaagattaacgacgtcaaatatttaaaaacggaagaaatatttacttcttcttcgaggtgctcgagcctgatgctgatacagagtaagggcaaggttcgtttcagctttttgggcgattagccacacggagatggatctcgaggagtaatgctccttatgatctcatgcatggactgcctgatgctttggggtgaataacgctaaaattgaaagtttggttaaaattggaacgatatgacagaaaaattgaaagtttatatgtgtagaaaagttttgatgtgatgaaaaaattaaaagtttaaataaaaagtttagaactaaaccagaccttggtactgtatattaattgtactacgtactccgcagtcgtccgcactgcaggactggtaacgaatgaattgatcgatcgtgtagccgtgcaaaagcagcaggtcctgtacacgttgacgacccaacaagagcggccggtctcgatattatccatcacgtacggattcacggaccatataggactacaagtactcatttatatatgggccatgtttagattcaaaatattttattcaaactttcaatattttcgtcacatcaaatatttaagcatatacatggagcattaaatatggttaaaaaaaacaattgcacaatttttatgtaaatcatgagacgaatcttttgagcctaattacgccatgatttaacaacgtggtgctacagtaaatatttgctaatgccggattaataattaggcttaataaattcgtctcgaagtttatatgcggaatttgtaatttgttttgttattagtctacgtttaatacttcaaatgtgtgtccatatacttaaaaaaaattggcacacgaactaaacacagctatggtgtgatatgtcaaccatgggaaaagatgatctatgagtgttttaactgtgaatcttttgttgtagtgctaggattgatgcatgacatcttattgaataagggatagttggggacggacgcggcttgcctgctcctccacagtgctcccatccgtactcccaatttatcggacggctctgattttttggtgatgggcctacatcttctttctcccaagcctattcattttctttctccaagttcctctcccatggaaataatcggagaaaaggaaaaaatgaatcggctagaacaacgatcaacggtggcaagatctttgattctcttcggcaacgcgatttttcaaatcgtcaatgctaacgatcaagcacatgttaggatcaagcgattgctaatttgggctttcgtgacactgtaattagcactaagcaactaattaaatattttatcacagtacatgaggttaggatattttctgcagcatgctcaatatgaatgcagttattcaagtgattataataaaactatcagatagaggatgctctagatggtttcccctcaaatatgaggttactttggatatctttggtagaagaaggatgcaaccgatctaagtagcagttttatgatttatcgtctgctatatgtcttcttttctgttgaagttttttttttctttcgaaaaataccgccgctgattttgcaggtaaaaataaataaaaacagagacgaacccaccgctaaataaccgaagccgtccgatgcaacggagcatggatggaagccgcgtccgttggggacgagagaattattagaggtaagatgagaagaaaattaaataggggtggccggttgatatattagaggtaagatgagaagaaaattaaatagagcgctgttaatgatatatatatttggcaatagaactgttagcaataggcctgttggaaaaccaatatggttcgtggtaaaacctgcaactggtatagcgcccctattttcataaactactatataattattatttttaaaaaatattttgaaataagtgagaggagtcaaaaatgaacttattgagggagtagtttgagatgatcaaaatttgcagctcaagattgggctagccgcaggcatgtactactactacactggtagtactagagagagacatggagtagtggcaggtcacgtcgctctcgcgctctggccgatgtaggagtatctatctagtgctcggtcgtctggcatagtggcatggccatgctgctgctgatttgttgttgcgatgagaggagagggcaacgtagagatagatgttactaaaacttttaaatccctgtcatatcagatgtttaaacattaattataaatattaaatatagactattgataaaacttattctataaccctagactaattcacgagatgaatctattgagactaattaatccatgattagcctatgtgatgctaccataaatattctctaattatagattaattatgcttaaaaaatttgtctcgcaaattagctttttagttttgtaagtagtctatatttaatactctaaattagtgtctaagtatagagactaaagttaagtctctggatccaaacaccaccgtagttctgggatggaataagattcatcctagattgctatattataggatggagggagtaatacactacactactcccgagaggaaacatgctttaattttgcagatcaaagtcatgagtgtgcagtgatgagtggcagtgtctgcatcgcatcgcatcgcaatgtgcgatgggatctcgtcggcatcaggtggcaccactctactactactcctggtgtggtgggcccttcctgttgaccggtcaagatccagccagtgatgatgagttggatcccatgcggccagtcagcagctctcagctcctgggtcgtctccatcagcacacacgtgccagatccctccgtacgtcccctccagatgtaagttattactggttacatttgtaccgtatttttttaatgagacagagcaagtatatactccctccgttctatagtataagtgattttttaagggatgtgacacatcttatgattatgcatctggacaggcttggactatgtagatacataatcctagaatctgttacatccctccaaaatcacttatgttatgagacggaaggagtacttttgcatgtgtcgtcgtcttcacctctcattctctacgagcagggtttacaaaaccacacggttatcatgttgttatcatggttatcatatgctgtaacctttttagttttttaaaccacgatatatcttgcggttaccgttaacccgtggggtgatggtagtaaaccccatccacgagctggcttagctacaatatatcctctgcatcctccatctgtctctcgtggggctgcctacactcctttacatataaaggctggattttaatttgttatcttaaaatccatcttgtataacaagacgagcatatttcgtactctcctagtctcttttcctccctctctcggaagacatcttacgagtttcttgaattgaatgagctctaaaagaatctacttctacttacaccatccggtttcataattctcgataattaattaagttttaaagtggaataggcaatgtaatttaatactaaacaccacaagagtatttatcaggtggttttggcgccaatattaaatcgttaatatgtgcggttactttatcacgtttgtatgagtatatgttatggcaacatccaagtactatattattaagagatgtgtggattacgcgaatgtagtgttataaacaaaactagctgcccttccttttatactgaatgattgaatggttgaatgatttatgatactcctaactatttaagtatacaaatgaatggactaactatattatgaagttgaaaagcacatttaattattccaagaaattcgtatatacggtagagggtcttttaaaaatcacaccgtccagcaagcgtacgcattcttttattcatccgtcaagaaataaattaaaaaaagaacatggagtacgtgaagtccaacatgacacatatattgctgaaatggagtatttgataggtggcaaactcttaacttatctatgtatatgataaactgcaaatttattttcaaaaaggatcgataaatggatatggtctattgcgatattggactatctgatgatgatggccgatctactttgcttgctttctgaccaagttaattttgaccatttccgatccttaagctgtctggctgagtgaatgatgagtggtgaactacgaacagtgcatttgggggacattgctttgtttggatttaaagcttgttttaacttttgcaagcaagttgtttggtaagagtcagctaaacaaaaccaagctagctatgacgaagatatagatcaatagatgccccggtgttcacctttctaccttccggttttcttcttcactttctctaatttttctctttctctttatttctctttctctttacagaaagggtggccatcatctgcatctgcaagtgataaggatgcatggctagctagatgcttttcatcttaatttcatttgttaattaattacgacaccaattctccttgtgttgtcactgaaattgtttccatggaattttatttgaaaattttaaattagagccttgtcgcggagcatgcatgcagctctgcaaactgcaattgcataatttatgttaacatcattcatgcacaaacaaaatacacactaaattaacaattctgcctagagaagaaaaataagctaatcggtcgatcagcagctaaatagttttttttcttgggaagtagtaactaagtaccttttctccaactcttttccaagatatactctgtatatattataaaatcaacagtagcagtataattcttaactgtggcaagtgccgacaaaggagaattagattcaattcagagaatgagaatactcccaattctatgagcacctccaatatatagttagaaaccttccgtggagtattatgggactgcgaagtgaatgtagcttaactggttacattgcttatgatagaactaattcacataggttcgagttctagatttgatacgaattcttgtatttacggctaattaatctttcaatgataggtaacgcacccgtcgacagcgaggtgttcgtggtagctttttgtcaatatcaaaatatgctagctcttcgaaggtgctagctcttcaaaggtgtttatagaattgggtgtatatgtgtttatagaagtgaatgtgtatgttgtaattaagcgcatatgatgttaagtacaagtatcatgataactaatgaaccgactaagcactgaagctagccgaagttagtatatgtataaatttatgaaaggacagcatctatcgattatttgagtcgatctgaaggcattcgcacatcgactttatttctcttcttacacatgcatgcatgctgtcatatgtacagtgtacattgtctgatggatccgcacgtactctctcatctgctttgaataattattaaattatcgccgatgattcgaatatatttgtacacgcacgatcgatcgtgtggttgctactagcttttgatctttgtcgtcttgttcatgttctattagtatatgatcacaatcaaatgccctggtcaccaaagtatgctgtttcgaacatgtttgaagtcaaactttaaaaattactctctccgtttcatatattataacacttcaaatttatcataagttatttttttaaaaaaaattagctgagttcatagaaaaatgtaggaacattttcagcatcaaaattagtttgatcattaaatccacccttaaggtctatttgttttgtgttggaaacggtgctacatctttgtatgtactgtacacttggacaaatttgaataaatttgacctaactatagatccaaaagcatcgcgtaatatggaatagagcaagaccaacaccaattttattaaaacaattatatcagatttatcaaaaatatatttttagatttgccttgaaactttacttccacaaacactattactctctccgtttcataatgtaagtcattctagcattgcccacatatatataaatgttaatgaatctagatataaacacatgtctcaatttattaacatctatatggatgtgggcaatgctagaatgacttacattatga

SEQ ID NO: 6208 - DNA, 18902 bp, Oryza sativa
cccccccgcgcgccgtcgcccgttgcctcgcgcccgcgcaagccgagtggccgaccgcccggtcgccgccgccgtcagctctgcccgcgccagtcgccgctgtcgccgctccgctccaaaccgcccgccgtcgtcatcgccggcccccgccactccgcgcgctagccgccaaggcccggaggccgcgcctcacctccctctgccgcgtcgtcgccccgcgcccaccctccttttcccgaatcggcaaaggagagaattcctttctcctcctccttttccccttcctcctttttcctctcccgccggcgtcatcccgtctgccaccgctttggccgctagccgagcgccagctcgcgctcttgaccgcgcaagtcggttccccaaaccgacattgccgcctccttaaacccccggcctccccttctccttccctccccattttcgcctcctccactgccgtctctattttcgccgtctccaatcgtcgccgcgcgtgtcggaggagccggcacgagcgaggacgccgaagaggactccggccgcgcctcttcttcctcttccccggcccgaggccggagagatcactcccgcgccgtcggcctctcgtcacagcgcctctccttcccgcggtgatgtttcgcttcgttctccctcctcgctccgtctcccccccttagacttcggatttagctcgagtagacctcccgtagttggccggcgccgccccgaccgatgccgttgctcgccatgtgctcgtcgccgtcgccgcccgagctccgaagtagccgcacgtcgccagcccagctcggcatagctccgtccaatccaaccctagcatcgagttcccgtggccttgtagatgctctcaccgccggaaatcgacctctcgtggcctcgtcgccgtttccctcttctcccgccgccggttgcggccgccgcaatccgccgccgccaagcaacctccggcgaatccgagccgttggctcgtctcctctcgtcccgtactactgcccggcgtgctcgccttcgccggtatcgccgtggcccgctctaccgctcgccgccgtcgcccgccgttcatttgcggccggtcgtcgtctacctcctgccagcccacgtggccgccacgtaggcgccacgtcggcgccagctcggctgagctcgggacgggccgaccccggccgatccctccccgtgcgcgcatcccaccgcaagccgtgaggctgcgcgtgggcccgccgcacccgagtcctccgtaaaccgcgcgtgcaccgctttccccctttcgcccgcgcgcgtgcgccgcgtgctccctccgcacggtgggccgagccgctgacaagcgggtcccacccggggccgcgcgaggtgagcccggtccaccggctctctctctcctctcccgcgcgcgcgcgtaaatgggccgctttgggccgtccggcccgtttagctcggccggaccgagccgaatacctttgggccgcgccctagccgcccgaggaaagtctagattccctcccttcatcatttccttttcctttttccaaaaaggatttaattaaatcctttttcctttagaccaaaaatccaataatcttagaaattcaatatctttccaaccaaaactccgtttgactccgttcaacttccaaaatttcccaaatctcgagatctatctaatggcatgcttaggggtcattaatagggctttattctcgccgtttgttgagttgtcccgtttcgcgtgtagtttcggagcccgaagacccgcagtgcgaggatttcgaggatcaagctccagatctcgagcaaggcaagccacctttgaacaacttgagcctatatttgaaatttaattatgttgcttgcaaaatattatgcattgataggatcacacttaatcttttgccccatctgcaaggcagattggtggacctacctaattgattgcatttgatcctccctctgttaattgttataccatgtcccttgtaaccacccagttgtaccgcgatattcgtgcactctgtacgagtatcgacggtagccttcaaacttaaaatctgagtacaacttgggtaaaactggagctttacaaaagacttggaaaacccgacgcctgggtcggtgcttgcgaactaaatgaatttccaaaactgcggaccgggaaacgtatcgggtgtacggtttcccgctcttgcacgtaaggaccgatcccttggaatttcatcccaacataagaccagtacgaccacatgggtggaatgggacacccctggctgagtaactagcttatcaggggagccttgatgccgagagacatgtggattcgccggggtggtgtcggggaggacccctgggtttcctagcacagtatggtctgggacctaacctgttgttggtctgggacccctctcgtcggcatatggcaaacctgcatcggctttcgaaatgccttgtcatgaaagcttggaggtctcccgacgtggctgatccccacgggctgggtgacccgggttagtaatgtcgtgtgggtaaagtgtaccccctctgcagaggttaacaaactgttcgaacagccgtgcccacggtcatgggcggatgtgaggtgattcctagcgtagttttgtttgactactgcttgtgaaattgctgttatgaaatcgggttcgatgtttgaaaagaatccgcagctgacgggatcagctaggcccgggtggccgtttaaaaagttgttggcccgggtggccgtttgaaaagttgttggcccgggtggccgtttgaaaggtgttggcccgggtggccgtttaaaaggcctttggccgggtgccaatcttgttcaaatctaaagactgatacattgcacatactccgaccggacgagacacactgcctcatccgtgtcgtttgagaagcactcacttagttgcttttagaaaagagttcaaataaaatcaattgcaaaaacaacagccattccttgaagcctgcattaaacacttattttcccctggcttgctgagtactcccgtactcacccttgctctatataaatatcccccccagttgctgaagaagatgaagcagatcctgctgatgaggagttcttccaggagcaagccggctacgatgagttttagggtttcggcctagttcccaagtcgcgcctgtgatgattggtccaagtcctggcttccgtttcgcttttgtaatgcagttgtgagctcgggttctgtccgcagcccaacatgactgtactcctactctatattaaagagacctctgttgctatgatattctgtctccctgtgataccagcactgtttcctgggactggtatcgattaacaggttaatttggagcgtcacgggctagttccggccggaactggttcggggcgtgacagaaagccaaaacacaggagtaggttattatacctccgggtggcctgaacctatataaatctcctcgcctcccgccacggggctagctcgagccctgcgcacactcgcgcccttgtcctctgccacccctcgcgacacactccatgccgccttggcacgaccaccgtccgggcgccgacaaaccccttggccgaatctccattctcacgggaaggggtctccactccccactgaccatggaatcgcccccacgacacatacttagtgctgcatcagtacattagatctgctaagtcgtgcatagaatcatgagctctagcctgtttttgactgataataggggtagtatcggtatttcagccgatcctatctaatatgcatgtttctttatctgtttcatgtatattcaccatctatatagacagatcacctaatagcatcatatcaagtctaggtcaaattggctgtgctatcaatattgactactgaactttacttaatatattgctatagattgatatgcttatatagatttgtactggagtattagctagtacgttatccttattgctctaaatattgttataccggaaatattgttatattggctattttctcaatattgtcttaaaatcttttattaacctttatggacagtattacagccgatagggcatatttagggttttatattctttgatttatcaagactatagccggttcggtcttaccccattagctgggaccatcaacaatacgctatcagcctatcggcctattggctatcggttgactaatcctatcttttgtttccttgctggttgcagggtcaaaccagctggcacgcccttagcacttcgaggcaagccctgtacctgcactgcagttaagcagatctcccaggccgtcgtattcggtcttatcccatcggctgggaccatcaatgatgcgctatcggcctatcagccgattggctatcggctaactaatcctgtcttttgtttctttactggttgcgggatcaaaccagctggcacccccttagcactttgaggcaagccttggaccagtactggagttaagcagatctcccaggccaccgtgctttcacagtaacaataatataatgaaacaataatataattcaatagaaactaatcatccaataatgatatgatagatccgaaggttaaagcatacatcggctggagatttgatgtcataaaatctacaatattagataaatagtgaaacctttattgtcatcggctaaattcaacatatatgctatccttgtatgccgatacaacatttagatacctcatcggctgaaaccctgatgaaacccttattggcaactaagaagtaggctagagattgtggttctaatcaagacttagtaggttgaatgtactaatccagcactaagtatgaaaagaaacacaatatctagacaatcaagcctttgactgattttcagggtggtgtgtcgtggggacgatcccacggacagcggggagtggagacccctccctgtgagaatggagatttggccaggggttagtcggcgcctggacggatgccgtgtcgaggcggcgtggagggtgtcgcaaggcatggtggaggacgagggcgtgagtgcgcggggcccgagctggccacgcagtgggaggcgaggaggtttatacatgttcaggccacccggaggtgtaataccctactcctgtgttttggctttcactaactcccctaggctgacaaccggagggaaggccggccggcggagtacaagatggatccgctagcctaagaaaggagctacaagctatgtgtgccaatatgggaagctatctccaaagcggcctctctaaatagttgctagtcccctccttttatagtgtaaggaggagctcacaatattacctaactacccttgataccgtcacgtcgatttcttgtctctgccatctgactttcggctggccgtaagacatcacacctcccgtcgggacttaaggtcacacccctgacattctttaaggcgatagttaggatatttctaccgtaccttacgagaaaggtacaaccggacagatatctccgtgttacttccctagtaagcttccatgctcttccttcggggcaagaggagcgattcatactaggggcgaagccggcctgggtcccggacatgccgagaccacggctgccttcaccacataacttgtcgagaagacgtccttgttggtgctcccggatgtgcccgggcccgagttagttcgggactctaggtccgaacctaacacttttctcaactccccaggatgcaaactttggggggggggggcgggggggggcaaggcagcccccgagcaaccttgaggcggtcccgggctcccaagaccggggcctgcaaccacgacctccgattagttccctcttcggaagtgctttggtgcttggttaattgttttgacgggccccattcccatttcgtcgactctctcatatccctccagctcgctccccttcccttccttccttcccctcctagatccggtggaggggaggggcagcggccaaaggagaggtgcggcggaggcgcggccaaaggagaggtgcggctcccctccctctcctctccctcggctctactctcctccgccgccggtcacgacgacgacgactaccgcaagacgacgacgacgccgccgccggccggtctcggggaggagaggctgctatgatgaggaggtggggcggaggggaggtgcggctcccctccctctcctctccctctgtcgctggtcgcgacgacgaggaggtgaggcagcggcgcgcgcggaggggaggtgcggctcccctccctctcctctccctctgctctactctccctctgccgccggccgcgacgacgacaccgccgccacttgggtcccaccaccgactgtgacgatgacgtcgtcgcctggatccacctgacgcgcttctgtcgctgttttactgtcgctgttagatcccctacctgacatggttctgtcgctgttttagaccggcagatatttgaatcgttgtgcactctgcttggtgcgaagagtaatcacagtagacacgtaatatttggatcgttgtgaaccgtgcttggtgcgaagagcaatcacagctgacacggagtttatactggttcggaacctcgtagtcgagtttacgtacgtccaggtgctgcttcttgtattatttcggcgagtagagattacaatgcagctaatccctatcaattcgatgggtacaatataggtctacctagctatttaagtcactacgccagaaccctacatctgtgacggcacaccaatgacgggcctaaggattggtcacagatgaccgtcatctttgacgggtcgttaggtttgccgtcatcggtgaggcatccggccgtggcccgtcacatgtatcaccttacatgtgatgggccagaattttaagccgtcgcaggtgaggtagtgacggggttgctctccagcccattactagtttgacctcacctgtgaggggtgttaaatttgcaacccgtcaaagatttgatatctcatctcaaacgagttaaaaaaattatagccgtcagagatggcttacaaaaaaaatgccccaccccacccctgcgaccctactcctccccttggattccccttccctcctcatcttcccttctcatcttctttctctcctttactcactccctcccactcatcttccttctctccctcctcactctctccctcatagatcgggccgtggccccccctcgagagctggtcgctgacgcctcctcgcctcccgaccgtcggccgccgccgccgccgcctccccacctcccgaccgccggccactggatctggcctacaaggcgcggatccggccaccgcggcctctcccccgtccgtcggccgcttcctcctccgccactacaccgctaaccgcggatccggccaccgcgacctccttcccgatcgccggccgtttcctcctccgccactgcaccgccagccaccggatccggcctcgacaagtttgggggcgcggatccggccaccgcggcctctcgcccgaccgtcggccgcttcctcctcctccaccgcactgtcaaccgccggatccagcctcgacaagtttgggggccatggatccggccatcgcggcctctcccccgaccgtcggccgcttcctcctccgccaccgcaccgtcggatccgtccacgcctccctactgaccgccggccgcctcctccgccaccgcaccgccgccagatggagttatcctttctattttgtgcctagatgaatatgattgtgatgatttttgtgattttgttttgtgcccaaatgattgtgaatgtgaagtgattttgttctttggccagatgaatgtgattgcgagaatttttgtgattcagttttgtatcgaaatgactgtgaatgtgattatttctgtgaattgtgatgcctaatggtctcgcatgcaccaatctgtggcggcgaccatcctctgctgcgacctcatttttgtccgacgatcttgttccggggtcaccatcagccagcctagggctggccatctcactttaatttgcgcgcgcgcgcgcagcagtagcagcttaggcgcaagcgatcaccaagttaaacccctgaacttgtttgtcagatcagatgtgttcgtccaacataatttctacttaatttcaagatgatgctttcagaaaagtaaaccatggcataaaactcttgaccacataaaacactacagcgacatcgactcttctactagctatattcaaagatagatagatggactgcaacagacagttctactacagcgactagatcacacccaagtgttagtagcataatttggcttttggttaggtcattttagacaggccaaattatatagaatagttggtgtaattgttttagtggtttgcttaagaattggttagcttgactagggcaggaatttgtgatgcaccgggaggtgtacgagttgctggggagctgcagaaactagagaagaaggttgggacttgggaggctgcaattctcagattttgtcagttcaagcagcttagcatgcagcgatggagcttttgccgattcaatggatgtgaggcttcactggttgattttatgtggctggggttggatgcatggctatgtttgatgatatgcctgttgaagtctagccacacaggatcacattgttgccagagcaaggggagacaaattctgaaagttgggctggagcagcgttgcaggatggaggcgactttcggctgaggcttgtatacgtctacatggaagctgtcgttaaaaaaggacggttttcattacatagaattaatcacggatttacctagagttttctatatatgcagtacagcgtattcctttactatatactatggattttgcacttggtagggctcgaaaacaattatcatcatatattattttcttctaccgttttcatcgtacttttgctcttgtttctttggccaaatcctggttatctagggtgcggttgatctttactggtttgcgctgaaaatcagtcgggttcttccacgaaagtgaagatctttgctactttgcttgaaaactagtcgttcgtcgtcacgaaagcacgacggttatcattgttgttgcgtgaatcaattttacgtgtcaacaccaagtaccaacagataaagataagatagatcttcgctcatatctgatcaagctgctcctcctcctgcctatgcagataggctccgctcggcccaccacgccgtttacgcgacgagggcgctcttcgcaacggggaaccgctcggcccgccgtccccgccgtccccgccccgcccgccgtccccgccccgttggccaggtccaccttgacctccgtcgccgccgcggcctccgttgcctcctaggccgccgtcgccgccgcgaccgccgcggcctccaatgccgagaaagccgccggtgccgccagtgccgccgtcgccgccgtgagggccgaacgcggatccgccgcggccgccggggccgccgccctggcccggttggccgggctcgcccggctgtcctcccgtcccaccgtgtcctcccctgccgccgccctggcccggctcgcccggttggccgagctcgcccggctggcctcccctcccgccgcgtcctcccctcccgccgccctggcccggctctcccggttggccgagctcacccggctggcctcccctcccgccgcgtcctcccctgccaccgcgtcctcccctggttggcattggtggtggatggatctaggcgccgccgcagagaggaagagaaggggcaaaaacctaaagcctccaccaggaccgatgaatatatatatatatatatatatatattagcagaaaacgcgaattgggcctcagcccattaaccctccctgttgcctctcagagcaaggaaaaagtctacttagactcccttaattgttcaccgaatctaaatcgtaacccttgacgggaaaaccagataggacgactccccgaattattgaaactacccaatttgactcctccagcggttttggaggacggttttgcagacgtgacgctgacgtggcggtgctaacccggttttcattccacataacgcttatgtggcattagaattaaaaaaaattatgtggacccatctgtcattcacacacaaaatatattgtgggacccaccgacatgtggggcccacatgtcatcctttctccttcacttcttccccctccctccctccctctcccttctctctcttttctctctcccttttctcttcccccttcggaagcatcggtggcggcggcagccgggggctggagtggcgacggcggcgtgcgggcgagggctggttcgaggatgtcggcttgccggcgccgggcttttgctggggttcgaggctgttgtacaagccggagttgccgctgccgccactgaggtccgtcatctcctccaagtccggtgaggtccggtcgggcggaagtgcgggcgggagataggggtgaagaacctgtgggacatcctggagtcgtgcaagaagaagctcccgctccaccacctccagtgagtccccgatccgccattaatcccggcagggctagagggtagaggtttgctaagagcaagtacaatagcaggctgtaagcgagctacaaacatattttaaggagataaataaggagagagaagagcagcgggctacagatttatagccagctgtagcacggactccaagacgcagtgtgtgtatgacaggtgggaccatgtattaatagtgtagtatgtaactattgtatgaatgaacggttagattggctataaataaattggagctagtagttagttattctattaaacttgctctaagggcatccacagcgtcgttcgactcatgcctgccacgggagacgaacgaatcaaagattcgatagttgtagtggtaaagtcgatcggtgggacccacataaataaatatctattcaatcactaccgttcatcctcccttgcgtgagcttctaatgatatctacatggtccattcctctctcgtgggcaacaaatagttttttaaacggtagagttcgactctaaagtagatgtcgatttaatctccggcacgtaacaatcgatggccgtccgttcctgatccaacgatctcacgatggtagatgagcagccacgatgggacacgtggacggttagatcgtccctagcgtgtgatcgaacggatgatagcggcaggaaccgagacacaattaataggaattgtggggtttttttttttccaaaagaaccgatgatgtggcgcgctaaatcttcagcattcccacagtgtttaagtaaagtaatatttgaaacggtagagctagaaatgaaaatgacatcgataataatggaaaatcagaaacggaactattcaagggaaacacatcaaaagaagtaattctactgttttcaacaaattacctataccggatggttcggtcgatgcaacttcagaaaggcgagtcagtccgtaagtaatttctatgcatttgatccaattatcagactcacgtacgtttgaatttgataaacggttataaacagctgcaatgcatatgaacatactcctgctgtcccaaaaaatcaaatctatgattgacatccagattcgttgtattatgatatgtcacatccagtactagattgttttttaagtgacggagaaagtatatgttttgattgatatatggctacatgtctctagttatacggttatacacgagttgtacaattgggttgtacgtgtagcagtactcatttccgagattgttttcatccatgtactccacattactgttgttaaaaccctagggaatagttcttatcataacctactatcattagtactaaactaaaatttggcattattgctagtttgctactgctaatggccaagtgtcaggttgatccggactcaggaggtcttcttgtcaatgcaaatgccaagaatgatctccttgtgctccccgtgcagcatcttgggtggcacggccaagaacgtcgcctcctccacggcgacgccgccgggcgccacgccgctgctcgccacctccatgtccaccatgaccatgtccgccttgccgctcgccgcgcccgccaccgccgccgccgccgccgccggcgcgttcgcccacatcttgcacctgtaccgcgccgccgtctccgcgctcgccgcgacgcgcaccaacgtcaccgcgctggccgcgccgaccgcggccatggcgaggaggaacacgcgcttgtcctcctccccgacgagcaggcgccgccgccgctcagacgccggcacgcggagacacagggccttgccgtactcgaccttgtccacgtggcaggaatgcgccgcggcgaggtgttccaggagagccggcgaagccgcagccgggctccgggcatgagcacggcgcgtgcgggcacgcgcgctggtggtcgtcgacggcgtagtaggtgacgtagctccggcagccgtgcgcctggtaggggcactggatcttggtcgacgagacgaaggcctccatggcgcgagagcgggcgtagacgacgccgacgccgacgccttcgcacgagtggcaccggccgccggcgaccttgccgcggcagttgctgcaagccatgtgcccagcatcgcactgcataaatcgatggacaaagaaagaaacgattcatatgaatgcaaccatgaaacaagaaatggatgaagcatcagacattgcagcaacaagcaaggaacctggaagattggaggcttcaaggggagaaagcagatggggcagtgaagcatggccatgtcgatcctcacggcgatggcctccggctccggtgccacaaccatcgcgcctgcttcttgtttccccggccggccggtcaccgccgccgcggcgatcatcgttctccatcgagaaggcttccgttttctttgcaatgctgaagattgatttctctatcttttttttgatgtttgtcaaactctcagagcaatggcatggctggtcccttgtcaatctgccaaaccacgcagtgttgtgttgccgtgtactagtagggtgaagaacaagtagaaagagctctaccctctcagtaccaaaaaaactcaattgtgtgtcagattcaaatctagaattgagttttctttttggacggagggagtatgaaaaaaaaagaaagaactgttagatggatctccctccccttgagcccaacggctcaagggggccttgacccgcgccctgatcgggggcgcccagcccaatggctggtgggcccccgtcacactgtgccatataaagaggggtggaagacgggacggcataacgacacaaggaacgaggttcgtcgccgccgccgccactccaccccataaaccctaaccgatcgagggggcgcagccagtgacgggacgggaccggccgcgccacgacctcgccgggatcccctacgaccaccactgccgcgcagcaccgtcgccgtcacgaccgccatcgccgccgccgcccacgtcaagcagagcgacgacaacgacgatggctgggacttcctcttcatccaacgcgtcaaccggtcacatccctaaaccctttcccttattctctattgttgttcaatcatccatcgcaaatagaaccacccgactagatctaaacctaggtgatccaatagacaaccctaacaatggtatcaaagccaccctagagtttagattggttggggaaagaaatccaaaagaaaggcaaagaaaagcaaacgatccaacggatcgaaaagatcgaaaccctaaccctaatcttacctcgtcgccggccgtcgttgacgccggccacggagggggagaggggcaaagaggcaccgccgaggagccactcgacagccgcgtgcgcacccgcgggtgcacgcgcgcgccggcgagggggcccgcggcggcgccaccatctccgtcgtcgccggtctctcactcttcactcgcgtggaggggtgagacggtgggggggagaagagaaaagaatagagggcgtggcggcgcgagggcgtcggccatggcgcggcggcgcgaaggctgccggcgtcggcgacgccgctcggcacggcgcacgcccgcaagagaaaggagagggcgccgcggcacaaccgctcgacggcggcgcactcacccttgagtgagtgcgcgcatcggcgaaggggagtgcgacggcgccgccgtgtcgccatgccgccgccggcgctgtgctagggtttcggcgacggcgacgccgctccgtgcaaccgcaagagaaagaagagaagaggagctagggtttcggcgccggcggccgggggcggttttgtttgcccgatccgcccgcgcgaccgtccgatcgaaaccctagcgatcggacggccgacggcggccggaccgaaatcggcccatgtgggagcgcacggcgagccactttcccggcccaggcccaggttgcggcctggggaaaggggagggggcgcccgcccgcgcgcaaggcggccgtgggccgactggcaaaggccgaaaaagttcattttaggtccctcggggccgaatcaaaagaaaggaagtttaataaaagtccctcggccgaaggaagcattttcaatatgtttaatgattgtgtttatttctaagcaatttgaaccaacgtgaaaattgtttagagaatagataaatgtgagaaatgcttctgaacatgtattttgtatttttcatgcaaattacaatagaattttgaattgttttacatgtattatctctgtttaaatttgaaccaacgggagaattttacagagcgtaaacaacagagttttgttacaatttatatgaattgtatatagatcttccgctgcaaatagatgaaattgatgaaaattagtgtttctaaaattaaatttcgaaccaacgggagattttaattttaggaacattaattatgtgctatgatgttgtaatttttctgaccaacgttgataattgcaatgttatagttatggctttatgtgttatgtctattttctgcccaacggtgatgtagacttaatacataataattttaatgttaattttgttctcacaatacatgattatcttaggtggctactccttgatgggttacattaaagatattccgaccctgaaaggagataactacgaagaatggaaaagagaactcgaccttgcttttatcttgggagaggtggactgggtgttgactaccccatgtcctatagaacctgctgaaattttcagaggtgaaaaagagtcagatgctgaatggcaaaagagagagagggacaatgcttccctcatcatgtcgtatgacattgagcatgcgaaatggtcttcagccaacaagaattgtttggctgcggtaaagaacacgattgagccaaccatattgggctcaatcccagagtatgacactgtctctaagtacctcgaaagtataaagagccagtttagtggttcttcaaagttttatgcgacacagctgataaagcagcttgttacagagaggtaccatggaggtggtgtaaaagaccacattcttaggatgagcaatatggcttccaaattgaagcaaaaagatttgggcatctcagatgactttctggtccatctggttttgtcctcattgccaaagaactttgacaaccttgttgtcaactacaaaataagtacagagaattggaatattgaagagctcatctctaattgtgtgcaagaggaggaaagacacaaagagaccaatggtgactccattaaccttgtcaaagataacaaggaaaagagccacaggtcaccctcctcaaaagaaaaacagcctcagcatctgcctcagaagcaacagtttacagttgagacaagatcagtgtctacattgcaagaaaagacattccaagaaagatcatcctgacttcctgacagtgatcatggcaaagaaaggtgagaacattattacatttgtaaagaatctcattatgattggttattctagatccacatggtggattgattctggagcaactattcatgtgtgtaattgtttaaagggattccgttcaatgaggactatgcaaagaagtgaaagatccattagagttgccaatggagttgaagcaaaagttgaggctggagatcttcgcctagaactcgcgaatggcttcacacttttacttccagacgtttttatgttccttctttgcaaagaaacttgataataagtgtatccaaattggattttgatagatatgattgccattttggaaatggcaaatgtgaactatggtataataatgaatgtattggtcttgtgttgcaagatcagctttatttctttctgagaatgtgaatgttgtgtcctcgttgacaaaagaaaagaaagcgaacttctgatgtctcatcgaaattatggcactgttgtttatgccatatttcgagggggagaattgagagactggttaagaatgtagttcttcctccattggagttctctgttttagaacaatgcatacaatgcatagaatgcatcggtgcccaaaacaccgtatgagctatggatcctccgtgtgtgggggagtcctgcaaaggataaagtatttaacccaaaacagtaagctgccattttattggctattctaaaagatcaaagggtcatcgtttctactgtccaaacagttatacaaagtttgtagaaacgggacacgtcgtcttcttggaagacgaaatgattagggggagctcggtaattcgagaaattgatcttgaggagaggcgggtgtctgtacccgctccgtcgactcaggaacctttcttctctctacctgctaatgttgtgccagcaatgcatgccgttgcggtaccaacacctgttgttatctctcctgtggcaacaatgaatgaaagtgaggaacctgttctacaggattcaacagaaattattgccacatcagaggaggagatgaaacagcctcaaacagataatgtgccagaataggaggcccctagaaggcctgaaagagtcgcatatggaggatgatcccatctcatatgaagaggccatgagaagccatgaaagatgaaatgaaatcaatgaaattaaatgatgtctaggatttagaagaaattcctaaatgagccaaaacagtaggctgtaaatgggtctacaaaaccaaatatgactctagagggaatatagaaaagtttaaagtgcgactcgtggcaaaaggcttcacgcaacgagaagggattgattacaatgagacattttctccagtctcttgtaaagattccttcaggattataatggcactagtggcacattatgatttggaattacatcagatggatgtaaaaacggcatttctaaatggagatttggaggaaaaagtatacatggcgcaaccgaaaggttttgtcatgaaaggaaacgaaaatatgggatgccgtataaagagatccatttatgggttaaagcaaagcttcgagacaatgctacttgaagtttgatggaacaataaagaaatttgggttttcaagagaatgtagaggacaactgtattgattcaaagttaagaatgggagactcattttcctaattctgtatgtagatgacgttctactggctagtagtgatgtcaatctactgcaggaaataaagaaattcttgtcctcaaactttgacatgaaagacctcggtgaggcttcatatgttttgggcatagagattcaccgaaatagaacaaagtatgcattgggattttctcaaaaggcatatatatagaaaaggtgttgaagaaattcaatatgtacagatgcagtgctacacctgctcctatagtcaaaggcgaaaagtatggggcatcgcaatgtcccagaaatcagtatgagctcaataaaatgaaaacaaagccatatgcgtcagctgtaggaagcctacagtacgcgcaagtgtgcacacgacctgacttggcatttgttaccgggttatttggcagatttcaaagtaatccaggcccagtgcactggaaattggtaaagaaagtcttgcgtgtttgcaaggaacaaaaggcctcatgatgtcttacagaaaagcagaatcgctccagatagtggggtattcggattctgactttgcaaaagataatacaaagttaacatcgggatacatgtttaccctggcagcaggagctatttcatggaaaagctcaaaacagactaccactgcagggtctaccatgtatgccgagtttatagcatgccatgaggctacggggcaggtgaactggctaatgaagttcatacccggttttaaaggtggttgatagtattgagaaaccactaaagttatactgcgataaagaatccacagtaatgtactctcacaacaattagtcaagtggtgctgccaaacacattgacataaagtactatgttgtgaaagacaaagtccgggatcaaacaatcagtctcgagcacataagaacagaaaggatgctcgcggatccgctcatgaaaggcctacctcccaacatgttcaaggaacatgtagcatgcatgggttttaagggaagccttatgaatcctggactatagggcccaaaagttaaagtatctgtttctgaatagagatgtgtatagtggctgtcgaatccatcggtaattaaccgtgacgatgaaacatgctctatatgtaaatctgtgatggaatagaaaaagctaaaggaaatagtgagatcaagggggagaatgttagatggatctccctccccttgagcccaacggctcaagggggccttgacccgcgccctgatcgggggcgcccagcccaatggctggtgggcccccgtcacactgtgccatataaagaggggtgg

SEQ ID NO: 6209 - DNA, 16600 bp, Oryza sativa
  unsure (1)..(16600): unsure at all n locations
ggaggggttaagggaagcaagagatggagtggagggggatgtaacaatggaggccaagccaaggaagaacactctagctcacctcaccttcaactcctcctccttcttccctcaaatttaaattagaagagaggcaaagaaagagagaggggaataagtatcaccaaacaacaacttcactgatactgctcttttgcatgtttctttctttctttggaatagcctcctctccctgattccttctcactttcccaaaggctctctccattttctggagctttgtagtaaaggctctccttttcttttctagtacatggtgctcagaaatcagtggagttactgtttactaactattactattaactgctttgagctaggaattgagtagagaaaagataatctctattactactaatgacaaagccttacttcaggtattcagaatgctgccttgcaacatggcatacctgttgtactagtaaaagtcattagtactacatgtcttggcaataatgatacaataatgccaccgtctgcccctgtaatatgttctactagtagtcttcttctagaacagatgttatcttatcttaaactgataaaagtcaatctctatttatctacacatgcatacacttcttactggcacaagctgatcagaagtttctcatcagtaaagatattcagcctgtacaacgactccaacgacatgctgaaatcttcctgtccaaaagatagaaacaaaaaattggagacaccacacattactgagatgtaaaccaagcttggtaatcgctatgatgattagcctgatgaaagattctgtgtatacggagtacctgcttgcaagaacgcaaagctcgagaggaatacggattccttgtgaggtgggtggcccaccactaactgcaagagcagcctgtcaaaattacgtggctacccctctgatggccactgtgctgtatattagctcctcttccttaggactaggaagaagtaggcgcgaaattctctcttgcacttattattttcttatttttttaaaaaaaagatactggatgttgtactaagcaatgatttttttttaaaatcctaattagtgagaagaaataatcgattgctataggaaattcaagtctgtgaggcagagtttatacaataccctctttattccaagaaaaaatgaaaactaattctaagggtccgttttgtagagtttcacctcctaaatttaattgtaggagttatgtacagagtagaatcgtgcaacagtctaaacccagctctacttctcagttcattttgtgagaacgctccacctagctttacttccattttaggtggagttgaaactgtttggtccaattccaagaaaaggtggagttggagatggagtcatgtcaaacagactctaaagattatatcatctttaaaaattgtttctttatagaacataggacatatataataatatcatacaagattttggagttatagttaagttccaaaaatctacagattaataattcgttactactatatctctttgaataatgcacgtttacttgataaaacaataataatactttgttcaaaacaaaacaaatatccttagaaattgtctttagctacagttggggctggtccaactaggcagtgtgcagtggttcacttcacttcaaagccacagcttatgtcaccatttgcaaaataaagatttgacctaaatcccttttgcatttcgacctttttctgccacagagatgatctacatgccttttctctacttgagagaatcactgtacagcaacttgacaacaagcaaacgagggaaagataatttgatgaccagtccagcaggtgtttgaattgacaattcaatttcaggtcttccccatcttgaatgattgttttggcaatgcctatcttctactgtcttttcctcttgttcttcttggggtgagatgatgttgtcttctgctgctgaatgtaattatatgaagctactacatcttgacatcttgtgctcttgtagagctctagtatttgagcactggctattggaccaaattaataactatgtccttgtgaaagctaagaaaaaagtagtatcagacttgtcaagtccatcaccaactctctcagaattttgtctgaaatgtgccaaaccatattcatttttctcaactttggtcaatggagatgacccaaaaagaggcccatttctaaactagtatagtttacactacttatttgtttggtactttggttagagttgggttggtgaaccccataaaccaagcgatctgtctcacatctgaagtgcttccgtcaggaatcatgcaaatgaaacccagttgattaggtgtgcatcatctgtctttgttgacctatatttgcctaattctcttagtcacaacaaacacacctgttgaacaccaatagtaatgacctttgcatcttttcccccaagttctgaattttgtcagaataaaagatgttctcctaacttcttataaacaaagggtattaaagcatgtgtgaagttttaaatggtagtgtgaatttgttgcacctgtttttgtttagtcctcactttggcacaataaataaatttgtgatgagatcttatgtaagacagatagagaagtatcttttgatacaaggagaggaccacacagtagctaggtagcctaactaaattttgtctgaagttaaccctgacatgccaaacctttgatatcctacaaaatgaaaaccaaaaatacgtcgcagagtctcgtagatgaagttatgggttaaactttgccattttttttttgtccttttgctttgaattttgtttccataaaacatgacatgttgtatgtacttgtctatgagagcgagatagactcaatgcaatagattgatctcagtaatgcaaagtacatgtatagacatccttcccttatctattcaaccgacttataaaaacataatcggtagagataacgggagagagatatcacacatgccaaaacacataacaaactaacagtctaactcagtggccatcgtgtgcatgcagttcagactgaagcattactagctttgaaccgcagcctttttttttttcttctttgaggactacactttgcatgcgtatggttgtattactgttgagctacacacactgacacgatgaatactatatgcagtaaagtatggttaggcagcttgctttgatggaagcttgaagatcgattaggtgctcccttttaagcctgcaggcttatcattacgatgcagcctcatcgtataaatagcatcagcgtctctttcgaatcagcagatttttgggcgatgtgcacagcagaaaaggattagaactaccagtagcgccccattctttcagacaaacctgtaataagtattcgcttgactattcaaatcttcaggcttcagagtactacatggtacgactcttaattactttgcgactgtcaggccctgattagcaacattgataccctgaaaatggagtggccaaatcatcgtaagatgaacaacatacagataccaacgtaagactgcagtgaagaattcaggcaagcgtcagacgtcatatgtgcatacagccatacactggggataaaaacattatactgcaggaggcaggcatcctgtatccacagtatgtctactatcctggtaatgggagacatacggtatatggaagcgaacgccaaaatacattacatcctacatatattcacatgcatatacatgatggctacgttacttacgctggatagatcattcatgaagcagctagcttgggattgcatcgactgttcttctgttgaatggagaaacagcaattaatcagagatgagaacgcacagcagatgtcacacactcgtgtctgccacatgatctgaatctcatcacggattcaatccaatcagcccccatgaatgtctccaaaggaagaggtctagaggccccaggatggctgcaggtcaaaccctgcattatgtagtatctgaacaatcgatactgttctctttaatttagtttttactgcaggtcaacgtccagtatcatttgcagcagttggtttggcaaactagcatcaagttttttctgattttacaagggtcaacgaggactcgcaaattcatactggaactccactgttcgcctgccagatgccagatcgatcggctaatgaattgcctgtggaatcagaaaacgataatctaatcctgatttaagtaaagctatggactttatttctagatatattgtgcttgctggactctgcccgcttgattatttggcctcacgatcttgatccaacggtttccgtgagcccaacaggggtcggagaataactctccgaacccccgcgtggcctccgcctccgacccatcttgaccgcacgttcttgatccaacggttcctgtcaactcagcagggtacggggcattattctccgaagtccgaaccgggcacaatttttgacaatttgaccctttgaaaaaaataattttacaaatgaactaccgcaaaaacttatttcaaaaatgatcctccaaatcatgtggcgttgaaattagacacccgttgatgcgaaaaacacacaatggcctagaagatcttcttaactcctgtgcaggttcaaaatcttgcttttaagtccaaaatcttacttttaggttcgagagtgtgctagttgatttgatcctacaatcaataagaaagaaagacaagaaaaccgcagttaaatctataaacgatagccgatcggctaattgccgatgtcatattataatcgatcggcgataatgactgaataaaatagaactaaatctacttgatcggctgtaaatattaacaacatataatctttacttcgatacatatttaaactaagtgattgggatagatcggtcgtcatgccgagacagtataaatcacttaagtcaaaatatatactaaagtaataattatataaacgtttatagcatagccgatcagataaatccagcatgtatcggttaatactccgatacaactttataccaagatattaaaacaagcaaaatatattaaacgagaagcctaatatactctaatgcgataagatcttaatataaagggcagatttagcataacaaccaaacatatgagataaaatagctaaatcagttaagatcggcttaaactccgacactatctctattgatgatcatggaacaggctagatattacaattatagatagaacttaatagatcgaacccaaccgatgcagcattaagcatagagataacggtaaaatctaaacaagataataaaaatctctaaaagatggtagatatacgatataatctaaattaacaacgagatctaactctatcaggtactttctaacagtaaaaaccaaccgatcgcaagttatatagtgtaactaacagagactataaagtatatacgataactcgacgaattacacgaacaagattagagtgtcataaagatggaagcactaatcccgagaatgcagaccgccatgacaaatttacctctagttgaagatcgaattgatgcagctcaacccgaaagtaagaactcgtcgaaatagaacgaaagtaaaaaagggtggcgatgcgccgaaagtgttattgaaccgatgttgtctgattacaaaggttcgggtaatatttatacccgagatacataatatgtccttaccggacacgagtcttctatctaacaaactctaagatacacaaaatctttacgacagacttttgcccaaacatatgtctaaggaaattacataaaatatcataattaatagatacaattgcttatttgagagcttatctctatcgtggcaatccttgttaagcacgtcgatcgattctagaagtagtctcacaaccgtctttaagaaaatcggctgtcctctgtccgatccatcttagccgatgcagactccagccgatgcatactctgttcttcgaatctaactcctcgccgaatccgcttcgattccagcactgaacctggtttatatcttacaaattttggtcattaacaacacctcagcgccatgtcaactggcgctgaatgccgtaccaccgtggatgggaggctaagtcagcatgccaacatacattcagcgccatgctatttggcgccgaggtgtctaaattcagcgccacacgatttagcgctgaacaaaagggttagttttgaaataagttttggcggcggttcatttgtaaaaatagtttttgcaaagggtcaagttgtcaaaatctctcaacccccgcgccctctgacaagatactgtagcgtcgaagaactcagatgtgtctcatcatgaatttctgcttgtttttacaagaggttgtttggccttgattccaacactgatatcatttcagagttcagatgagaattgtacaaggagattaattagcggaggattcaaaaactggtatatatctttaggattagaacttgcaccagtgtccgacacaactgtaagaagaattactcttttcaccgtccaaatcttcgggcttcagaatactacagctgcagggttatactccttttttttttcttttgttccagttacgattctgaaatcctttgctattgtcagtccctgattagcagcatatattttaccctgtaatggagtggccaaataaatcatcgtagctggacaacataagactgactgcattgaagatacagatcataagccaaaacgttcaagcagcagcagctagcctgggattgcatcgattgttcttctcttgcatgaaaaatcagtaatcaggaagaatcagaaaacactgcagaatacacatgatctgtgctatgccctcttcattgtgtactgaaaccgaacatctcagcagtcagcagtgatcgaagccaatcaaaacctgcattatactactcccctcttccctaaatgtttaacgccgttgatttttttaaacatatttgaccgctcgtcttattcaaaaacttttgtgaaatatgtaaaaccatttgtagacgtaaaagtatatttaacaataaatcaaataataggaaaaaaattaataattacttaaattttttgaataagacgaacggtcaaacattttttaaaaagtcaacgacgtcaaatattttgggatggagggagcagtatatctcaacatatgacgttctttttaatttcgtttttatcactgcaggtcaacgtccagtatcacttttgcagcagctgggttggcaaacgagccatcgagttttgtctggttttacaagggtcatcttggactcgtaattcatactgaagctccactccagcacaaaacactgaacggatcggaagagtatgtttgttaacattgttgcacaaaaggcagaacaagcttgtttactattttattgttgttagttacactgctgcagatcgatcgtctaatggattagctgtggaatcagaaaaatgataatctaattacatacaaactgcacatcattacatacaaactaagtttaatcaattttaactgatcaaaatcgctcaaaaatggtaacacagccctgtgtactgtacacggtagcttgtcaggtcagaacagaataaacagagccatcatggtttcccagcaagtgagcaaacatcacccaagtgcgttcgtcaagccaaagtggttacctgccaacacaactacaactagaatcctaattatgcagcgctgaagcttttttactaatacaatgatgcagaattccaacaacttctgcaacttgaaatcttgcaacacacgggtgtgaaaacccagacatggtgctcgtcagaattcagatcatgtaaatacttttcacaactagaggagaggtaaggtgaaaaatggtagtaaaggtgttctagcttggagctgaagtgaattggagagttttcctttttgtctgatcttttctgaatatgcttttccggagaacctttccatggatttgctgtctgtatcctagagaaagggcaggacctagatagtcacaaatagaatgattgtatgtcaagctaaagtgatgttcccaactgaaattttaccaaattacttttgacattgaacggccaagaagattggaacccaaaaccaaaatcaaattaggaaaaggaaaagttgacccactcctctcttctcttcagttcttcacaagcaatgaagcaaatactagtaatattacgacaaaaggacatccgaatttggttgtgcgcctgctaacagaggccgaagatgtaaccattattattattattttttaaaaaaaggacattagaattgctgtaagtttactgctgtgcaagtacaacccttacgaccagagctgaaaattgtgcatttttttttctgaaaacctcccgcttgctcaactgcatcaattgacatggttgcaaaatctgttccaacctccagcatagacatcaggctgatctagtgtacaaggaatgtcccccccaccaacagaatatggaaacacacagaacaagacatgtacataagaaagaaacatgtccagctgaacaatcataggggatacagaacattgctcttcatatcatagtggggttttgcccaaattttgtttgccattaggcattagcctttacaactattccctgaaacataccatgtataccacggaaggaagcactcatccacctagatcatctccactgcaaaatggggctttgccccagtgcttcaccttcttcttttcctaactattacaggcaattgctatactagtctgaatgaccatagagactgagctcgtcatggagagcagtctactggggtgatccttgaccctgatggcagctcggacacctcctccctttgggggcggtccgcaaaaagcatcaagaggaggccaagtgttaagccagaggcaatgagagccaggcctgctgagaccaagctgaggtcgcgccatataggagggcagtactgcgaagcgatggagctgaatgtgttgcggacgaacttgcagtcctggagattgagcatgagaggggcataatggtacagagcatagcttacattggcagctaaaacaagctgactgtatatctctggagttatggttctggggccagagcacaaatctgagtcaggaactgtgcatgtatagttcagccatgcctgaaaagaagaaatcattttgttatcaagcaaagcttcacaaatgaccccatctagtaatcctaaaataaaccagatcagcaagagtcatgcatcagagaaaaacttcaattgaagccaacaaattgtgaaattagtaacagaacaatgccaaaacttactgtggttgcattatcgaaggtgacctccctagacttgcactgccgatcagtcaggttcgcatcatagggagaacacaggtaaggcatgaactgcccaggatgtttatgatgtggccttcgatttgaaagagcagatatagccctattaactatgcctacaagaattaccacaacatgtttactctggtacaaggtttgattggttgtgctttcatctacacatggaaggatgttgctgagagctgtctctgcttgaggatgttgtgcccattcatccattgcttcacaggtatcctttgcagcactgttgcagaaagattataatgttgttaatactaaacagtgaattgcaacctcataaaaacatatttagttttgggagggatactatcaatgctggttcatagcatatgaacatgggtgacatatcaaatggcaagcaaattcattcttttcaaatgaacacatagcacatatcaaccgacaagcaaattcatcatcgttgagttctacaaaaatgtttctactaaatatgtttgtagctcttatacttttaattaatgaaactgtgggcttacctcctgattcacggtaaaagaagttctgtttgattcatggttccataccaaggagaaaattagaattgtaagacctcctagaattatttcgcatggaaagaaggctattcgtaacctaataatacctgttcaatatcaggaaaatccctagaagaatgaagagagttgccactactgtccagcataaggtaacaaatctgtaaaattcaaaaagtaagtggtaaaaaattactgcactaacatgcccactctaatacacagtactttgtacatggccacaaagcttacacataaactgtacttctttgtccatacagctccaaaactgcaaatgtgaggaataggttgttcaagtagtgagtgttaacacatctgagataacaaaaccaacaaaaagggcatcagtttgactaacagaatgaaattcttaccatatcccaagaatgcaagaacaggcatcaacgcagctatgcaaatcaaagcaactgacctgtagtaaaacaggaattcaaattttcagttgaaggcatagcattactaataatgtgctagcataaatgaatgcaatgccataataaccattttgaattttgattacgcttcttagcaacacagtgccgtcattttgaagaaaagatataggcccacagataaatatactatatagtcacatgaactattattcagtcagtgactttcaaagtcaagaaaccagaggtaaacatggcaagaatagtttgaaacgtacaagttatggagaacttttcttatccttctgtagttttctgatgtcttttgggatatagtatcagccgctttatttaagtccactttcaaattgtcaatttgcccttgtacatctgaaggaagatagagtgctgccacactgattgtctttgcaagcgataagtaatcggtaacattccttagcgtctgaatggtgaaatcagattgattcacaacaaaatcgacagtgctagtagcttcttgtccgaatttactctgtccacaaaagaggataacagatccagccctggtacaaaatgtaacattggtagatattagaaccagtagttatgccatcttagaactcaatagtggcatggagtagaaaactctatttaaaccagcgatatcccaatcagatgaactcaaaaagaaaaggaaaaaatgattattagagagttagcacattacgttaaagtaaatatgaagaccacaagcaacacaaggcgcagtatatctgcatgaaaatcattttctttgtctattcttgatttccaaaagcagcttgcagctacagcaattccaaacgaaataaaccacccagcagcaagaacaaacccagcaattcctgtgaatgaaacagactgaaacaaacttgattcagctaagatgtaggcagaacatgggcattaagcagaacgaagagtataacagttcaatcataattaaaggcataggccagtttaacttcaaactatgccatacatttttcgactgtagagtcagtgttttcctgttctccttagattaccttgtaaacagtatttacacagttcaaagaaagtgagacaacactgtcatatcatactaccgcaaatttctcaatgtttttacatagattttttttggggggatttcacaaataccttaaaaccaaacaaaaaagaatcaagtaagtttatccatgaatggtctataagttgtcctgtaactggctactgtatttggacaagtagaaataaattgtccagactgaatttgtagttcatatatagcctgtactgatctatactatcatattccaacaaccaacataaatactagtatcgtctacttgcatatcatgacatctctaataaactagagcttcaagagtataaaacttttagtgtcttgaattcttgatagcaacacataccgcccaatagtgcttgttagtgatgttccaccctcctccatacatcctaaggtggtcaagaacatccggccgccgcgtcctctcctctgccagaaccagcggatactttgcgatggggccctctgctggccctgccgccgagtccggcatccctttcagaagccccttcgcccatggtcccaagttattcacttctgtagtagcagttcacacaaaaaaggaagaaaaacaaccgtttagtaccagtccagaatactactagctgataatatttaaccataactaccatcaaagttctgcttgcttgtacaaggcaagaagcaaatgaaaattgccacttggttgtaatcttgtacgataagtaaagcatcgagcttcacatttataagcataaattacgaaaatctagattctgtttgcgcatgaaccagtgaacgaaagtgccgcttttacacagaaagatgaaagttctaccactccctaggaagaaatgcttcgtgtgaaccttgtgacttcacgtgtaagtaaagaccgaattgtagccgtcgcagattagagcaccgacatgataattaaatactggtacccagtgtttgacttgttccaaacgagatgagagaatttttactagtggaagcgaatcaccaaaattagcatccctgaactacggggtttaaaaaatcaactaacagacggaaggagatctacccggcaaacgcagtaaaggggaagcaatatggcccgaacgaacgagcaatcaccgccgaatcctccggaacaatagccgctcttttatgcagaaattgagcaaaacaaaagccggatttatttgggcttgattctccgaacaaaatagagcatatccgatatagaaatcgaatgagatgagatcaccctaagacgctgatggtttcgcagacggcgacgaaaaaaattagtaatatctgaacaaaaaagcgcacatactgatactagacaggacaaacgtagcaccggcgcagtggtcctgaacagcagggtgaaatccacccaaaaaacacagctccaatcagtaacaaaatggattgaaacggatgaactcgacctaattaagctactcatccgatccccctccgctcactccactccactccaccgatcgatcgcaagtcgcaacggagagatagaatagaacgagagacgaatcgcaggaccactcgccgcaaaacagctcaagcccacgcacctggcacgctgtcgatccccttggcggcgccgccgagatcggcgagcgtgtcccccgacgccacggccgccgccacgaaggccgcgaccaccaccaccgcagcgcccgcgcccgcgccccttcttcccatcaccgcatctaggttcgtcggcgcgcgcggcgaggtcggggcggcggcggcgcgcgcgcgcgtaacggcgggagtgcgagcgcgagtggacgaacaccttccactggactaagcccgcggcgtcggtcggtctcgtctctctccctgtctcgggttagttattaccgaccccgacgcgacggtgtggcgggcgaaacggcgtgtgcgtttcgcctgggtgcgcgtagcgggggagacgccctgcccacgtggcaggcggtcggcgacacgtggtggtggcggtccccaccctccagtgagtgtcgtttcggtgcgcgtcgtgaaaaaggacacgagttgagttgagtgcggtggtggagggtggggccctgtagggatcccttgcggcgtgggacatgtgctgcccctgccgctgccctgccttcgaggttgtatacgaagaggctcggttttgcgggttaattacgcggggtgccatgaggtaccatagcgaattagcgatcagatcaggggtagtttgggaagtttgtcacgtggaacaggcgtctctgggtggcggccccacctgcacgtgtctgtctgcatattgctttgttggtgtggagttgggtagtgtggcaaatactgtataactgtacagtgcctttcttgtaaaaatactagtgtgtggtgccattagctagctttccttcagttcagtgcagtgcaggtcaagaaaggtgttgctgattacgcgttctaatttgtgttcttaattagtggtagtagcagtgtagcacctacttaactttgttagtgatgagtgtatactatagtatgggccggatgggcgctaagcataaatatcttggcttccttttacnnttaattgtgatatttcttttgcgaatattctgttctcaagaaagagttgtggtgcgtgagtggggaggcgcgataagtgtgtctgtaaaaggatgagattcgactccgtgtagacgtgagcagccgagcacgtgcgcggcgtgcgcgacgtgcgcgacgcacgagcgtagcgatagccccggatccgtgcgacaatcgcaaggtactgacgtacccaaactgtacagaatatgaactgtttagtttacctctattcctaacttttcatcacattatatcacatcaaaaactatcctacatatataaacttttgaaccttttcttcaaactcctaactttattcaaacttttaacttttttttcaagtaactagacacatcgaatgggtgctgctactagtgttcgctacgtgtcattgcctggttgtctcgatcttttcgttccttccggatgttttggcacccctgaccgttctcatcggtggatcggtcaatcaatgcaaattagtaaggcccagttaattcgcgaaatgaaaatttttaggtgtcacatcggatgtttgaccggatgtctggagggattttcagacacgaatgaaaaaactaatttcataactcatatggaagccgcgagacgaattttttgagcctaattaatccgtcattagcacatgtagattactgtagcacttatggctaatcatagactaattaggctcaaaagattcgtctcgcaatttcccccctaactgtacaaatagtttttgtttttatctatatttaatgctttatacatgtgtttaaagattcgatgtaatgtttttgagaaaaactttctggaaactaaacgcactctcactccttatcatttcggtcgcatgatgatgttgaaaaacatccagaaacaaaaacacgcaaaaggacacatcagactagctagcgtgtacgtacgtgtacggtgtaccggtgtacacccacggaaagtacaatcaagagcaggagtgatccttccattattctccaaatctttatatttcgagtaatagtacaacaaatctttagatttcgagtcatcaatatatgtaaagatttaaaggtatgatatgcaaaaactaataatattaattaggtggatcgatcataaaaaatagtataacttcacgcagcaaaaatgagcgtacctatcattagcttccttgtggaaatttgattaggtgttcgtaactaattattctttaagcgcaaattactatatcaataacaagatatgtcagagatattcattggagtcgcgtgtgtttgcaaaggtgagtgtgagggtgtatatataagtgtcatatgcgtgtatgtgttaaaaaaaaactcatgcaattataactatttttttttacaaaagtatgatttagaaaaatagacatgtcttaggagacacccacaaacccttcgaactcatccatgatccatgaagcttcaccgctcaagataatagttaagctcctttgggttcatttagctaaggactttcatccatgaagaagagcatgaaagggtcatttgggctgggccaatgggccaatagactaatttaagctcaagggctactgcagcagtgtgggccatctccatgaggccggcccctatatagccacggtccaaaggcccagttattagcttaatcctgttatcttgtcacaggaggcggcccataaattaatgagctaaagtttacacaaacttaaaacccataaaatccatcacggcccatcccttgcaaaaggcagtctttcaagcccaaagtccacagaaatatatgctgatagattattaagctattcatatcaatctcggttcggccttctttagctcatagattcgataagctaaaataatctatcagcggattaatctcatgactatttaggagcagctagctagctagaactaatactgtattgcggtcatggcacggtcgatcgatagcgatcgagatggatcaactagtaattagtttgttattatatatggtcatcaagccatcattttctcttttttttttgacgcgaaagccatcattttctgatagcgagttggatcgagttgccactggctagcgagcatgcatatgcagtagatacagccatacaggagtcacaactgaattaaaggatatactccgtatataagctagacttgtcgacggattgagatgttctacgctttattattagtctaatcaccatcatatcgatcatcagtagtagtacttcgaccaaattaagcgatactaatttacagattcagtgcatgcagaccaagctgggtgaagatgatctcttacctagtacagtacagaaccagacattatctgtgacgggctgacggaggccggcgatttgtcaggtattcatccgtgtcagacaaaaaaaaaattcaaagattggaccttttttttttctcgagaatgtgaagattgggcttcacggctacgcctacgctcattac

SEQ ID NO: 6210 - DNA, 19972 bp, Oryza sativa
aaaatggagagagcctttgggaaagtgagaaggaatcagggagaggaggcttttccaaagaaagaaagtaacatgcaaaagagcagtatcagtgaagttgttgtttggtgatacttattcccctctctctttctttgcctctcttctaatttaaatttgagggaagaaggaggaggagttgaaggtgaggtgagctagagtgttcttccttggcttggcctccattgttacatccccctccactccatctcttgcttcccttaacccctcccccaaaaatcccccccccccccccttgccttaaccccaaccccaaatccatccttccaagcttcaacttctctggagctttgctgttgatacctggacaaggtaaagatttgcccctttttttatttgcttgttgttgtttttagtttgctattaagccgccagaccattggaaacagcacttcgccttccttctgtgtttcctgcatctcttatctctcttggtgagttcttggttttggctgttgaattgttctcttgtttttctttttaatcttcttggtggtgttttcatggcgtttctttgattcagcactactttcttggtactgtaaaatgctagtagcaaccaccctcttgttctagctctcatcgattagtaaacttgtttcccttccattcgatgaaagccattttcatccaatccatcatgttatgctcagaaaccagaatgtgtaggttttgcctgttcttggtgcaattgctgctcgggccaactttgtccatcggctagcagataattccagttactaagtaactccccatctcttgcggttattatcatcacggagcaatcggttcctgtcagttcttaccaaaatccaaaagtcagcggttgcatttcatccccctcctgcaacacacatacctgacgaactcctccttggattcttggtgttctcctcggccattacactgttttttttttctcttaggagcatagattgtagcaagaattgtttcaggctgcgcagattgcgatgactgaaccatggagtgcgttgtttgcaggattaatgggcgaccatctggcattgcttgtggatcggctgctgacggagtcgacgctggacgcggcaatcaggaagcaggtggccgatctgcaggcggagacggtggcgatcgactactgctgcgacggcgacggcgatggcggctcggcgaggaagatggtggagtgcaggatttgccaagaggaggattgggataccagcatggaggcaccctgtgcttgctgtggcagcctcaaggttatggcttttccttggctttgtgaattgtttattctgtaattctgatttgttaccgttatgaaaaatatatccttttttcagatggaaaatttggtcttttggtctccacttttagtgggagaagataaattagttaattggtgtccatggttttctttgtggtcactttagatttctagttctagaggagtagttcactagttattttagataatagtagttcactagttgacttaggatgaaaattgttgacatttatggttggggttagctgcagtaggttcacttggttgtgtactatcatacatgctaattaagtatgcgaaaaaggtcaatcctggatttaagaaaagttgttatgaaaaatcagctgcatttgcctcgatgtaacttggaagtcactgcctcgtattggccttcctatttgatagtgatgttgctgagaaacaaaacaaaataaggtgttggtgttctttcgaagtaagggaaatggaggaggctatctgtgaccttcaagcaatgagtggggcaactacccacattatctagcaaggtcaaatgtagttgaaagttcagtaaaacattctgaattcggtgctgtttgttgcttcttgttctagcaaatgatactgtaatataatgaatgtatttcagttggttatgcaggtgaatttttgcaagatattaaattcttagcttctcccttgcagtatgcgcaccggaaatgcattcagcgttggtgcaatgagaaaggcgacaccgtttgcgaaatatgtttgcaggtaaaatcatcttggttcaactatgcattctttgtagccttgtggaactgtttatagtacagacaaatgtgtttgatagcgatacgatttgaggacatataaaactgttcaagcatgcatgggctaatcctctgatgtgatatctctttctgcagcaattcaagcctggttatactgccccacagcaactgtttcactatggaagtataccgatgaacttcaggtactctcttggggatcctaagtgataattggttgctgtgcctgactagtcagcatctgtaaattcttacatttttcttctgtttctttccctgatccctctacagaggaaattgggagattgctaggcaagatctccatgattcccagataataacaatggtgccatcggagcgcgacttcatggatggttatgaggactacttacccattaggacgagaagcagcaccctgtgttgccgaacagtcgccataattgtgagattccttgcatctggatagataaatatcctttaatgacaattatctatcacccagttcaatcctggctaattcttgtgtttcctttctgatggaattctgtccctgtgattgaatagttcatgtcactcctggttcttcgccacactcttcctcttatgattggtggggatggggagtactcgttggccttattctcggtaagatcgatgtccaaattgagtttagatcatcactgcaaaaaagaattatcacacttatcttgaagatcaagctcctgactgagtgtctgtacttctgatgggggtaaaagcttcttgtcttgaggaccgccggaatcctatttccaatcttggtcatggtgagagcattggcaaccttccatcgtcgtcgtcgccagcaggtaattccatcactgcatgatctgccattgttggagcctcctcaggtgcagtgaaatgcagtcctaatcctgctcagttagcttgagcaggtctacacctgagcagagtcctccatcttaaccattcatagtatatgctacaatcttccttggctggatcataactctgggatctagatcacttaaccctgcaggaaagacgggaaatgtatatgacttcgtcagacagcgaagaggaggaggattattcagataccgatcctgcacagccaattcattctcagacacgcctggtaccaatctactgacacgatcaagaacgatgccaaaaaaattcaaaaaaagaagaaaaaaagaagaggaaggtgaccatatgtgacatagtaaatgaagatagtttgaagccactcgcttcaaggtgcccttgcaagaatgtagtggctctgtacatatgagaaaggaacagatcgctaactaacccaagatgctgtaacttgagcttctctagtactgcaagcaagttcagctacccactataagtattgaaaaggttgttattattcagattacttgcaaatggaaggaaatacacgtcgttttctggatccatccacttgcatttttcattttacaatcgcaatcattttcgtctataacagtagagccagaatggcaattaggcattccatggctatcatcaactcagatcgtcaacccatgtacgttattgcctgatcgattggtgaattgttgattcagctttcatagcacagagttctgcatatctgatgtaatagtgttgcttgtcacgctttcaaaagagtacatccatcaagaattcaagacataacaaagcaacgttacaactgaataacctatctggcaaagtagactatcacccgaagagaactagggtaaaggggatacacactgggatggcaaagttagggagaaaaagagagagcatacatatatgtttcagctatgcgagaaagcaacggtcgtgatgcaggaactatccacgatggggtacgtttggacatggtcgatgtacttgaacaccgcagtatcactggcctgcgcaccttcggagcccatagcactgagctttctctggttgaagctctctacctcctggaccaactcatccttggttctgctacatgatgtgatgacctaaacacatgtgaaagtagcatcagaggcttgacacattctttgtcctaagccatcttcacatacatggctttcaaatagttactgtaatggtgaaaccatgtagattacacaggattattaaaagttaaacagaacatcatatgtagatattaaattggtaatttccgtaggtagaatatgtaaagcaaatagtttcaccacagtaaactgttcgaattttgttgcaagtgagccaccatgcaacacaaagatatttgggttgaatgtggtggaagtactgaccagtatgccaccaggagaaaccagccctgcaaccgactgccaatacatcattctgaaatggagtaaattgaaaatagtttaacacatggaaaccaacaagcagtgtgatccatgccagtttaaacaacctaagcaattgagagtaccaagtcactcctaaatattatgcggtgtatcaaaatttatgataatttaccatgagggattaaagcatacatcaacagcttcgcacgcattacctctttacaggtccatcggggtgcaacccaatcgtgtccagagttccttcatccatcacaagttcaaatctcctctccaactttgactctaacacatcatcaacctgcaagagcaagattcatgtaagctgaatcagctctttcctcctctttccgctttaaagctctttgttcaagggagttgataattagctgtacaaccttgaaagatgttgttttggtatctaagatacaaccagaaggtcatggatgtgcacattatacgttaaagcaaaataagaacatgaaattgtgaagcatacagatacaggcatatgcaccaaatggtccagtgctcaactcaccaagaaattaatgtgctcaaacccatcacggatagcaagattacgagcaacctcaattgcaccttcactgtggtcgatcccagtcagatcagagaacctgtatatggacatatcagtactgtcaagaggcattaacaattcaacagagtgaaatacatagttgaatgtctcctaatttataaaaatactccaagtcaatagagatgtttctcccaatctacaaaacatatagctattcgagaaaaagaaaacatgagactgtgctagcatgatcctttgcttaacagcaaaccagatgcagcttccaagaataattatcaaagggcatctcccttcaatttacaaagatggccagattttaagcatgtgatagaaagaccattgggaaattgataggtctgcttaactaaatcaattatacttgccttatggtaccaaactttacaactccaaattcatactctaattatatagaaggaacacaaacacaagagagaaggagcacaaacgcaagagcaaaagaatagacaataagtctatttcagggctgtcagaaaacgttaagaaaggcatctcaacaccaatacattgaagttgacaacaataacagcattcacattaaagtaacctttggttggagaaatgcaaatggaagattgccatttcatcaacatacccttgctttgcaagctgttgcgagagtcgaccgctcccagttcctatgtcgagtacactgcagctacgcaaatccttgttggaacataagtttttcgtccagcttacgaggacatccatgttctccgtgccaaacctacatgcatacaagttagactttcatcataaccagcgatataatgattgaagcagaaaatgaagattttctgcctttttacccttaaaatggaacattgctgcaaaaaaaaaagtagtccatccatagtagctagtagatagggaaaagacaagtctaaaagttctgaatttaatttggccaatgggcagtgggaaccaggcaaccttagctagaagacaacactcgataggcattggctgttatcgaaactacatgttggtagatattactataatgctaacgtgttttgcattccctagtgaggcaataacttagttatgttccttgttattcccatcatgttgtgaacaaagctacaacaaaaattcgatgaggagatctacactctatccatatgtgcacagcaggtgaagagaagaatctgaccagtcatctgtgtggctccgttcttgaaaattagcaaggtattctgcataagaaccatcctgatgataattcggcaggcccagcaacggcggctccatatcggcggagtctggcacgtccttgtcaaagctgttcgacattcacaacgccgagtcaggtaagcataccaaaaatgatcatctcttgaggactaaaatgtaattaccgagagatcgttggactaaatcgcatgatacagcgcgacagaacgcccccctcttcttccccccaacacaaggaaatcagatcacgggcacaacaaagcaattaaaccgtagaaacggatcgctcttaacctgaaatctccggaggggttggcggcgaccgacgccgtcgtggcggcggcggggccggaggcggcggcggaggaggaggaggaggaggcgaggaggacctcggcggcgtcggcgtaccgctgctcgtcgtcgagggtgctcccgtagtcgctcttgatggaccacgagtccgccgccaccgaccggtcgtcgtcggaggccatctcccccgggggcccggggggtcctcctcccgcgcccccgccgccgccgccggtcaccatcctcgacgggaagatctccgggtcctcgggcggccaccgtatccccgccatgccgcgcgcgcccgacctcaaaccctagccctagccctagcccggccgctgcgtcgcgtcgcaatttgttcgcgtcgtcgcggaggacgacgaaaagtcgacgagtgaatgaatgatgcgaggggtgggggcttggaagaagggtcaatgacaggtggggccctggctcgattggcccacgtgtcggtgtgagagccgattgggatttgcagcggggaccgaggagaagcgtcgggtgggcgggaattggtcgctgatttgtgggaccaactaaggatggggaccatgtgacagtgggaccaggtaaggtataacggtgcaggccggatttcgcgggaagcgtcggctgttgatcggaaggaaggccgttggtcgttggggcttgggctgattttttattagtggaccgggccgagttttaaggttagatcgttcattaataagccgtgaaaaagataatataaacgaattaattaaaacataatttatgggttaaaattttatatttacgttccttttttagagggttatatttatgttctttagtgattttaaaagctaatgctaaaaataaactacgataaaaaatcacaccatcaaccctgaaattaagttttaaattttaaatttttgttgcgcctgataagccaaaagacaaactatgagagccttaagaatgagtaaaaatcatcatggatccgccggaaatttcaaagtcgtccgacgaaattgtccccgtttcaaatacggcagtttggaatttaccaaatcaaagcagaaactatctgaaaaatctacacccagaggcccttcctctgaattgactgaaaattctaatactaattaattagctctgatttttttctacatgatcacagagagctagtatacaatgcactggcatatctaatgatatctcattgtttgcttgaaagaaacatggtgtggtgcatgcaaataaaaggggcccttgaaacttgctccctccctttgttgttttccctgcaagttgctcctatgtacagctgatgcccggtcacacacagagattatctgtgagtatcctgcaggtgcagagtagcatacagctccaactccctcttcatatacagcatatcaccttgttctctacagcctgtgtgccggctgctcagctcaagttgttatagtatagtaccccactcatgacgcaatcaatcacatttaaggatcattctctttcttctttctttttgtgggggcgacatcttgcatatttctctaaaaaatgctgaaaaaaaagcagtgtcattggcgtatttatcaaaattgagaagtagattttggggaacacatacccagggcattttgctttctggtgacaaaatcccaaacaattataggccaaaaaaattgaactttacagaagaaaaaaaataaaaggaaaaaagaagaagaaaaagataagggaaaaaaatagctagagctagctaatgtacactcgagagccagctcaagctagctgcctaacactagcaaaagcaatccgcttacgtctccggcgatcaaccgccggtgcacggcacctcgtcgatggcctccagcctcggatgccacgaccggtgccgcctcacgccgccgccgccgccgctcggcttgactccggcggcggcggcggcggcggcgtccggcgcggcgtggagctgcaggctgagcaccggaaagaacctggcgccatcgtcgcttccgtcgtcgccttcgtgatccgtcggctcgctgatccggccaccgtggctcccatcgcggcggcgaccgccgccggtggcgatcctcttccacgacgaggaggccgcggtggcggcgtggaagctggagagcgcggccatctcctcgtcggtgagcacggagtagagcatgtccatgggcagcaggaagtaggcgcgccgcggctcgaggagctcgtccgccgccacgccgggcacccggcagccgacggcgaggcggccggagtcgcacacgaactgccccgggtagtccaccatcagttccgacgccctcaccggccgcgcgagccgcgtcaccgtgccatcgacgtggatgatcttgcacgccgtcgacgacgagccgcccgccaccggagccagcggtatgcacgacggcgtgatccccatgagaactagagagagaagagaatgagaatgagatggtgatgaagaagcaatggaggagatggtctatatgcaggaggcacaagttgcatattggttggtagtgcagggaagaagacaagcaaatgattagtgtgctgtgtaaggggttaggagcagcttgcttgattatctaatgctaatccgatttaattatctacgacttagctaggatcaaccgatcaaaaatggccatatgaccgcagtttggatgcttaaaacgtggcagcgagaggggccgtcaagacaggttggcatgcagcaggaacaagattagtggcatcaagctaataactagcggattgacgagagtcttttggtgagatgtcactgttcttaactagcatacggtcgagatgattatatatatatgctaattccatccaggtgttaacgctcgcttaagcaggatgttaataattatctagccttttggggaaaaagataaacttggttttgcaggctgctgcttaggatatggacacattctggcagtgcccgacaccaacgaccacttttgctaagctagcaagcattgagttggaagccacaaactgaactaaaaactattatgctttctttcattctttctttctttacagagtaagccagctgaattgatgggtcaattgagtgataaacataatagtatttgcagctgaagtgtcaatggcagagttctgaaggtatatgtctgcagattgcagcattagtgattagttgatgctctgcagtttaacagtccacaaagcgagggggttaatcctgatgcttcacattattcagtttgactctgaaattaatcaaggtttataaattttatcaacttcaaaagtattgggtgtttgagagctgacatgtttgtgttagcaaaaaagaaaataaagatgtaggagtattttataacttaaacacagtgcattttttactattattctgctgctctaggcaagcaaaagattaaacaaacaaatagattatacagcattaagatgtgcgtgttgctaagagaatacgacgacggatccagcttgcattcaaccaacctaactaaaatctgaggatctggcatttggcccctccatatattcccaaatctctgcctcttgtgttcagtgcttgtgacggcaatcaaggagatggaatcctaagagaaatgttaatttatctgtttatttattcgctcttcagcaatgcaagagttcttttttgcttttgaagcaatgcaagaggtcagtatctcaaatctactcatcattctgaaaatcttgataggtgttaaaaaaaaacattttgactgacttaagtacactagtataaagtatgcaaaactggctcatgtgcattctaactcagccacatgacgaaacatgtcgaaaaatttaaattataaaaaatagttttgaattaatccagttatttttcatagttttctatttaacccgctaagagtagaaataagaaggtgctgcccaaaatcattttaggttttcgtttatttttgtatagcttattatcgtagcttaaccaattgagcactaaataaacacgatattatcatgttttttttctttttacaggagatgagcctaactttctttgagtgctcaggttcattttatagtctagcaaaatttcctctctttttttttggtcttttatttgttgttaggaaaaggcccatcaagatttcttgggcttgtagacgactagtactattgaaagtaggcccattaagtggccgaacttgtcgaactgggccaagcttgtcctcgtgtgcaggcgaaaaaaataaggaaacccgaaggactcctcccacgagatcggacggccagaagaggcccaaccccacaaaccgacggctagagatcactccacgtcgtcaggaataacccccggaagcgggccgcgtcgtatttcacttggaccctcgcaaccctaataaacccctcacccccgcgccgccgccgcctccactctcctacgcttccaccccccattcccatcccctccacccagatcgccgccgccgccttcgcctcggacggccgtacggcgccgtccaccgcgcacgtctccggcgatctacaggtatcgtcgccacctcctagcccccggtctctcatcatacggtggcttccccccgtggtggattcctcggtcggttccgatctgttcgggaggtgggggtggggggtcgttgttctgtaggttatggagcgttggtggtgttgttttttgtgggtggttcgaggtgaatcggtgggttgattcctgattttgctgtttgttttggctgtgatgaaggtgtagatcgcttccggagacatccaaccgcggccatggcgaccttcgcgaaacctgagaacgcgctcaagagagcggagggtgagtcccctttggatctgttatgtttatttaggggaccagttttcactgttttgtaagcatggaattcgaaaagagcggtgtttgattcctcccgtcatagacaaattaacagaccatggctggtcgttcaatcttacagaaatacttgttgattcgttcgtgctagttcttagatgtgttcaattatacatacttcggaaaacattttatttttactgatgatggccctctgctctacttcagagttgatacatgttgggcagaagcaggcagcgctacaggcgttacatgatctcatcacttcaaaaagatacaggtcatggcaaaagccactcgaaaggattatgatgaagtatgtggagctctgtgtagacctgaggaagggcaggtttgcgaaagatggccttattcagtacaggattgtctgccagcaagtgaatgtgtcatccttggaggaggtgataaaacacttcatgcagctttccaatgagaaagcagagcaagcaaggaaccaggcgcaagcactggaagatgccctggatgtagaagatctggaagcagacaagcggcctgaggatttgatgctcagctatgtcagcggggagaaagggaaggaccgatcagacagagagcatgtcacaccatggttcaagtttctctgggaaacatacagaacagttcttgagatattgagaaacaattcaaagcttgaagcattatatgctgtaagctattctatctgtgttccccttattcctgtatacatactcttcacacatgacatggcatttcatctggctgttccattttgtgtacacaatcaatgatcttaatcgtgattgcctcgatgctgcgcttctgcccgtctagtgtcttcaaaacaataatgtgaataaacacacctaattcaccgctctactgccataccaccaattggatttccttctagtgctattatagtactcttggtcatcattgttcaatcacattatcatatgctgtattattagagttcctactttaactgcttcatatttttcctatgtcatctaataaaatagttgtacactatgtcattatcacattattatggcttaatttggtaatggtgccagaagtttaacatgatgattcaattaccataattgcattctctctgcactatgtctgtttatatttatgcagatctctgtgtaattgccaatttggtttaggcagattttactcctgtttttttccagaaccttaaataaatttctgaattgtgaaattgatttcctgcacatagtcttctgtaccaagtacttttgcatttgccaatgcatctaaaccctttttaatctctcattttgcagatgactgctcacaaggcttttcaattttgtaagcagtataagagaacgactgaattccgtaggttgtgcgagataataagaaatcatcttgctaacttgaacaaataccgtgaccagcgagatcgtcctgatctgactgccccagaaagcttacagctatacctggacactagagttgaacaactaaaaattgctacagagctctctctctggcaggtccgttccttatattttttaaccttttttatgccaagtgaatcatctttgctgtatgatcgtaaagctttgcttcttgcaggaggcctttaggtctgtggaagacatccatggcttgatgagcatggtgaagaaaacaccaaaaccatctgtcctggttgtgtattatgccaagttgactgaaatattctggatatctgattgccacttgtatcatgcatatgcatggcttaagctattctacttgcagaaaagctacaataagaacttgtctcagaaggaccttcaattaatagcttcttctgttttgcttgctgcacttgccgtgtcaccatatgaccataaatatggcgcatctcatcttgagcttgaaaatgagaaagatcgtaatctgcggatagctaatctcgtcaacttctcccttgactccaagcgtgagaatagagaagtggttagccctccagatctttttcaaagcaaagaatattttgaataattttatttattatcttcctgacatatctcctgtcaccattgcagccatcaagagcatctcttttttctgagctggtatgtgctgaatcctgggtccttttatttatcaaactattctgttgagttttgcactctcgtcagttgtcgatgggatagctgacatggatagttcattcaattctttttgtcagtattatagggttggtagggttgtatccagtaatttgtactccatttatcatgcataattgaatttctcttcttgtgcttgcttgacttgatatttataaatttaggctgccaaaggtgtcattgcctgtgcttcacaagatgtcaaagatttatacaaccttttggaacacgattttcttcctctggatctcgtatccaaagcacagccactgctatctaagatttcaaagattggagggaagctttcatcagctcccttggttccagaagtttttctgtcacagtaccttcctgctttggagaagttaacaactttaagggtgttgcaacaggtatgttcaatggcacactgtacaggaagtataagttctcttttctcatgatcttttacgttattctttggttaacacgtggtttatgcacccttttgttctttttcaggcttcccagatatttcagtctgtgaaaattgatatgctctcaagaatgatcccattctttgacttttctgttgttgagaagatctctgttgatgccgtgaaacacaattttgttgctatgaaagtcaaccatttatcaggagctgtccattttgggaaaatggtatgtggtttagttcctcaagtctgttggccactttagccttctcagtgttcttattggtggaatttacttttttattgttttatttccctgtaagcatcagtatagaagttggttgttctgttcattgtggtatgcatatttatcctcgccaaattatttcctctaaagttgaaatattcatagagaccatagtttgaactgatggccaagatacaattggtacatgacaaccactattttcattcactttcgacagcctttgtagtgtagaacaaaaatgtgttgactcaattgtatatgctgtcttaccactaagacttagggcatggttctttgtgcctctgttacaatatttgtgctatgtgttggaaccagcagatccttgtggcagagtgttttccatgataaaatattgtcaacttatttttgccactaactggttcatgtggcttgtttttaccactgggtttatggaactggcatttagccctaggtatatttgccaaatcgagtgtattgtatgttatttgtaataaaaaagaaagtctgaagaaaattcttgcttgatttattttgcttcagattttaaactaggtgtcactgtcgtagacatttttggtaatctggtaattgtacatagctgtaactcgcattctcattctcaacattatatttaactatgttatattattttttattttttagattttcaagtgactatgtagtgcctgatgttggtatcttttggttttaatacgttctagtttgtttgcttttaatgccaaatatcagacagtactggttcttgtgctgtcaatttcgggacttcagttttattaattattaacctgtgacatcaattttattctgactggtttctgtttgtaggacattgaatctgattgtctcagtaatcacctaagtgttttggctgattctctaaataaagcaaggagccttatccatccacctgtgaagaagccatccaagcttggtgaaaacttaacgagtcttgctgcagtagtggagaatgagcacaagcgtcttcttgcgaggaaatcaattattgaaaaacgcaaagaagatcttgagcgccaaatattggaaaaggtgtctatttggtactgttcaaagtggccaactctgtgaatttctgcttatgtcatattctctcttttccaggaaaaggaagaagaaaaaaagagattgagtgttctcaagaaatctgcagaagatgaaaggataaggcttctcaatgatgtaaaattgagggaacaggagaggatccgtcgacaattggttgaaaaagaaaagatagaggcagaagaactgcttcagaaacagataaaggagatagcaaagagaggaggaaaaaaacctgtccttcagggggtgagaataattagtttccaatcattatattttatttattacgctgactagttatttgttgataatgtttttttttctgtttaatgtattgctcaatttatatttgctcgatatttcattatatatttctttttgtgtaaggcattatatttgttgtgaagacttctgtttcatcaatatgcttattagttatgtctgtttgttcagtccaatattgattcttttttgtcttaactgctcagaaattctagtggagtagtagagggtgtgctaatatgctgttttttatgttttgtggctaaccattatagactacaagaacgcagaacgcagatgatatttgaatctttatattctgtagtgtcctactcttgtttcatattaagaattgattgtcttctccgaagtcggaactataaagttgtactatcccaagccaattacagcttaatatttgtttctccacacaggccctttatactttgaatgttttcattgcaggaagttactaaggaggctgtgatggaattggctatgaatgagcagtttaaggagcgccaagagatggagaaaaaactacagaagactggtaagcaaatggattacttggagagggcaaaaaggcaggaagaggcacctctaattgagcaagcttttcaaaaacgccttgaagtagagaaaatccttcatgagcaagagcagctggtttgtttctcacaattccttgattgtcacattacaatagcatatgattacttaagctcacaaaaatcactattaatctcttcttgtagagagagattgagctcagcaagcaacaccatgcaggtgacctgcaggagaagaacagactttctcgaatgttggagcataaggtaagcaaatacatatctgtattcagaccagatattcttgcactatttcatcttctttttagttaattgaaggaccaaatgtcccactgtaattaatcctgtgtttttccgaaaccatgttttgcaattccaagcataacagttgaaatacttagtatattatctgtgcaaaggtctgattagatacagattaatttaacatataatatgtgctatacttgctgagaatctaatattggcatgtcttctttggctatgtgtgtgttcacatgatttgagcactagacatttgaatacaccaggcgatttgttcctgtcagggaatagacagctgtcttctctccttcgcacatattttaaattgccctttttgcttgcagaacattttccaggaaagaattgtccaacgtcgtgaagctgagtttagtcgtcttaagaaagagagggatgaaaggactagtcaattgatatcatcaaggaagcgtgaaagggatacagtgcggaagttaatgtactatcttaacttagaagagcagcgcctccaaaggctccgtgaggaagaggaagctagaaaacgtgaaggcaagaattcatgactttgtgctttgaaatacttgttcttatcttaccttattagattagattaatttacactgccatatatcgtccagctaattttggaatttcttgagaattagtgaacattgcttgttgaattactgtgactttactgcagtatggacctgtgttacttagggcctgtcactttgatgccaaaaaaaaccttaccaaattttggcatagccaaaatttcggcaacttgccaaaattttagcaggatttcttatatagttaccaaaatttggcaacaaactaaatgtagccacttttcttgcaactttaacaaaatttggtaagattgaaaatggcatcaaagtgaacaagcccttagacaatggatagctttaaaacttaaaatgttatttggcatcaaagtgtgatttgcttgtgcataattatcttgcggatctttttttttttgcctgatgcaatgaaatcaaattctagcttatacatattgttgataatgatttcaccttctctgcagaggaagagaggagaaagagggaagagactgagaggaaggctaagctggatgcaattgcagccaagcagctgcagagagagagggaactagaagagaagaaggaaaaacagagaatggaagctctcatgggaagaggagctggagctgctgagcctgcacgcactcctgatgctgctccggttgcacagccagctcagccggtagctgcaccggctgctgctgctgccgctgctgcaccagctgctggtaagtatgtcccgaagtttaaacgaggtggtgatggtggcagtagtgctggcggccagagacctgctgtggcacctgagcaagaccgttggggttcacgggatgatcgcccacgtcctgatatgcgtccgctccgccaagaggcaccccctgctcgcgatgctgctcccccagcccgccaagatggtcctccaggcacatggcgaccttcaagatactcaagttcatcatcttcctcaacctggagcagcaggcgcaactgaagccgtctgctttcagatgtggactgctagggtgagattttttgctgtccagggccattgctgagataagcctgtgaaacatggttgaatgtttgactgtttgcgcatcaaatgctcgtaaaattttggagttaggacctgcttcagggcaatagcacctttcctaagttatgtcaaatgttatttcgttgttgcagttactccattgcacactggattgctactcgttaagtttgtccaaactttggcgctgttagtaatactggaatattgcccttgtctttgtgtctttgttcgtttggtcgttgctacaagtacatcgcatttcttttgattatcatcaaactaatatgacttgttgatcttgattaacaccaaactcggatgaagctttgacgaagagttggcggaaacatgaatcatggtggtgtaccccaagcaggaacgcactgctagcagttggtagtttgatgcactgggatttcggagctcgatttgcaccggaaatacaaccttacctatccgcggtctcctacgttgctcaagtaaagcattaacgttctccaatgttgctcaagtaaaacattaaccttgcatagaagtatgagactgccaatctgtttgaccttgcatagaagtatggatggcaatgaactgaactgtacaacatgaaatgccatccctctacatcatgccaaaattcgatgagtgttgtcatttttggcatcccattggctttgcccagtaaatccatctggtaatcagaaactcggaatggagttgggaggcaggatgcgttcgcttgtctccttttatcgcacgttctcgatccaacggttcctgtgaataccaacattctaccaccccagtttcaaattttttttttcgaaagaaaacgaaaagtgaaaaaaaaaagaaaggcgtcggcaacttgagttgggcaaagagcaaggttccacacgctgtcactgccgtgtgggccatccccccccccacgccacgcgctctgctctttctttatctagtcggtaggctcggtccactccgcctctctctctctctctcttcctcctccgcgcgccgccttacccctctcctccttcctcgacgcggcggctgctccagatcttctcttcccctcgcggcggcgtctcccgtccaatccagtgagttctcctctcccccccccccctcctctgcaccgcttgctgcatccatccacttctctcctccccaactttttttttgaattttttttcttactagatagattcgtggtgagggcttagatcgcgtggtgcggattgctcaggctccggatctgtacgtatagacgcgcgagccgcgggagattctgagtgggtggctaggtttttgtgctgtgcgtctagggtttgggcgcggttcgtccttgttctagggttccctcgcaattcagatctgactcgtcgctggaatcttcgtggggcttcggtttttcaaattccgtcgcctcaccgttgccgcgaacacccccccgctagggatgggaattgggcccagactacctgtgggctatggctatgccccgatatgcttttttgtgcatatatattcccatcgagatcagggggcgactcgagaagttgcttgctgaaagctacgtcatatccgctacgaattcacacattttctcttgttgtttcaggtgaactatcggctcagtaaaaggggaaaaaggagggatcttttctggacatttg

SEQ ID NO: 6211 - DNA, 44601 bp, Oryza sativa
  unsure (1)..(44601): unsure at all n locations
tgtcgactgcatggcatttattctgggggtgaaagcaaatcgatgcatgcatctgtatgtacatgcatgtgcaattcaaaaacctgcaggcgcaggataaattcaaatagaaaagaaaacgtcttctagtaccaaacatgaatccacaaacttccaaacacattaatcaattccaccaaattacagcttggatccatgaactttcaaatttgatcccgctatttccacctggcgtggccacagcagctggcagagacgtaatcagcctaattatgcttgccgttgacattcccaagcatagttggtatcttggttctctctttttcctcggttaaattaaaatataggttgcaaatgtgcgaaaagtctcaaacttttcctttctttaaactaacctttactctaggacgcccctgttttgcgagtggagtagaacacgtcgtcattgccaaatgacactctctcttggcctatcttttcttaaataagttggattaatgtgataacgataagaatgatagtgtttgagccgtcttttcatgaagagacgaaaaaaataatcaattaattaattaattagcattgaaatgaataagtagtactatgtatcattgtgttcttggattacttcataagacgctcgatcgtgaaaatagttttaataaaatttcaacaaaattatgttcgaaacaacaaatatttgtgatcggaagtacttgtatattcacctttagaaaatagaaatagatataccatgaactcattcatacaacagccggatagatatacatcactactcatctagaccgttccatggactacatacatacgtatggtatatctttgctatttatattctatatatatatccagcctatatatagaggaaagaattgaatgagatagatattggagatggcctacagctactacaaacggtagaaaatacatgaagatagaaacgggtgagcattgaagggagagggaaggaattataaatggcaggcaataaaggccttccaaataggctcccttcatccctctataaaagcaccccttccccttgcaacctttcacccatcaacagcaacaaacaatagttcttttctttctctctctccctttgtaggtgtagatgttgatttcatggctcttctgatcttcgtgttctagtctctcagtattatatgcatagttgaagttttttttggttaacatagtatttctgaagcctctgatgtttgcttttgctattgcaaatcttctagttttgtttatgctatatactatatgtttcagatctctcttggtttgtggttttgtttctttgttggttgtttcttgaatatgtggttgcgttttggttatgaagtggagctcctttcgttccaatgaaaggtttatctgaagggtgatacagctgcttgttcatggttcccactattctatctcataggaaaagagataggcttgtggtttgcatgaccaaggagccgaatcaactccttgctgaccactctttggattgaagggagctctgcatcttgatcccatatagtagtacatgtcactactgattgcatgtcttatatatttgccccctgttcatgttggatttgattttttcctggttccccatgtgtagatctaatgatttttgataatgcttgtacttcaaaccagtcatatatagcacctgcatattcgatggagagatgatctggttttgcaagcttcgttgttttggcgttacttcagccactgttgttatttttaattacatgtaaaggtttcttatgtttcaatctgaagtatgatctctttagctaatcaagagattcagatttatttattttttgggtatcattgcgttgaatggtgtactttgcatcgctttattcccttgttggtgagatgttatgtcactgttgaattattccatcactgtttgtctttgcaccagcgtgttgtccatctgttgtagggacaagcagatgttgttagatcttgctttgctctttggacagtttgatctatctctcctgaacactgcttgtgtccactctttttttcccttttgctacacctggttctgatagatttgcatcagatacccttatgcttggatctactagccgctcttagtattttcattgcttcgtacaccggtcatcacatgttcgtctgtttatgtgtactgtactactcactgacagtgtgcagctgtggttatttggcctcactggcaaccgtgcatcatgctatgcatgttctctttctttggcccaacatatgctcttctttgttaattgctcttttttttgtagcattaacacgtcgagattgattctgatgcaaacatattaggtgtagatccgtcctggagaatggagattatatgatgtctattgtttggaagaagagaaatatggaagactgatgcaaacctttgccggcatggagtggagaacgttgatcaaagaaagttttctttagttgatgattgggttaaatcccaagtgtaaccataaaacaattcctgcttgctagtcctgtcattctgtatatctgaatgatgtttcacaatactcaaatgccaagttttaagatatttttttgtacttgtggattgtacttataaatcaatggataattaatcatttctaccgagaagggtgctctttttccttctatatggttaattccgaagtgtaacacaaaccattcctgcttgttatttagtccggcaatctgtaacactgaaatttctacacatagtcccctttttgctcttcacccagattgtttatttgaaaaatttagacagcaactggcggttcgtaccctatatcagtccattcaatgttatatatcttgcagattaccctaaaccgccgaattaaaagtagcaaacaatgatacttcccgacatctaccaaaaattatctaggtttttcgagttacagatcgatatgagtgtcagataagatcaaatccatttaatttactagtaccttgcatttgctgcgccgccgagcttgctatcttcgtggccggccggcggcgtggtcgacggcgatcgacgaggaagacgaacccatggccaactcatgtgtgatgatccgattcgtttgtgggtcgtctggttcgttcatctttgtttttatgggcctccatttgctagccggcccaaacagcgatactctccggttttcagctgctttttcacattttttttagcacactgtatcttcattgtagagactttatttctgattgatctcatgcccaacaagagccaaaacatgcgtgaccactaggtccatttgctagctcgctttttttttaataatagaaatggtttacatctctgattttcgctgaaggcgtacaggacaagttctcaacttctctcagaattataagttttttttgcgaggaccagaattataagttaagattacgctatcaaaagaattgctagctattgtgcttgaacaatattaactttgtcgcccaaaaaataattatacctatacacctggacaaatagtacttgtcaaaatgcattgtcagaatcacatttttgtatggagataacaattggtaggagtaattcataattgctcatatacaaaggaatattcatgtagacgaaatgttaatttgacaatctatatttcttttcctgtaattgaaacgataatcaaatcaaacattacatatactagtttttttagataaaattaaattagtataaactagaaagaacacaagtgtgatcatccatggttagcttggaagctaagcttctagtgttggaggttggagaggagagactgggaggcatggaggaggccggagacgaggacgaaggcggtggtcggaacgctcaccgccaccgctgccacgatcccgacgccgacgccggggcgggagctcatgaggaaggcctgcacggcgcccaccagcgcgcacacgtcggcgtcgtagctcccgtaccactccttctcccacgccgcccactccgccggcggctcccacccgctctccgccgccctcatctcgtggatcctccgccgcagctcgatcatcccctcgtccaccaccccgccgccgccgccgcccgagaagaactgatccgcgtcgtcgcgccgccgcgacctcaccgccgccggcttcctcaatgtcactgacgtcgtcgtcttctgtggtggtcgccggtatgggagcgccggtccagccaggcgaacggcggcggcggggaattgggagatcgccggttgcatttttggattccgataagaagaattgtgcagctagcgaatgctgtgatttgattcagctaacgaaattcgcgattcgattaaggagagaatcagaatcgcgaatttgaaatggattttagaggaggatggagagtggagaattggtggaatgcgatttgattgatttggagcttgggctggttgcttgggtttatatatatagtgcgtcgttgttggcaaaaaaaatttaaaaaaaataaaaaaacgcgtggcaagaacgttccaatggctgattccgtgtgattacctatcattttttttctgcaaaagttcagacattgtggcatccaggatagttttggtcaagataacattagttgtcttaacagaaaggagagctgttctagaaatgagttaaatttaactacaagctccatcatatcatgtcctaaaaattattataattcttctgttcttaattgtttcctccctcgacccctttctttcggcctattcaacatttagaatgtcgacatggactcttagagacattaggctgtgttagctggaatgggttgggaacactaattaaaacttaaatctcctgcatacgaaaaatggagtggtccattagcacataactaattaggtattagctatttttttttaaaaatagatcaatatgattttttaagcaacttccatatataattgtttttaagaaaacacactgttcagcagtttgggaagcgtgcgcatgaaaaacgaggcggaaggagttgggaattacgaacagagcctaaatgtgtgttcttttatccctttttataacttgtacctcttatttttcgcgcgtacgcttttcaaatttctaaacaacgtattttttattaaaaaaaaggttttacaggaaagtgctttcaagcataggaatttgaaacacgtcgacgtggctatgttcgtttcaagctgttaaatgatattccctctgggctgataatacttatcgttttagataagagtgaagtcaaactttagaatatttgattataaattatttttaaaatatttgtctttcaatatggttactatatgtatagattagtcttaaaaggtactttaataaaatcatatatttattaacacttttgtacatattataataaaaaataatggttaaagtagttttttttggaaaccgtgcccttatcgaaacgacaagtattatcaacccggaggaagtacgcttttggtaaaaataatctctaaaaaagttgctgtaaacaattcatttcccctcgtctcaaacgcacccaagagactaagagtcctttgaaacacacgaatttgaaagcacaaaaatataaagaacacgggtcacatgccttataaattcctacataaattagaagcacaactgcacaagagtatttcaaaacagtcgtttggattacacacgcaaaaaaaaaaagaaattgtagacatgtacaggaagagaaaaccatgagttggactttctcatgtttgttttagtctaaaattgtaatggaatgctttattccttaggatgttcatagaaaacttttaaggacatgctctttattccagataacttcatatgaattttatttccaggattcaaatgcttcaggaaaaactaaacagttcttttcttccaaatgagcctaaaacatgtttaatcattattttatattgcggattaacgtaggcggatataggaaattaagtgcgacacggttggatttggacgatagatcgatgtgacgccggtcggccgatatatatacgcgttgagagatcgagtggatcgaaattcgttggaaattgctgtaccatatcatgctgttgcttgcttgtactgatcctatcatgcatcattgtgtgaatatcctagccagtgctgttcatcaatagtgggtcaagttgtaattaagcaagcggccggcgattggctccacacgaaacgcgtttccttaactccctggtcttctgctccctgcagcatgcagctagctatcttcgctttgcttgcactacttttcttccagcatatatgcacaaattatagattatactccctccgtacttaaatgtttgacactattgacttttttaaatatatttgatcattcgtcttattcaaaaacttttgcgaaatatgtaaaactatatgtatacataaaagtatattcaacaataaatcaaatgataggaaaagaattaataattacttaaattttttaaataagacgaacgatcaaacatgtttaaaaaagtcaatggcgtcaaacatttagagacggagggagtactagcataagcaagaagcagcctagcataactgcattatgaccatttattttgtgctggaaggactgaataactaaatgatttatggtattttcttcgtcttataataaatttatttttgcttctcctatttatcttaaaataagtttatttttagtaatcattgtattagggtttatgaaaatatgaaataattacatcaaaaataggtaagtgaggaataattgtactcggatttgataaagtaagggtattctagtccttttaattttatatcggtatgtgtgggatgagtaaaaaaataaacttattttttggaaagagaaagtacttcataatattttagctactccttttgtacatccacccaaaatcctttatattatgggaccgatagagtactaatgaataaattaacttattataaagttaaaaaatatacatatttaaaacaaaattttaaagaagtttatatgtggaaagtttagtttaaaaaaattcccaccatttagaaattctgaaaatgtgcacatttatatatatatttgtccatgaagcagaaaagagcagcagagtatgtgacgaccagatcatcaagctaacccatgcgcacttgctactccctccgtttcacgatgtaagtcattctagcatttctcacattaatattgatgttaatgaatcttaatgttaatgtaggaaatgctaaaatgacttacgttgtgaaacgggggaagtatatagctaatcagccggtgtcgccgttcgtcggagctgagttacctattcataataagaatttttgcttgctcataattaaacgacggtgatcgtttactacgtacgtaaatgtcgttcgcacgcatgtgcaagacgcgtaaaagcgtatgcaacgcgcatttcgtcaattaattaattcttgtatgcacttaatttctcaccaaatgttagtactggcttagtcgtagtgtatcatgtaagtagcagggaaacgggggaacagcaaattaattaattggttggacgacagcttaatccctcgtctgaaacaaaacaaattaagcgaaagaaaacgaaagcttctcatcatttcgtgattgattgatcgaaaatcgttgtaaaaatgatctttttccaaaaaaagaaagttgtaaaattcttctagctaagaggaattttctttttgcaaggagataaaaggattttggaagatatatttcttctggcacaatatataataataataataatattggcattagctagctctgtcatcttttcattctttttactggagttgtggatgtcgccgtcatcgatccaagatgcattgaacgaaacgttgctccagtcctcaacacagcaagatatctcttcaatgttggcagctagccaatgtcgttttttcaagggctttaattttctcctggatataattgattagatcgatcggctagctaggctagctagctaattaatatgcaggtggatcctactatttgtgttttgtttgtttaattaatcatacaacaagatatgtttcatgtgacatactgcctgacgcacaaatggttgtataatttccatgccggtttattagttttagctttgaccatactgcgttatataaatataatcctagtatttgttgggcaaggtccattgaaattaatcagcagcaaggtcatctctgaagatcaagctcctgattatttgctggttccttcagagacgaatatatatacgtattataattccatatcgattattggatataatttcctgaagattcctttgagtgaggtcaaattgcacattttatttagcacatttgtttgactttctacattattttttctgacaccatctctccttccataatcaattatcaatattattgtacattttcccacatagtgagtgtctgatctacttcatgcgttggcacttgtgatatttgaatagtacttcatataggaggacatttccctctcatggctcttgtattacaaatctcctttgtttactgaaggccgcgttcttcaatggcttaaatagaggaaaactttttcgtttttcgtacgcacttttttggaactactaaaaacatgtttttaaaaaatacttccttcacaatgtaagtcattctagaatttcccacattcatattgatattaatggatctaggtagatatatatttctagattcattaacatcaatatgaatgtgggaaatactagaatgacttatattgtgaaatggagggagtatatatattaaaaagttgctttaagaaatcatataattcgtcatttggaatatatttatctccacttatgttttatcagtgttcaagctagattctgggcctgtttggcacagctccagctccaactccacctctcctggagctggagcctagccaaacaattaatttcagttccactggaaatgggagcggagttgggtggagcactctcacagaatgaactagagaggtggagctgggtttagaatgcttcacaactccactctagacccaactcctggagcataatttaggagttggagctctaccaagcagactctccatctcggacaactgtatccactggacgcatcggatatagacatattttgatatttaactttaatcgaaaccgtcatttagtgtacaaagaaagtaataagaacaaacacccttgaagataaatcaccgacaaaatcaggattgatggtaccttaatatttcctgtaatttttttcaccttggtttgtgagtgtatgtatttagccgtgtatattttagttatatagaggctgagattgttctatagacatatatatcatcccgatataattgattgagtttaataaaactttcattatcttataaaatcaccaacaaattaaatttaagatcaactacacaagatcagctgtgtatagcatatcattctatctacatttaacactgcgataataatgcagggttaattcctttctaacacactcttgtttacaagttggaaatcagtttcaggcaacattttagctgcaaggtagagatgatgatccggtcaaggaacgacgtggtgctgcaggagcacggcggactccgccgccagctgcgccaggtggtgcacggcggcgacggcggagaccggcacgccggcgaacagcagcgcggcggcggcgatggcgacgctggggcgggtgcccatgagcagcagctgcagcgcgccgacggcggcggacacgtcggagacgtacgccgggtagtaccgcttctcccacgccgaccaccccgccggcgcctcgtagttgttctccgccatcctcgcctccctcatcctccgccggagcaccgccatgctcgagtccaccagcgccccgccgctgtactggtctcgccggaaggcgcagcacgccgccggcgacgacctcctcgccttcaacgccggcccgcgccggccgagctcggccggcgacgtaagcaatgacatcgacgacgacatggccatccaaaaaccaaaaaaattgttggcaaatcgcagtagtgaggtagcaagtgatcaagagaagaagcaatggaacaaatgaacaatctctgagctgatgagaaatctagttcaaatgggtacatatatatataggagtaagcaaacgcgtgaagattaaaactgatttagtcatcgtctggaccaaccacgtggagacacgtgtgcccaaccaggaagtactagtccacatggcacattttggccggtgatttattcagggaaggaatcatggaacaataaatagtttagaagtaatcacatcgaatgcagcgactcgtcgcttccaaccaacaccggccatctcccattattgagttgaatactattactacgagtacttgcttgacaaaaaagaaaagaggaaattaatcattcagttgagttgatgtactgcttcaaagtgatgggcttgggcggctaattgttttattgccgcatgatttagtgatcctctcattctcatgccgagatgctgtgaagaaggtgcagcttctctctgataagaaaaaaaaaaagaaaacagttagcaattggcaaagaggagaaattatagtactatcatactattggctaagttgtttatcacatagcctgaatgctagtgcagatccctagctgccatcagttggcacatggtcaaggagatattagtatatggcatcatcagcaaagctactcaaatgggctcaagggttcaagacttgaagcaattgcagaattgagtgcctagaggtcacaagaaacacaagatgcatggatcttgaagtttacaacatgggtcatgattcctgatttatgctactgtcaactaaactacttcccaaacaccatatctgtagcaattagatcttataaaggcttcagagttctcggcttctagcaatgttaatctaagtgggtacaacaacttgatgacaatgcatttctgggcaactaaaaacgatgtgcttgataacaagacagtcattctgggaatggggataagtcttctatagatgcaagactatagaatgaaggaatgcttgctacccccaaaattatttaggccataatttcccattcagatgctacaaaaagaatattaactacaaaaagggccatacaactaatgctcaatatgatacaacagttacgttttctaattgcagtacatcctgacaaaaaatatttcaggagattaggaccattgtgtgaaacgtggttaatgctaatgtctcttttacctttgctggcaaaatgttgctggcagcacttcatttcacttccttaacttgctgcttattttgatcttcctcagatggtggtagaagctgctgatactttggcctgtttttcttcagaagaaggtaggttaaccagtaccagaacatcagaattctaccctgtgccacaagcgtgtctgcaatgcggattcctcctaatgaaaacctctccagggcctgccatagaagtaatgtgtcaaaagcagatcacttcccctccatagaagaaagatatgccaaaggttcacctttttacccaggccccagttacaattcaaggaaaattttcaattcagatttttaattgaatgtgatgataacacatgaatagtgtctgggccaattttctgtttgagtgcattatcattcaaacattaacttaggtcgagcaatatctcactggcacttaaccaagtgtgtgtctgcatttttgtaacagtaaaaatgtaaaactgccttttgcaggtccacatgaacaaccgtacctgttcaccagtttgaatgtcataggaatgctgttgctcaaattgcaaacctttgaactcattaatgcaaagcccttggaaggccctgaaatcaatggcaaacaaagttgaaatatagggtcattaactatcccacggtcccacctagcttaggagccaaaatatgatataaggaagagggttaccatctaattagggatacttttgggatccagcgaaaaatgacgggggtattatcagggttaacatagtatcctccaaatacaatgaaaactgtcataagggatggtccaagggccatggcggcttctgttgtaggagccatagctccaacagtaaggcccatggctgatgcagcaaatgattcaacagtcacgatgccacagaacttggcaaatctgaaagtgtagcatggaatgttgtttgatggagcataaacaaaatagtatcgaactatcgatattctactatttctgcgtggcatgtaataaagtgcctcagattcatttctaaattagagggaggataatacttacctagaaaatgtaggatgaagtttagacattggataaagaatggatccaaatatcaatgggaatgcagccccaataggaatttcagccaacaacttagaagaaaggtatggtcctagtgcataggaacctttggcccgttctctgtcaactatagcccgctctttcgggaaaactcctactgtctttgtcagtgcagccattgctgtgtttatagcagttaccttaactcataaattgaaaaagggacagatcaaaatcagaaaaatgctcagacacaatgaaaaagcttgtaccaaagtcaatattaggaagagaatgaatgtaagtccaaaatctgaagcatgtgcaacctagcaaattcaactcaacgagtcataaaaaatccaacatattctacctgaagaagtcccatcctgtcttgtatggaagtctgagttttccccattcgccagaacacagatccaaatatgattgctgaagcaacggacattcttgctctcactttgtttgttggtccatcacggaaagcctaaaacacagaaggtcctattccaatatcagacacaacagcgtggcagtaaatctttagctaaaccccatctaagcaactgcgctcagattattaatgggtacccaggcaaactataaaaggcttgaacattagtcagataacctcaaccacaatccaaatccttatagttccattagcaaagtgtttcctttttgtttacaatcaaccacaatccaaatcctcatagttccattagcaaagtgtttcttttttgtttacaagtatgtttcatgggcagttgcgtattacacctttttgaggcacagatttggcaaaaactaaatcatggatccaaactcaaatatagtaacatgttcgatctaaacctcctaaattcattacattatgtatatagtttactcaggctaaaagaatatgtaagaaaaacgatttttttgaaaggaagcctcacgagtatctgataacttccacagcaaataataaataaacatatcaacttgatttaaagaagcagcgggaagcagattaaaagaggaagctgcaactgagaattaaatgaattttaataaaacctgcatccatgctctcttaaacagcaaacggaattgtctccaccacccacgtctatgcttggtggtggacttctgaataagtttgggagaaaattcagagccttctggatttgtcagcgaactgttgctttcagtaattgcaactttattagaaaattcttcaatgaggttttcaatccttttccgtgatgactgcacactttcagcagaactataatcaacagaaatgagatcagccaagaactcagcagggttcacatgatctggacaatgatacctgaaaaatatgaagtaatcaaactcaagttattgataagcaataatagcaggcagaaaaacaagcagcatagcatattgacagtatacatagaatatagaaaccaacacatctgataatagataaaagaacttataaaagcaagataatctccattatggtgtgaacaagtacacaagccagaatctgcatgcctaattaaaattctgagtaaaattctagcataccgtacactggaattttggatagtgccactaacaaggacaaatatgaccactatcatgttatgcaccaaggtagtagagtattacagtctaaataaaatcagtacaatgcacacatcgaaaacaacaggaaatgccaagtaaaggaaaaggtgagcgaataccaaccccaatgatgcaaagtacaataacggttcctcttttgctggccccatgtatataacttctccctctgacagtagtacaatatcatcaaatttgccataaactgaacctcttggctgatgtatagaacatatcaccgtgtgtccatcttctgcaagctgtctaagagtttccatgaccttctctgcctggaacgcatcaagacctaaaaggatggcacatatgtgaacaaagtttatgcaatctcacttatgttttgcacttttgtcacatcaaaggaccaatgaatgcgctatctctaatcatggaagctcaacacttcagataaagtaaatgtgcaacactttgtccagaagggatgtagcttgtatatcatatcaagaatatattttgtttgcagcattcaatgacaaatctaataaggcaagtcccaataccatggtgcttgattaaagatgccaccaagattatgatatgtcatgtgttaaccattagagtagcagtcttagtacaagaaacatgcatcatcttaaagcaattcttgtggcatgagaaaaatgtggtgtatctattgaagccattttaatgcaactatcgcagtattggcaatctattttcacttgaatccggcatggctacaaattttctttttctttgcccttaggggctgtatttttctcctgctatatttaatgaaaaagcacattctcgtgctggttccaataaaaaaaagaagcatggcacaaatttacaaagaaacagtagatttgaagaagtgatcagaacatttgcttgcaactagtcatgtatttcctaacgaaaacattaagaggagatgagaatgcttattcaaccaaggaagggttaaataaacactacagtcaggtaaaagtaccagtagttggttcgtctgcaaagatgatagaagggctagcaatcagttcacacgcaagggagagacgcttcttttcacccccacttattccacgtacttttgcatcacccacaattgagtcagcacagttaacctacaaccagttataataaaaagaaataaatacctggtgatacaaaataaaaagggaaatacttgaacagacagcgatagatattatgtaggttctgcccatcaattgaaaaacttagcatacttgtcatctatctgagcaccaaaataacaatgcttttcatgtgtaatttgacagattttctccaccagtgctagaaactacaagttcgtatccaacatttgatgtagtgcactaaaaccaattggttcaatttcttcgaacattttaaccatcatggataactttttctttagaaagcagaccatataccatcatggataacttaccagcccaagacgaaacaaaaggtcattaacatagctttccttcctctcaggagtcaacgtgcggcgaagctgaagttcagcagcaagcgagagcgtttcacgaacagtaagctgtgagaagaaaaggtcctcttgcctcacgtaagcaatcctacacaaggaaaagcaatgagtatagctcttctctgtaaacctgactaaaaaattgtgaaagccaactgaagaagcatagcttaagcttacttatagccaccttctgagataggtcggccattgatgtacagaaacccagaaaggtgcaaagaaggtgatgctgtgagctgaccagcaagcacattnnnnnnnnnnnnnnnnnnnnnnnnnnnnnnnnnnnnnnnnnnaagcagcctccccgatttcgcctccccagacgcatttgacagcaaaaacctcgcctggcatgcagcacgttataaccattacaacaatcacccagagacgcgcagaagcaagaaattccgattattgatggcactcaatgtacaattctacatacagaatacacagcttcggtgtgttcatctactgattgaagctgcagagtgcagacggtgaaagtgtgaaacaaatttcgcaaattacttgttcgacgcaaattaatatacaattctacatacagactgcagaatgccacgcaattacttagcccgttagccaacagcggaagtgcgaaacaaatttcagcaacctgttcatctaaaatgtgatgagtcagtgccacatcgacaggtagggcccagtgtcagtctctcagacagcacgcggctctcctggctaatcctaagcagatgattttttttttctttccgtgcgcgcagcgccgccgaccaatgcgactcctccggcgagagggaacggaatggatgattcgaggcagagcgactcaccacgtcgccgcgcttgttcttgagggcgcaggtgatgcgggcccaccttatcgtcaccggaggcacgccgcctccttccccgccggcctccgggtcggcgtcggagtcctcgtcgtcggccggagggaggagcgccgggcccgggccggcgacggcgcggacgaacagcgccgcggcgagcgcggccaggagctggcccagacccctgacctccatctcgcgcgcgcgcgggggacgagcggagagaggcctgacgactgttctagaagcttctggaaggttcacgtcgcgtgcgacgaggagtgaagaggaggaagacgaggggggggggggggtttagcgtggagttcgtgtggtggtggttgctttgtttgttgcgcgaccgatgcgaatgggccttgggccttcttcgtcatgggccttttgcgtagtaggctgatgggcccacctgtaagtaacacccaattgtgctgggccttctgttgcagtgggctatagcctacaggcccatggctacaccttttacgtaccttactccgcagaggcgcggagtattagctgagggcttatttgtaaataataatagtaataatcacccaaaacaaatcttggagcggattggaactgcaaatttggtccatttttttcctccaattcaaaaactccgtcacgaattcataaatgctgacggaatcttgatgtagctgcactcatgctgaacgtatgtgtaaactgacgacaagtgagtgcacgcagcaattgatgccgtacgcacatcacatgtgcatctcagcagactcagcatctgtctcaaggaaaactagctgaactaacaaactgaagactcaagctgcaacagcatatgcagctagttacttacttggatggctggatttattactgatttacatcgctgaaaattcattctggccgatccaattttgaccttttcatgaatggagtgtattatcttggtcccaaaatactctctctgttcttttacagtatatgacgaccaatgtcatatattaaaggatggagatagtataacaacttttgctatatagcaaaaaaaaaaagagttgtattttttgaacggttagtaaaaaattaaaatgctactagctgcacagaaaactccaaactgtttgctacagcgaggttaaaaacgactctcaagtgagaatcagccaggttgtgccacctgacatccaactcaggagcttcagagatgctgctgatttcagatacacatctgctgaaaatgagagtgacccgtgactagtgcctaaactcaaagtgctactgtagtacagacagctcacggctgttagcaatcttcccatttttggatcgtccgagttattagcagaattgattgcaattcttataacgtgatttaaggagaggaccgacgagatttctgacattttggctttcagacagtggaagcttaattgcagttcgtcctggtcttcttggctggagtaactactatacttcagcttggtagtggtaagctagcttcagtaacaatttgtttgggtgatcaaatttgtttactccaagttggttaattagggaccagggagggtgaccaccatggagatcaaattgagatactacaagtaaacaatacccatcgagaccatgatagataggctttccaaacttcctagccagccaagcataatctgaactttttagtatctgtggaggcagagccaatctgtgggtgccacgtcacttttcacacagaggcagtacaaagtactacaaagcagagctggtagattgtagtacgtggtagatacttacttactcctaagtcacgaaatagtttaacttaatcaacaagagaaaacgactaatgagaagtaaagtccggatttcgtcctttatcttgaaaaaaacgaaaactaatgacagcgagcgaaatcgcctttctcctcaccaagctgaccactctctggaagcatcagcgccactgccaggtgggacccacgacgacaccctgccacgtgagcaagggccccatgcgaggcaagcgccgttggccccgtccgacaacgcaccttccgcccccgttactctgagccgagggacccacacgtcgactcaccccataccccgtacacccagccagaaagagcccactgaccggtgggccaggaggagagtgtgccccacatgtcagtgatggtagaacagaagggtctaggcgggcgcggggtacgacgtgttccgggtgtagaaagcgacagcgcccctcacaacgctcgcctccctcctcctccgtctcctcctttcatctcttcttctgtgtgtgcgtgtctgcgaagcgtgagagagaaacgtacgcgacgcgacgagctcctactccgatctccccgatgcgatctcgccaaaccctaatcccacccaccaccgcgccggagtcctagcgccgcccgcagccgccgccgccgtccggatgctgcggccgtgacctcctcctcctccgcctctgacatcccagccatgggagccgccgacaagtggctcctcccgctcgtgtcggtctccttcgtctcgctgctgctcttcctctccgcgctctcgggcttctccgcctcctcctcgctcttcgcgcgcctcccgccgccctcctacgtccgccgcggggcagccgcgccgccgtccttcgcgtacgtgctgtcgggggggagaggggaggggaggaagctgctgcggctgctgctcgcggtctaccatcccaggaaccgctacctgctccacctctcggccgatgcgcccgagtccgagcgcgtcgagctggccgccgccgtgtcgcgcgccgcgcccgccgtgcgcgccttcgggaatgtcgatgtcgttggccgccccaccgctggcacaccgatgggatcctcgggactcgcggctacgctccgcgccgcggccgcgctgctgcgcctggattccgagtgggactggttcgtcacgctcaacgccgccgactacccccttgtcacccaggacggtaaggttcacaattcgtgcctccgattagcatgatttgcttcggaacatgctggtttctgcacggccttgcccggatctagtactaatcccacgcttttacttttggtcgttacagctaccccagaattgcatttcgatcggaagcttttcttttctctgaatttgggatcaatgatgtcatcgatgaaaattagcaataggagcatctttgctagtttagtactataggagttgctggagctaggaaaaaataattgttttcctttacacaatatatgaggtgaacttggcttaagtggtagttaatgtttctcgtcacattgtacacttatatgcataataatataccttgaaaggaccaatgcactaggaagcagcttggtggtgctgctaggtttggacaatttggaagaacctctttgtttggagtacttcttttggacacttgtaccaaaagctgtcctaggtggaaatctaataccacaatactcaattggcatgttttcagtttctaggtgtcatctaactcaaccactcaatgacttattattttctcttttcatagtgaagttcctcaactcaatcatgacacatgaaccatggccattactgtcagtcttgagctatgcgactctatctgtgattgtttgtgatactcatatgaccgctcatttttgtcttgattgttttttctgacacaactcattacaacctggcatattgataaaccaggaccaaattactgatagaaagttggggaattgttttatgttatggaaattgcacagcattcatgcgatcatcttacatctgaataaccactatctgtataccaagatcttaatttttaagtcctcacttttataccattaagattagacaaagttggtttcggcattctgttttattttattgtgtggcttgttacaaacaactgaatgaatgggcgctacaagagagtgagaaggtggggaagggatagatcaattggaagttaacattatgtatcactgtgagaatgcactgtagtcttgtgtaggtttatcttgaatataccatttgaggctctgatactgttatctttgcatccttgctgtctcatctatttttcagttgcttcgcatatgcaaataattaccatgatacagggtgcatgcattgcagtctagttggtgtaaagtacacaagtcagtgggagtgtagaaaccttatctttcttctttgtttccaaagtcatcctcccttgatttcccctcctcaaattgtcaaatgtattaatctgcattgcacgtaggagccacacggtgttattgtcctctagcaatattatatacctgttcttagattgtgcaatgtaatgtggtcatgggcatattcttaaatttactttattcagaggctttatggtgtcctccttttaaacaattccggtactaatgatcacatgttaatacattagttttgagaacacacaaataccatgcacatttttgcatataaagaagaaaatgaagtttgatgcaacacggtgacagatgactgcacagcacattactattgttgtacctctagtgtgtgaaacaaaggcatgttccaacttagaaacagaaaagagtgacagtgaaaaccacagttacaccacttacattctcagtgctatcagaaccaactgcgcagcagctgatgcctgcgtacaccaaggagtccctcttgctgaatccctttcatctcttccttcatcaatctctgcttatcattgaaaaagcttgggattttctttcttcctttcttggctgcaagcaaaccaatgtaattaaccctttactgaactcggaattcctctatgggaagacaggcacattacagtgccatgttctcgtagtatagttaatagtataatacatatatttacccattcctagatctgaccacttactacgaatatctcgtatttttccttactaagtggagtatgtctaaactactagttccatatcgcaatatgtagtccccagatcttgtgctgcctgtcatttttttatctccttgagaaaacctactttgttgattttttttttaagaaaatcagttacgttctcgacttggcttgaaccgcttctatatattgtcaacctatcagttgtttagtttcgcatgtgatatttacattctagttgatgtttgctgcatgtacatatttattttcctgactgatatttcatgtttatggtgattgatacagcctgaaatccttgcttttcagatatttatgtttttttatgttgtcccttgctacagacttgattcatgtcttctcctcagtgccaaggcatctcaacttcatcgatcacactagtgatattggatggaaagagtatgttatatctgaacttataaataatttatctgcgcaagtattagtttcaccaacatgctgtgggtaatactgttacaggactcagagagtgcaaccaatcatagtagatgctggaatatacttggcaggaagaaatcagttcttccaagccacagagaaacgtgatactcctgatggtttcaaattcttcacaggcattttctgactcctttcacttcattttccttcgtttgatcaactagttctgtgattcatgggtttcctcacatacaggttctccgtgggtcattctaaatcgacggtttatagagtattgcatatttggttgggagaatctccctcgaactcttctcatgtacttcacaaacgtaatgctacctcaggaagggtatttccactcagttgtatgcaactcagacttccgtaactccacagttaacagcgacatgcggtatatggaatgggatgatccaccccagatggaaccccattttctgaacacgacacattatgatgagatagtggagagcggagtgccttttgctagaaagtttcgggagaatgaaccgctgctggacaagattgatgaaagagtactccaccgttggcgtcacagacctgttcctggtgcctggtgcacaggcagaaaaaggtggttcaatgatccatgctcccaatggagcaatgtcaacattgtaagacctggtccccaggctgagaagttccgcaaacatatgaatcagatcatagaggaatctgcatcaggcaacaactcatgcaagcaatagcagcaatgaagcgcgagatttcacttcccatgtttgaagcgatgagcttttctcattttgcatagaggggctcttcacgaacttcagcagttaacgcttccagagcgaacatttttgcacctgggttacaagcacacgtccaaaggtgagatgggtttattctttccagattttttggtaactgtcatggcttcaagggcctcactgcatagcgcatactagcttagttggaagtcagagtgctgatggtcggagcaccaaagctaataggcagtgtaattattagtgatcagttgaatgacttgtgcgactgtttatagaactgatggaattctgggtgctcccatacaggattgagaaaaatgaagagtgggtgatggtggttggattcttactgttgtggttaatacaatgctctttgcgcccatggcacctcactaactatttaatatcatgcattgccaggatttgagtagtactgtggtgggctaatcatctggtatggtatgttattaagagttctatacacacttttttttttgcggggaagagttctatacactctttaggaccttttggcatggttttgaattatgaagtgagccatgtttcactagaaaatctaaggcagtaaatgaatacgaagtgatttaacagactattacagtaaatgaaaatctaaggcagtaaatgaatatgaatatgaatattaagtgtcagagctgtaaccacagagacagctcagagtttaacagactatttcaggccagcaattgtggatgctatgttcttccatcttctgtttgtactcaactcaaaagcatgcttcacaatcagattcagataagtcagggatccagacgtacgcccggctccgagtgttacgaactccgaacaaattcaatcctgttacaccggttcctcgcgtcggcacgtgggtgcgaatggcgattttttttttacctatttagggcctactgagattagtgccattttcaatcatactattttttagcttagttgctaaaaatgtgtctacgcttagtttgttgccaaactttggtaaatacataagaaatcttgccaaaattttgacaatattgctaacttgccaaaattttggcatgtttattttggctacaactgaatatgcctttaattttttttagtaaattctacaaattatatgcactttggtcactacataaaaaaatacagaattaagaatatatttttcataaaagtacagatttaacataaagaaaaatcactctcgcccttcgcgctgacctcctcacagctgctctcgcaccaacctccatactcgctgcgtctggtgagatgagaggagaggacaggatggattggtggggaggtggataagtggtggagagagatgtgaaagaaagaagaggggagtaacgaggaagaagatgaatctgatgtgtgaaacccacgtgcagatgaggagatggatggaaaatgtgacggcagtggcacggttctaattttgtaaatttcaatgtcaaggttacaaataaacgaattgtaatggcatttatatggaatggcatatttgcactggcatggatcaaattaaccctaaataaacctaaaaattaattttagttggtcgcatgcaacacattttcttgtaaaatgatgattattttgaaaagaccttaagaaccttaggtgttgatcaaaatgggatgtgagtaggaattccatgtgagtagagtctgccaactcttatgggctgaaagatgtgacgcggcctaaaagaggccacagccttgaacgaacgggccgggccagactgggctgtaagatttgaggaaatcgcgtaggataatattagggcttgtcaagagaatttttcgataaccgctaatccccaactccaaggtagccgacacaaaaagaattaaaattatccactaaagaaggcgatacatcatccaccaaggtgagcaactttcttctttcaacgattgtttgttctcttggaccaaaatcgatctgcttcttctgttcttcagtcatgagtttcttgcgaggaaaacacgggctgtatgattagatgaagatgatgatgatcttaggatttagattaactgctattgaagtgattattgcgagtatagtccttaagatatgtgatcaatttgttctcatattggtgcttagcatcctaattccgattgggattaatttcgacagccctgaaatctctgaaacattctgaattctgatacgcttccaacatggcggttttacagatggctcgtgagaagaggtcgtgtccgagagcttcagagacgcagcagaacaattcagaaaagaagggaaaggtggatggtgagagtgcagctcgagacaagagggctatcactgtcactgtagatcctgaggttctggaatgtgatgtctgtttcggccctctcactcccccactttatcaggtaaataagcatatattgatccttcttcttgctgatcatgattccatttacaagtttgtttattagtatttactttgctcttcgtgttataagtttttcagtgtttcagaaaagaaactttaatcatgttcaggtcatatctgcattatctgcaaatgtctcaattcttaactctttgtagtagaacgtccagtgattactcattcagtttcaagtttcaacaaactgacacgaatatgtgctgaataatcatcgaactttgatcatactacaatattatttcagatttataggactgtctgaacattctgaaccagcattccatgcctgaacactttctacttctatttcgatactctccttacgacatcctgaattcttgagaatctgcgtgctataatattgatcacattgttcatgtcgttgtttgccatgagacgcgaaagcttaggaagacaattaagcttatagttgttgttaataatcatgcagtgcatgaggagagggcacatcacctgctcgacgtgcgtcgcggagatggggcaggagtgccagtggtgccgcgcgccggaggccaccaccacgcgctgccgcgccatggagcacttcctcgccgccctcgccgtgccgtgctccttcaaccacaagggctgcgccgccatggtgccctacggcgagcgggaggcgcacgaggcggcgtgcgcccactcgccgtgctactgcccgatccgcggctgctcctcctccccttactccggcgtgtccctggtcgaacacctcgagcgcaagcacccggagatcggccgcacccgcgtcgaccgcaccaccctctccccgctcagaatgtgccacggcgagccggcccggctggtgtacctcgccggcgacgacagggacagggcggtgttcctcctcgccgtcgaccggagcgaggcgccgcgaggctggtcgctgtggatggtcaggctcaaggcagaagaagaagaagaagaagacaagggggagctgaggtacaagatcatggtggccgccaatggcggcgtgctgtcgctggtcggcgagacggagagcgtggggcggctgacggcgccgtacagggcgagctccttcctgttcgtcccgggcgccatgctggatgctccccctgaggctgagggcctcctcgtcttcgtcgagctcaagtgagctcaattagcgctgttgcaatacgtattacaagttcattagagtctactgatagtgatatctccattgatgggatcatgcaagtgtgcaaatagatatacaattgttctgaatcgattatttgaaaaaaaaaaaaagaacaagctcaacagaggctataatggatgccttgtggatattggccaacagggacaagtccatcatataggttcagacttcagacctcttctcctgataggagtttcagatgctgtgctgcatgcaacaaaagttagcagcaattttttctgtattcgtatacatgaatctagaagccgacacgtggatgcgaaggttgtgccaaagaaaatactgtgacaagttgtgtgcattatacgatcctaactactgtatcatggctatatttataggtgcttgcgatcgaataacttgctttgaaagcatgcaagaacccaactatacatctttaggcgcaaaattcccatctttatggtgcttggtgccatgaactgaccttagtggcaatgaatgattattactgatctgagaaagcctacgatatcttcagacttgaggcatcaatatacagaaaatgacaactcaacacgacacactccctcaacatcatcttcttctttgctatgggtcttcagtgcaaaaccaaaagttcatcttttcaagggcaaatcattgagtagtacattgctgataagtgataacatgcgtaatcagtcggcttcttgttatcatcatcaaaagagacacaacaatcgtcagtagcgactgactggcacttgattgttggttgattgcctcatgttcagcttaactgaatcaattgaccagtatgcacgtgttatgttgcttgtttgtaggtagttagttagcaacaacaacacgagttaattgtacttataaatcacattgcaatcttggcatgactcaacagctcacttttggtgaaatgatcagtagtgaccgaagccaaaagcatctatctgcgacccaagaaaaaggtggtcagctaccccgtccattggagtggagtggagatatggtggagcagaacaagagggcgagggccaatggcgaggtcaagcaggagcagcagcaagaggaagaagaagaggttgaggaaggagaagtgagccaagaagaaacccaaaggacgggagctttccctctggtgaccatggccgccatggagcagacggaggaggagacgcagatcgacgtcaggatcgccgtcgccttgctccactgccatgcttgcctccaacctctcaagcctcccgtcttcaaggtcactgctctctgttgatctaattcggatgcaaagattcctatcttgatccttctttctcaccctctcttcttaacttctcaagactttgatagagcgaggcttgtgttgattataagggttaggttttgaacgatctcggccatgtttctttgttggcctaggattataatcctgtaattttttcctactctatctatcaatagaatttcacactatgttgtgcgagtcgttaaaaaaaagattcctatctcgatttaatttcttcttgttcttcttgttgttgtgtttgtgattaattgcagtgcgatgaggcgcatatcgtgtgctccggctgccgctgcggccaccatgggcagctgtgcggtggcgccgccgtgtacagccactgcgccgagctggacgccatcgtcgccactgccaaggtgccgtgcgcccacgcgccgtacggctgcagcagctacgtcgtgtacgcgggcgtcgccgaccaccagcgcgcgtgcccgtgcgcgccatgctcctgcccggagcccggctgccgcttccgcagctcgccagcggcgctccccggccacctcgccgccggccactcctggcccgtcgccgagatcgcctacgggaagccgcgcaagctcgccgtgccgccgcccgcccacgtcctcgtcggggaggccgaccgcgccgtgttcctcgtgtcgtcgtgcgccgtcggcgcgggcgccgcggtgtgcgtggtctgcgtcagggcgaacggcggcggcgacaacgcggcggcggtggcgcggtacaagtgcaagttgtgggtggaggtgcctagcaacgacgacaacatggccatgatgacgtcgatggtgaggagcagcgacctcgccggcgggttcccggcggcggacaaggggatgctgctgtgggtgccgccggagatgctgcacggcgtgcccggcggcgaggcggccatcctcagcatccgcattgatagagctgctgctgccacgcccaagttcacgactacacgagccaggtcccagaagggaatgcactgaagcttagggtctccagcgtttcggttttgatttttagcactagataagctattaacgaaattactttggatttacttatttctttaaggagcttatatataaaattattttagacaaaacataccgttcaatattttggaatgcgtgctaatttgatctttgaagctgtgggaaagaatgcaacctagtactgtagaatggtttatcttttgcatgtctagccaataagtaatacacaactcatgaatattgtagaaattttgcaagaatttcacggaaaaacagtaaaacagttgaattcccgcagtaatttgtgggtggatcccatcattcccatgtctgtaaaaggaagtctactgcaccaggaattggacacaaaattcatcacctgcatttcaatgccaagcagtgccgcttcacttcaatactaccatctgtgttccagtcaggacttcagaacgtatgacaaaagatggtatgtagtagtatgaagtatgaacttgaatgactccatgctaattttctattatgttgtttccgctgttgaaaatagttctgggtgtgtttagttctttgggtgtaaagtttttaaagtatacggacacacatttgaagtattaaacgtagactaataataaaacaaattacagattccgtatgtaaactgcgagacgaatttattaagcctaattaatttgtcattagcaaatatttattgtagcgtcatattgtcaaatcatggcgtaattaggcttaaaagattcatctcgcaatttacatgcaaggtgtacaattggtttttttccacatttaatgtatccatgcatgtatcaaacatttgatgtgatgtttttagccaaaattttttagatctaaacaaggccagatatactattgatctgaatccatcatccacaaaatgtacaagctcaacagaatgacagatgatgatgagggccttttatgggttgtggccaacagagaccactcaatccataggttcaggccacagcacgggattgctaacttcttgagggtgtttgcctgtttggtttagagacacgtgaaatgggatcagtctttaaaattaatattcttcccttaggttcatgccagccttatacagtgaaaatcgacggagtaatctaactgacttctctctcgctaacatacggaccacattatcctatctctcaaaaacaagataatcccatttctcatgttgtatggatagttaggatcttcccctctaaatgcgaggatgagtcaagttcattctacttcgttcctaatccaaacgcacgctaactcttccaagttttagtctttacaaaataaccaccgttcaatgctaccattgagttgcaatcatgaccacaacgcagtagaaattcagtatatcaatcattcaggtcttgaggaggcaacacaaggatgttgtatgagaaatgagacctttcacggtgtttgcatttcaaaaagagtaaagagtcaacgcttcataatgaaaagtaccctgtaaaaggtatttgagtattggcataggcactttacacattgttctttgctccatgttcccaacccctctccctcgtattccgcgcgcacgcttttcaaactgctaaacggtgtgttttttgcaaaaattttctataggaaagttgcttaaaaaaatcaaattaatctattttttaaaaaattattaatacttagttaatcacgtgctaatgaaccgctcccttttccgtgtggaggagatgggttccaaaccagggcatgcgaacacagccttaggtaccaagggcaaaaagataaatttgctagtagagatgagaggaaagagttgtctgcaaatttagatcggtaccgcgtcggcaccagttaagttgtttgcatgatactccctccgtcccaaaataagtgcagttttgcactatccacgtttaacgtttggccgttcgtcttatttgaaatttttttatgattattatttgtattactattagatgataaaacatgaatagtactttatgtgtgactaaatatttttaaatttttcacaatttttttgaataagacgaacgatcaaatgttggacacggatatccacgactgcacttttttttggacggaggtagtactagcattaaagttctaatttacgtggttttctctagatttatattttgttcccaagaatatcgtagaactcttcccattaattatccattacgttatttgcatagttattttgatatttatattttgttcccaagaacatcaaatatcactcaaggtttacgtcaatttaagttttgcattttattcatggaaaacataaactgtagataaaatatttctaatgattgcatccatctgaacatgctatggtaggttaacaaacaagataccagagcttctctctcgaccctatatccttcaggttcaactattcaaaccctagaagaagaacagaaagggatatctcattttagtcgcttatacgaaggaatttgttaactatgtaaataacgaatcaattgtgtaaataagtataggagcagaggagatattacccgatgcgcttgcgcctagccgtctatcggcccatcttgaaccctcaaccgtgccgatatttcctcctttgtctccttctagtggaacaattcaaaccctagagcaagaacaaagccagggtcgaagaaaggaggcgtcgatctcttctcttttttttttttctggtgcagaagcacggatcgattgttgcattgaattgtccgaaagatttactttgttttctacctaacaatactggtgattggacctaggtatttgattcactcaaaatgctcttcttcttttagtagttaattactctattggccattgctattagttatgataattttattccgtacttgttgtagcgcccgttccgtcgtggcgcctagcgggaaaatttaaatactaaaaaccctaattgcgaaatctgtttctttgcttgttgtcagtctccgtgccaatccctgatctcgaatcctcgatctatcgtcaaattcaaatcccggatccaaaaatcctccccaaatcaaattcctccgcaaaagtctatttttcctctcttaggttcggtgggccgatttcctctcggcccatctctctctctctctctctccctccctcagccctcctctccctcgtcccgcccgtgcgtcgcacgcgcgtgcgcgtgagccgacgccgagccgagctctccctctttctcgttctcctgctctccctccccgtctctctcttcccggcgagccccgcccccgagttttgaatcccccgcgccattgcttcccgcgcgcgcgcgcgccgtggtggccgaccggccagtcgccgccgccgtcagcgcctgccgccctgtagccgcgcccttccaaaccgcccccgccgtcatcgccgtcgttacgacccggccccgccaccaccgcgcatgctcccaaggattggaggcagagctcctcctcccactgcctcgtcgccctctctctccttccttcttttcccaaagtggcaagaggcaagtctcctttcccccttcctttcttcctttttctccccgccggcgtcatcctccctatcgccgttttggccgtgaccgccgagcgccagcttgctctttgaccgccctaggtcggtttccaaaccggcattgccctcctattaaaccaaggcgccctcccttcctttccctccccattccccctcgctccaccacgccattgccatcccctctgtctctctatcgccgaccgctgccgtcgcgtgtgccggaggagccggtgtgcgctaggacgcggaaggggactctgggcgctcgtcttcttcctcttccccggcctgaggccggagagatcactcccgtgccgtcggcctctcgtcacagcgccctcctctacagcggtagtgcatcctccccgttctccctcctcgttcctcctcttccccttagctttcggtagaagcttgtatagcctccccgtagctagctggcgccgccccgaccgttgccgccgctcgctgtgtgctcgccgccgtcgccgcccgtgctcggtagcgcccacacgtcgccggcctctctcgtagtgtctccgtccaatctgacgctagaaacggattcccggagtcgcgtagatgctctagctcgcccgaatcgacctcccgtcgcgccgtcgccgtttcccccttccctcgccgacggttgccgccgccgcaatccgccgccgtcgagctccctccggcgaatccgagccgttggatcgtctcccctcgtctcgtgcaaccacccggtgtgcccgcttccgccggtatcgccgtggttcgccccgccgttcgtagccgccgtccgccgtccgttttggccggcgccgtcttcaacctcccgccggcctgtgtggcagccacgtaggcgccacgtcggtgccagctcggctaagaccgggtcaagccgacctcggtccgccgctcccctctgccccgctcgcgcgcgcggtccaccatgagccatgaggctgcgcgtgggcccgccgcaaccgcacccccgcgagccgcgcgcgtgcaccgcgtccctcccccaaatcctagcgcgcgccgcgtgctccctccgcacggtgaaccgtgccaccgacaagcgggtcccgctcgggaccacgcgaggtgagcccggcccactggctccccctctcctcccctcccgcgcgtgccttgggccgccttctcgggccggccggcccattaagctcagccgagccgcccttttctctcgggtcgcaccctagccgcccgagggaagtctgtttcccctccctctttcttttctctttttcaaaagggtttaattaaatcctttttcctttagaccaaaaatccaataatcttagaaattcaatatcttcttaatcgtatgtcggtttgactctgttcaacttctaaaattcttcaaatctcgagatctatttaatggcacgtttagaggtcaataatagagctttattttcgttgtttgttgagttgtcccgttttgcgtgtagtttcggagcccgaagacccgcagtgcgaggatttcgaggatcaagctcaagatctcgagcaaggcaagtcacctttgatcatcttgcaccgataatttaaatctaagtatttcttttccgcaaatattgcatgaataggatttacacaagtaattcggccgcggcttgcgagatagcctgccggcccccaatcctaattgctgcaattaccctccttgaattgttgaacacttaaaccttctttgtcacctgttgtgcttcgatgcacgggccctcgggcacgcgcatcggaacacctcccctcaaatttaaaatatctaacgatgggtaaaacttgggttttacaaaagacttggaaaacccgacacctgggtcggtgcttgcgaactaaatgaatttccaaaatcgcggatcgggaaatgtaccgggagtacggtttcccgctcttgcacttaaggaccgttttcctttggaattacatccgagcatacaatagtgcgaccacatgggtggaatggggcacccctggctgagtaattagctaatcaggggagccttgatgccgagagacaagtggattcgccggggtggtgtcggggaggacccttgggcttcctggcacagtatggtctgggacctaacctgttgttggtctgggacccctctcgtcggcatatggtaaacctgtgtcggctttggaaatgccttgtcatgaaagcttggaggtctcccgacgtggctgatccccacgggctgggtgatccgggttagtaatgtcgtgtgggtaaagtgtaccccctctgcagaggttattaaactgttcgaacagccatgcccacggtcatgggcggatgtgaggtgattcctagcgtagttttgtttgactactgctttgtgaaattgctgttgtggaatgggatcgatgtttggaaaatctgcggctgatgggatcagctaggcccgggtggccgtttgaaagttgtggccgggtgccaaccttgaatcaattcaaagactgatacatcgcacatactccggccggacgagacgcactgcctcatccgtgtcgtttgagaatcactcacttagttgtttcaaaaaggagtttaaataaagtcatttgcaaaaacaacagccttacctttgaagcctgcattaaacacttaattcccatggcttgctgagtactcctgtactcacccttgctctatataaataattcccccccagttgctgaagaggatgaagtggatcccgctgacgaggagtttttctaggagcaagtcggctacgatgagttttagggtttcggtctagttcccaagtcgtgcctgtgatgatgggtccaagtcttggcttccgctttcccttttgtaatgcagttgtgagctcgggatctgtccgcagcccaacatgactgtacacctactctgtaataaagagacctctgttgctgtgatattctgtcttcctgggactggtatcgattaacaggttaatttggagcgtcacgggctagttctgttcggggctagttcggggcgtgacacttgtctctcttttaattaatggtttatattgttccacctctcaatacatttaagtactctcaaacaccgtaaaaggtctcatgagaaattgcattgcgcctttacggttgcttgatccaatgatctgaccaccttgtagagaaaggggagatagagaagattaggaagatacgcaaaacgaggtgagttattattgcatgactaatgagtattaattattttaaatttcaaaatgaactaatatgatttttaaagcaacttttctatagaaaatttttacaaaagacacaccgtttagtagtttggaaagcgtgcgtgtggaaaatgatgtgctttctatctctaatctcctaggctgtgtttagatctaaacttccaactttttccatcacatcaacctatcatacacacaacttttcagtcacatcgtaccaatttcaacccaaacttctacctttgaaagtaactaaatacagccctaaacaaacgcatagtggcaaaggaaggccaaagtggttgcaaactggcaatgatgaacggctactgatatactccctcatatttttttttaaatgtgacacaccctaatacttatatgtcgcctccttaaacagtgtattaggctacgtttagttcacattaaaattgaaaatttggttgaaattagaatgatgtgactgaaaagttgaaagtttatgtgtgtagaaaaattttgatgtgatgaaaaaattgaaagtttgaagaaaaaaaatttgtaactaaacactaccttactgaactagtccgtagtaactcaacagtaatgcgtgatgaatcaacttgtgtcatcaatcaagtaaaaacaacaaatcttgggtccagaggctagttaatccccatatccgtttctgggaaccgactgatcctgtgatgttgcacactgtctcacttcatttggctcatgagctcatgctcatctcttcccagtcccaccacatgactcaacaacacattctctgtctctctctcgctttctagttcttggcttcttgcaatgaactgattactacgttttgttctactactaccaccaccaccacatcatctccggagactgcagaaatggctgagcagaacaagaggagctcgtcggcggcggagaacggccacgccggcggcaagaaggcgagggccaacgtcgaggtgaagcaggaggaagaggaggcggaggaaggagagatgagccaagaagaagagagcgcaaagacggggcctctggtggtggccaccgccatggacgacccgcagatcgacgtcaggatcgccgtcggcttgctccactgccatgcctgcctcctccccctcaagcctcccgtcttcaaggtctcactctcactctcacttcatttcaagattcctctcttgatttcatttgtttctttttgtttttcttctcatgtcgtcgaatgtttgatagcttttgttgtaatcttggatttttgtgtttggatcaaatcttcttttgttgtgtggttttgcagtgcgaggcggcgcacgtggtgtgctccggctgccgcggcaaccacggccagctctgccgccgcgccgccgcgtacgcccactgcgccgagctggacgccatcgtcggcgccgccaaggtggcgtgcgcccacgcgccgtacggctgcgacagctacgtcgtgtacggcgcggccgccgagcaccagcgcgcgtgcccgtgcgcgccctgctcctgcccggaccccggctgcggcttccgcggctcgccggcggcgctcctcggccacttcgccaccgaccacccctggtccgtcacgcagatcagctacgcgaagccgtgcaggctcgccgtgccgctgccccggcggtgccacgtcctcgtcggggaggacgaccgcgccatgttcctggtggtgtccccgtccccgtgcggcgtcggcgtcggcgcggcggtgtgcgtggcgtgcgtccgggcgaacggcgacgacgcggcggcggcgcagtacaagtgcaagctgtgggtggaggtgccgaccaacagcgacaacatggtgatgatgacgtccaaggtgaggagcagcgacctctccggcgggttcccggcggcggagcaggggatgttcttggtggtgccgccggagctgcttcacgaggtgtccggcgagacgccgatcctcagcatccgcatcgatcgagctgctcccgccattgccaagcccaccactccacgagccaggtccctgaggagattgcagtgaagcttatgtgaatccaatagagtatatgcttaagatgacagtctggtattagtacttgatcttttgtgtattgactagcactagccaatatatgagtaatggagtatggtttaactcatgacttgtgtaggaattttgtacggtttgactctaatgttgttagtaatttaacttgagatttgtgaaccgatgatgaactgttcatgtatgatgctaccgtttcagaaattggacgccattgctcacatgcatgatttcgactattgcatcacgcagtgctgcaccagaggaggaagagaggtggtccaatgtttatgctccctagttaaaaaaaaaggcaaattttgccacaggacatcgtgactttacggttttagctgtagaacaccgcgcgaagtgacttttgggggaatacactctcaaaatgtggttatttgctggtggacaccgcacccattaaattaataatttccagttgaataggagagagaaattgtgtgaaaaggagagagaaattgtgtgaaagttctaaaatgtccttgggtccatatgtcaggtctttccttctctcttctctctatcccctccttccacactgctattgctagtgcttctccgtcctccatgtcgacgcgaaggagatggctcgtgctgggctaacccacaagcaggaacccggcgagggaggccagctgattggagccgtatgccggcgagggaggaagcgccacacgtcgggcggcgctgtggggtcagggagcggagcagagaagagctgggcgtgggggcggcggcgggggcagtcgtctacggtggcagcggccgtcttctgctgcagctagtgccgcacagccacgccagccgttgctccgccatcgcgccggccgccgctcctgcacaagtgcaccaccgtgtcgcgcgccgcccgcatcacgccgcacggttgccgcgagccgcgtcgtccgctactccaccttcgcggtggcccgtcactcctgcacgagggcgccattgcatcgctcgccaccctgtgcggcgtcgccggctgctagtatcgcccaatgccctgtgcggcgtcgccggctgctcgtatcacccaatgcactgtgccacgtcgccggcagctcgcatcgcccgccaccctacgccgcgtagccacgccggtcgttgctccgccatcgcaccgaccgccgctcctgcacgagtgcgcccccgcgtcgcgcgccggccgcccacaacgcgccgcacggtcgccgcaagccgtgccggccgctactccaccttcgcgctggtcgccactcctagacgagtgtgccatcgtgtcacccaccgccctctgtccctgcatcgcgcgccgcacggtcatcgcgaggcgcgccatcgagggagagagaggaagaagataggaagagaaagaggaataaggggcaatttagtcaagtcatataaaaaagtggagccatctcatctagtcagcacagaaatcattaatttaatgggtgcggtgtccaccagcaaataactacattttgagaggttccctaaaaatcacttcgcgcggtgtcctacagttaaaatcgcaaagtcacgatgtcctatggcaaaatttgccaaaaaataaccaacctcctactaatctggatatatatatataatgtctcatatcctcgatattaggttggctagtgctagaaatttggatagttttctaatatctaaatatgttttttataaaaaggtttatttattttaaaatcagataaacttattttgggaaggggggactaccagtccaaagcttgcttcaactttcaagtcgatatctgcaaaagaggcgtatagtcgtatagaggcttcaagcgtggcagaaatgtacgtactacaggcttcaagttgcatcctagtagaaatatcgtgtacaggcttcaatagccaacgctggtgtgcagtaaaattttgttgcagtattactactgtactacctccgtcccaaaatagtacagccataagtttctatgtctaacttgatcgtccgtcttatttaaaaatttttaatacttagatttttgttgttacgagatgatgaaatatgaataatactttactcgtgacttatgtttttaaattttgtttaaataagacgaacggttaaagttgaccgcggaaaaatatagccgcacttattttggaatggagggagtacttgttactctgaacattttacctcactgaaacatacacatgccactactatgcattattgcaaccgccacctcttttcatgtttggatgtaacaattctgctttaatacagtgccaacctactcctacacatatctcttcttgtgaaagatctttttttctcttttgttacaaatggttcggtttatttttttactggaattcagaggtatactgctacagtactactctaaagtaaatgcagtgctgccctgttgacgtggcgtgaacccagaacgtttgaaatactgaagaaagagagtaactttccactctataattattacaacaattttgtactccctctatccccattttaaatacaaccattatttaacatgtccaattttaatcgtccgtcttatttaaaaaaattaaaaatataaatcacgagtaaaatattatttatattttatcatctcataacaataaaaatactaattttaaaattttttaaataagatggacgattaaaattaaacgtaaaaactcatggttacattaaaataggatggacaaatacagttttactacctcacctcccactctactgctactcaacaatgcaccagcaacaaagttcatgccttttcaaagttcataatgtaggagcttgttgaatgaccccccccccccttcccggttcatgccttttggtttattctctctctggtcgtctattgctgcaaactgcaaccaaccaccgattgtttgttcatgctgttgcagttttcagtcaacaaggacgcacacaagagccgatcgccgtagacgacgatgcagcacggcgagcagagcggcgccaagaaggcggcggcgtgggtggtgtcgcccaacggccaagtcaagcgagaaatggcggtggaagcggcgcgcggcgagggagctgctgcagccgccggagccggagaagaagaagaagaagtccaagccggcgggatgatcgccgcggcggtgggcgacggcttcgagggtgtggagatcagcgtgcggatcgacttggccgtgctccactgccccctctgcctcctccccctcaagcccccgacctaccaggtaccagctgttcgtccaattcatcacctattcttcttcttgctgtcgattcgtgaggtgctcggctagtgacgatttcttggcgtgcagtgcgcggcggggcacttggcgtgcagcagctgccatggcgacgtcccgggcaagaagtgccacacgtgcggcggcggcggcggcggcggcgtctacgcgcgatgccccgggctggacacgttcctccgcgccgccaagatcctgtgccccaacgacctgttcggctgccggagctatgtcgcctaccacgacgtcgccgcccaccagcgcgcgtgcccgcacgcgccctgctcctgctcggagccgcgctgcgacttcctcggctcgccgccgatgctcctcgcccacctcgtcgccgaccactcgtggcccgtcagcaaggtcccctacggcgaggtcctcaccatccacgtgccggagtcggagcggcgccacctggtcgtcgcgggggccgccgggggggacgacgagcgcgtgttcgtcctgtccgtgggcgcgctcggcgtggcgagggccgtctcggtggcgtgcgtcagggcgaacgccgcggcggggccgcgctaccgctgcaagctctgggcgcacgccccgggcggcggcgccgcggacttcgtccacatggactcggcggtggcgagcagcgccgccgcgcccggtggcgaggtcgccgtcgacgaggaggccaggttcctgacggtgccgccgtgcttcctccacctgctcgacgccggaacgtccaaggagatgctcatcaggctcagcatcagcattgacattgacattgacatgtcctgatcgatcgacatgaaacatgatggtctactagtaatgtcctaaattcgtgattagtgctctgatgccgttcaagtttaggtgctagtttcaagttctaaccagccataagctttgctatttggaagtttgaactctgatgttctaaattataattttcgtaaggaaaactcgagttaaaaattcgaacttgtactttccttcaacctcgtttttaatcttcaatggatagaagtagatgccaaaaagatcctaattgaagcaaactatctttaccccaaaccaaaaccaaacactgccggcctccgtcccaagaaaaacccaacctttactaggatggaactaggggtgaaaacggtacggaaatttccgagaattccggctaccgtttccggtttgcaccgaccgtttcaatcggtatcggtaattgtcggtatcggaaatggaaacggtaatctctttcggaaatggtagcggaaatgatatggggttttttccgaccgttttgtcggtaaccgttttttatcggtaatttccgtcaaatttccgacaaaattccgaagaaggaagtcggctgggcctggctagcaggaggagcaaaattccgaagaaggaagtcggctgggcttggctagcaggaggaggagcccattaggcattaaggagcagcccattccgaataaagaagccaactaggcctgaccgcatcgtcgtcttcatcggcgctggggcaccgccgcgccatgttgggcgccgccaccaggtcgccgacgccggccgcaacctccttcgccccgacggcctccgtcgcagccggccaccttccctcccccatgctccaccgccggcttccgtgccaccgagccaagcgccgagcgccgccgcaccgccccagcctcctcctccccaccgatgccgcccctttctcctctctccttcccccaccgccgccctgcgccaggccgccatctccggcgcctctctcctctcgggcgcgcgtgaaggagccaaaggcagagaagagaacgagagagaaaacagagaagaaatcgagagagcaggaaaaggaaccgagagaagggaaggataagagagagagagaaaaaataaaagaaagagaggaaaagaaagactgtgggatccactggcgggccccaccatcttgactcctctctgtgatcgacctggaaataccaaaaagtctagtttagcatgaaacttaattacaacagtagttatacaatgtcaacataaaagttcttatgcaatgtgccactgtaggacgacgatatagctatgtcaattgatgatgaaataatgaatgatgtttgacaaggagctgatcagctgaagccatgccagcttgtgagcttggtgttctcgaagacttcaaatctatatcctaaaaaaagtcggacaatattagttatgctgtaatcctatcatgtaagccacattgtatgctttagccacattgatgttgaagtatcattgaactttatttatattatttatcaatcttattgtcaacttattaatcatcatataacggtattgtgtggcagcgtaatgatgcaagggtgaaattataaggtcatcttcatacatagttaaatgcgggatgataccacagttcgctgtttccgacatgaattttcgacttccgtccgatatcggtatattcccgttccgacggttccgtttccgagataccgatataaccgatatcgttaccgtttccgagtataccgttccgattccattttcgagaaaataaaatgaaaatggaaatggtagagggtttttccgaccgtttccgaccgttttcatccctagatggaacgcaacctaatataacaacgaatctagacgtagagtatatctagattcgttgtactaggatgtgtcatgttataaaaccacctccgaaatcgacataggtagctaaacgcgaaaaaacgccatagaacatccaaacatgaagacgataccgaggcacgatatttgataacagagtttagccgaggcctacatcttcggagcactgattacgggcgctactccccgatccagcatattacagcgtatcagagttacaacgactcacggtcggacgccgtcggcaaccgcttcctctcgctatgctaagtcgttatgcggtcacaacagtcacgccccactatttatgagagagactaggatagagtccgactcttactctagttctatacctagtacaactccaagtcctaaattataaccgactttgtacacatatacaaactctaacatgttccaacctagtgtaaggttgggtcttcttgtttttttttttttgaacggaaggagtgcgacgattttcattttttgtgggggctaatggaagcataatatcatgtacccatattacatgaggtaattggaggttttgaattcacctcaagcagattattcaaacagatgtggctgattgttttgtttactgaaaatcagacatgcttgaataatgccaaaaaaaaaaaactccaatcacaaaaaatactcctctcttcacacaagcatatgtgcgcattcaatgggatagatggactttgtgagatgctgctacgtttgattttgattagcagggacttgtccttgggtagatgattgaacaacaatagagaataagggaaagggtttagggatgtgaccggttgacgcgttggatgaagaggaagtcccagccatcgtcgttgtcgtcgctctgcttgacgtgggcggcggcggcgatggcggtcgtgacggcgacggtgctgcgcggcagtggtggtcgtaggggatcccggcgaggtcgtggcgcggcggtggagtcttcccgtcactggctgcgccccctcgatcggttagggtttatggggtggagtggcggc

SEQ ID NO: 6212 - DNA, 2300 bp, Oryza sativa
actcagagctaaaaacccatgagatggatgttttccatcggaaaggcctcaaacactcgatggctttggtagctgatccctctggtagtacttcttctaatgactcagcctttgtgtatggtggcttctctcttgccgctttacactcggtcactgaggagcaattagagaagatccctgaagatgatcttgctctttttgctagaaaattctcaagagcttacaaaaatgtgagagatagaaaaagaggaaaaaccaatgaaccatttgtgtgttttgagtgtggagagcctaaccacaaaagagtgaattgtcccaagttgaagaagaagagtgacaagacgatcaagaagcccgagggacaagggcgaaaggggaagaaggatttgatgaagaaggcgatccacaaggtcttggcggctcttgaggaggtgcagcttagcgacatcgactccgacgacgatgatcaagaaaagggggacaaggacttctccgggatgtgctgtctcgccaacaacgaggacttcatcaacctgtgtctcatggcgcttgaggataaggatgactcatcggagcatcctgaggtatgtcttgatgatatcccttccttggatggttctctttgtgatgattcttgctcagataatgactctgttgatgatgaactaagcaaagaaagaatggcacacttgatgattgaaattagtgataagtataggtcttctaagtataaaattgagaaactaaaatctgaaaatgatggaatggcgctagaaattgctaggcttcgatccatgattcctgaggaggatacctgttctacttgtgcttcatatctttctgaaattaatctcctcaaggataagttgaaatcatgtgctttaggagctgggaatccttctagtgctagtgctgcttgctctacttgctatgaaatgaaagttgatatgggtttgcttgagatggaattgaaagaactaaaagaaaaatttgttcatgataggattggtaggtgtgaaaattgtcccattctcactagtgacaatgatgaattaagacaacaagttgccatgcttaggaccaagaatgatttgttagaatcttttgctactaaggaacctattcattcttcatgtgctaattgtgctatcctggaaactgaactaaaagatgctaaaactgtcattgattctatcaaatctattgattcttgttcttcatgcatttctctgaaagttgatcttgagtctgctaagaaagagaactcatacctacaacaatctttagagaggtttgctcaaggaaagaaaaagttgaacatgatcctagaccaatccaaagtgtccataaacaatcaaggtataggctatgattttgctgagtctttgaggataggtacccatgagattttaggtgtcacagatgggatgatagaactagctcaaaaacctataaccttcaagtctgcaggtttcattggaaacactagttctagtacacccaaaacctcagaaccaaagatggtacctatgactagcaagtctaagcctgtagagttacctagacccaaaaatccaaaacaagttgagcacaagcaaaaccagagacaaaccaagcctgtagagaaaaccaagtatgagtgcacctattgtgggaaagctggtcatttggtaggtttctgctttagaaaggctagaaaagagcgacaagaacgtcttaggactagaagagctactagagtccctgagaggttcgagtgtgcgtgtcattgtcgttcaagtggtgtatctcgctttcctcgccgagatgtgcaccctcgacgtgacctagcagggttggggcaaaacagacatggtcatcttgcatataattctgctcataacactaaagatgcttgtacttctcgcatgattcagtactggattcctaagtcatttttcactaaccccagtactgaatcatcgagatctgctgtgtctttcttgtaggattttggagtagggagaagtaattcttggcttgtggactccggttgctcacgccacatgaccggtgaagccaagtggtttacttctctcactcgtgcatccagtgatgagaccatcacttttggggatgcgagcagtggacgcgtgatggctaaaggaacaatcaaggtcaatgacaaattcatgctgaaagatgtggcactagtaagtaagcttaagtacaatttgctctctgtttcacaactctgtgatgaaaatctggaagttcgtttcaaaaaggacaggtctcgagttcttgatgcttctgaatct

SEQ ID NO: 6213 - DNA, 3201 bp, Oryza sativa
agtatgaaccaagtcatgaatatcaagttagtatcgccagcaagcaaaaagctttcaagtgaattagtgatttagtgtgcaaagctatttctagaagaagcttaaaaggaagcaaaccagctcataatcatgcaagatttacataaacaaagcaatgaacccatgctaatgtgctaatgcccagttcataaagagtatcaacatgataacaaagcatagaacatgagcttttaatcttttctcatgacttttatttttatgatttttttttaatttctttaaagacaatagcacaatcacgacggtccacctgatcttatcagtcagcaagtgatggttgtgccaaacactgccgtctgacctcaatcaagttttccagctagagttcccattacaggctgtctcagtgctatcttcggcactactcatgcgtaaacgcactcagtagcccggacaaaaacagagataaaacttgtaaagcatgattgatacaaagtatggacgcataagcatgagcattcataagcatgtactgacagttattgcgaaaagaatgtaaacatggcatgagtatgagaaggatacttcaatttaaacaaacttctagagcaagcattgcacattgattgagttcaaatgaatagttaatttaagcaggtttcaacacgcttgaacagcataacatgatcacacaagctacttaagcaaatgaaagctagacaagagatcaaactagcataagagtgatacatccatagcatagtgatgaccaagagataacaagcaaagctcaattgaagagtgtataatacaatgcataaagtaaacatgatgcaatatgttacaaatgcatgcaaaagaaaaacaactccccctcaaatcaagccataggggtggatcacccctaactcactccgcaagaactcaaaacgagagcgatcaagtggttttgtaaaaatgtctgccaattgtttttcagattcaacaaattctagcacaatggtacctttctcaacattgtctcggagaaagtggtaccgtatctcaatgtgcttggtcctggagtgttgaactggattttttgcaatattgattgcacttgtattatcacaaagcagaggaacaccagagaaagacagaccataatctttcagagttgaaatcatccaaagaacttgactacatgcactagcagcagctacgtactcagcctcagctgttgattgagcaacagaagactgcttacgagaggaccaagagaccaaagaagtgccaagaaaatgacaagtgccagaagtacttttgcgatcaatcttacacccagcaaaatcagcatctgaaaaagctcgaactgaaagggcagaagagcaggagtaccaaataccgtactcaagtgtagacttgatgtagcggaacatgcgcttgactgcttggcgatgtgatgttcttggagaagcctgaaacctcgcgcacaggcacacggagaagtggatgtccggccttgacgcagtcaggtagaggagggagccgatcatgcttctgtactcgcgctggtcaacttcttcaccgtcctcatcaggaccaagcgatgaagtagttgccatgggagtggcgattggcttgcagtcggccatgtcgaacttcttcaggagctctttggagtacttggtctgatgtacaaagattccttccttggtttgcttgatttgaagtccaaggaagaaagtcagctctcccatcatgctcatttcaaattccctgctcatcacatcagaaaactgggcaacaagtgcatgagaggagccaccaaatatgatgtcatcaacatatatctggacaagaagaaaatcaataccactatgaagagtaaaaagagttttatcaacagcccccatttcaaaaccattttgaagcaaaaaggttttcaatctttcataccaggctctgggagcttgttttaaaccataaagagctttttcaagtttgaacacatgatttggaaattttggattttcaaaaccaggaggttgtttgacatagacctcttcctcaataactccattcagaaaagcacttttcacatccatttgaaaaagcttgaaaccttttgaagcagcaaaagccaaaagaattcgaatagcttctaatctagcaactggtgcaaaagtttcttcaaagtccaagccctcaacttgggtgaaaccctgtgcaaccagtctggctttgtttcgaacaattgaaccatcttcacctagtttgtttttgaaaacccattttgttccaatcacattaaaacccaagggaggttctaccaaagaccaaactttgtttctttcaaaattttctaactcttcatgcatggcattaacccaattctcatcagataaagcatgacaaacatttttgggctcaaaagaggcaacaaaagctgaattgacaagttcataagaccgatttctagttaccctttcacccaggcctccgatcatcgagtcaggcggatgtcggttctggatgtgtcggggagctgtcggtcctgatgtgccaccatcaatctcctcagctgctgaagatgatgtagttggtgcatctcctgaaggtgatgtagtcgaaggagaaccggtttcttgcactggtggtgtactgtctagaggtggaggaatagaatcatcgtcatcatcatctgaatcctcatccacaaagatgctttcatctggaacacctgaaatttctggtctagctcctgggctagcctcatcaaaagtgacttcacaagtctccacaattttgttggttgaaagaacataaactcgataagcccgagaatgagtagcatagccaaggaaaatgccatccaatgatcgagattcaaacttgtccaaatttccagatttaagaacaaagcatttgcaaccgaagaccctgagatgtgaaacttttggtcgacgaccaaatctgagctcatatggcgtcttgtgcaagatagttctcaaaaacacacgattggaaataaaacaagcagcagaaatagcttcagtccagaattttcttggagtcgtaaactcatcaagcatagttcgtgccatctccacaagggtgcggttcttcctctcaaccaccccattctgttgtgggacatatggcgaagaaaactggtgttcgactccagaagaatcacagaaagattcaaatgcagaattt

SEQ ID NO: 6214 - DNA, 11496 bp, Oryza sativa
ccgtcatgtcgacaacagttagataggctactccaaatattgtactggtgtgattatcatgaataagagcaataccggcttcggccaacaggatgtagggttattacctgacaattcaggggcccgaacctgtataaaaatcctcgtctccatctattttacctcagtctcgcatatatcctagcactgacaatccacataccatgtaataccagaattgcgacatcaaacgccgacagtggcgcgccaggtagggggattttggtgcttcaggatttcgacaagatgggttcaaaagatggattctccgacaacgagctactcgacgacttcagctgagggggagatccaacctaaccagatcggagccatcatcgtcatcgacaacttggtctatcgagatcatccaagcctcaagctccgcggcgtaccaaaagatgtcagatcgcatgatatcgaacgagtacgcaacaaggtaattggtagattggttttttaaattgatctactaatttcgtaaatacatccggcatgtatctacaaaggtacgcaatattttatctgcaatttatcgtacctattcagatcatacagtattgtcagatctataatttattatgtttacccagagcatgttctttatacaataatatttgttgcgcgggtatccccgatgttaaatcgactacgatctaacgctgggggctcgctctgtctttttctgtataaatcatgcttgtttacggtttacataatgccctgacatttacatctgctcgttatatcctgataatactagaagatccatgcagtttttgagtacatactcgatattatctgctatatgtcttgtcttctagaaaatatttttcaggaacaattgagcactcgagtaggttgtggtcaagtacaccgcattatcgagaacgatctcaacaaatgcagagttgtcgcgcccaacctaccaacgaagaccgacgacctatctcatagcaccggccatggctggactactcgagaaaaggttgttaacggataattcctcgcgaacaccgtcggcttggtcacccgacatgattgcgaacggacatccagatatgctacaagttgggtgtgtgagtcatgctggccacatgagatgcacataacccaactctagcgcctccattggtgttcgagagataattctacatgttcgctggttctcgaaccagcacgtagcaatctcttgcaccgccaacctctattggtgtccgagagataactctactcgctcgctggttctccaaccagtacatgacatccctcgcaccgcaacctccattggtgctcgagagataactctacatgttcgctggtcctcgaaccagtacgtagatttctctcgcaccgcaacctccattggtgtccgagagataactctactcgctcgctggttctccaaccagcacgtagcaatctctcgcaccgcaacctccattggtgtccgagagataactctactcgctcgctggttctccaaccagcacgtagcaatctctcgcaccgcaacctccattggtgtccgagagataactctacacgttcgctggttctcgaaccagtacgtagcaatctctcgcaccgccaacctccattggtgttcgagagataattctactcgctcgctggtcctcgaaccagtacgtagcaatctctcacgccgcaacctccattggtgctcgagagataactctacacgttcgctggttctcgaactaatacgtagcattctctcgcaccgccaacctcattggtgtccgagagataactctactcgctcgctggttctccaaccagtacgttgcaatctctcacaccgccaacctccattggtgttcgagagataattctactcgctcgctggtcctcgaacctctcgcaccgcaacctcagatggtcgaggtatgactacagcaataacgtagcagtcctcgcaccacgacttcaaatgatcgagagacacctactcactggttctcaaccagtcaatcgtagcaatctctcgtacatttacttctagtggtcgagtttagactacatctagttctcgaccagcggtgtagcgattctcccactatttctacttctagtggtagagttgcgactaccacctggtcctcgaccagaggtgtggcgattcttccattacctctactccaacaaagttgacatcagatacacaatatcgccaagtgttttacccagagatcccttaccacaaaagacacatagcgttgaaacctatcctactgttcctttacgccgtcttgacaaggcctccgaggaacctaagggaactttggctggggacgcccagagccgataaggccttgtcggattcttcagagacgaaagaccatgtaagatctggtcgtgtaagagttctcgccgtgcgtattaaccaagccgtgtaatcggaaatggattttccaacttcatggctgggggctaggatcagtgcttgttcaaccgaggcaggtcaaaggtccaagagccttgtcatccgagaacgattctccgacgacaatgctgggggctagggagagtgtatgactctacaaactgactgatcggagtcggtaagagataagacactcatatacaaaacactggtctgtacattcaattcactagtctgtcatattataacatgttaccctttgagcgttcgctcgggggctatttctatctaatattcttttcttagtattgattttaggaaaattctattcgacattatcgaagatcgcatgtctctatggttctacaccaagatcaactaaggcgaatacgacaaatgttgacaaggctctgtcgcagactctacgcctactcgattactcgagaacggttcgtggatctcgacgaggaatacggaatgaagagatggtgtacccgccgagataaaatttcttgacttcaatccaaattctcgattgcagcaagacgggagacttagtcatacgctctgtactttctcggtcgacatcagagattgacttagacaaaccctttcggtgcccgcacgaggctgataaaggaagtctaacattatctctaaactcaccgagaacggtcacgtgagctcgataatagttcctccaaagtctgcggttgagaatatgaactcgttcatttgcatcgaagtcgggggctactgtcagggttatggataccacatacctaatagtagttgactaaatctcggcaggatccaccacataccatgttttatacggaaactgacctcgagggagttccggataaggaaagacaaccagagttctacatggaaacgacaatgactactcatattgtatccatattggttttcctagttctacttggacaaggggacacctatgggtataaatacaagcccccctaggaggagaggggacatgagagaatcaacacccaccatggaggatcaacacccaacacaatcgacatagaagccacaacatagaagcctacatacgccaagacacgccgccggatattgacttcagggataagcacggctagtaccctacggtgtctccggatactgtcaggagagacgaaagcgccatctctgatctcgccgggcacgaattcgaggaggaaggctaccctgttgtcgactacgagttagatcgtcagaccgtcatgtcgacaacagttagataggctaccccaaatattgtactagtgtgattatcatgaataagagcaataccggcttcggccaacaggatgtagggttattacctgacaattcaaggcccgaacctgtataaaaattctcgtctccatctattttacctcagtctcgcatatatcctagcaccgatgatccccataccatgtaaatactagaattgcaacatcaaacgtcgacacttttcctgttcttggaattattcatagctcgagcaattctgttagcaaccaaagccaaatcctcctcctcgatttgttcgagttgatcatcggatgtggcattaaaaacagcaagaaaagaaggcttagatgaagaagcatcaacatccgaagaggaagacgaagaaaccaaagcactcgacttagaatcaacttttcgagaaagaacattcatctcatgtgttttcaattttgtgtaaagtgaatccaaagtcaaagtagacatgttaacagactcctgaatagatgtaactttcatcttccaaatagacatgtcaagatcattcaaaaagtgacgagaaatctcagattatggataattagcatcataagaagaatcaacagatctaagatcactcaaaattttattaaacctagaaagatagtcatctaaagcttctccaggtttcatctcaaatttaatgtactcctttttgaaaagatctcgacgaagttctttaatgttattagttccttgatgaaaattactcaaaacattccaaatctcatgagcagtttgaagatgagcaacacgatcataatctgaacgagaaatcccactcaaaagaatattgcgagctttgcatttttgttcaaacttagtttttaaagcagcagtattaatctcttcaggaatcacataaggacgagaaacttttctccaaatatcataaccttcagccataatataagattgcatcctactacaccaatgagaaaaatccgttccatcgaaaacatgaggcttagttgaaaacctagcgggagtagccatgacaaaaactctagatcgataaaaatccaaagaagaaaacaaggctctaataccacttgtaggatcgaaacacaagaactaagccaaccagagggggggtgaatggttggtatacccaaaaaccgaaaacttttagcggaaataaaagttaccctcgaaattgacggaagtcagtctgaccggtgttgatcttctggttggaccgccctggaatccctgtcgcgcctgttgtcgccgccggtctgaccgcaggtcacccgccggtctgaccgccgtaatgccgccggtctgaccaccgtgtgtcgccgattagaccgcaaaaacccagtgaaacacaaatcgaagaactctaaaagtggatgacgactttattgattctctctgtgtttacaaagtgcaccaacagcactccttatgaaaattttgactaaactcgaaatcctaactcaaaactcaactcaattgctctcaaaagcgataccgggaagcctcacgctccccctctatttatacatgaggtaggcagcctaaagccatgaaccaaactcatactaagagtcctaaacaccttaggaaaccctctagtacaagaaacaaactttacataaccaatcgtaccaaatttggactccttccaaattcgtctccgcatcccatacgcacacaatacctccatcgtatgtcatatggaatctccatcaaccacgtgcatcaactctagcctaagtatcccgcatgatctctaaccaccacggacgtcgtcttatccccaagccgactcccgatccatcaccgcaaatactctcccgaggcatcaagtcacctacacatgaaataaacaatgaaaccatattccgagaccaagctatctccaacttgactcattagtagcaaacaacagtattacatacgtatagtatccatctagaagtcataattatgaaataatcacggatatccaaacaaacaacccgaaactgaaaccgacacagcgtcggccggtcagaccgcgggctggcaggtctaaccgcgcgcataccgccggtctgaccggctatcagagcccgatctaaccaatcacataaaataatataatcctgcgatcacctgtgaatccaatcgtctccaaaaccacttcgtgaataaattccaaataacaaaaccaataatctccaatgtccaattgttcatcacagaataataatcaaaaacacctttgattttacaatatatcgtgttcttttctcctgaaaatgaagatgaagattaagattaagttttttacgcaaaatgatgtgatattaacatatcattgattgtgttttagttattacaaacttgataaatagattaatataatattttagagtaactttcatatagaaaatttttgcacgaaacacaccgtttagtagtttaaaaaagcgtgccacaagaatcttaatcttcatctaacttttgttggagaaaagaataggactactgcatgagctcgggctacttttaactattgctataagttccaaccatgatcaagaattcaagatatgtgcctatgagcatggaagaaatacgctagagaggataaggttacaatcaaagtaggagagaagctctcaggcgtggaagaaaatatctcattaatgtggggaggagaagtgcttgctgatgggaggtaacatggctctaagagcaagttgctgagatggaggagataagagaggagagagagaagaaacggactgtaaacttagaggcggtttagacacaagaaccaagaaactctgtaagagagacaagtgggtctatattaattgtaaataaccttatagccaacaaatcggctgtattactagccttgctttaatagttcagcgattctagaacgacttacgagaaataaggctacctagtctaataattacccccctccattttaaaatataaacataatattaaggttagaggaaagaattcagtggatgtgcacactccttaagaaataatttggctaaagaacaaaagcaagaaacttagctacaaaactaaaatcatctataccgaaaccttgcttttgatgtccctattggaaccttgatgctttgttatgctaaacttatatttaatactaattacataattacttactcttcgttccctaattgttttgggtaccgatgaccactctgaacaccctagctaggtccgccccaaaagaaaaaaaagatctcactttactcacctcaatggttaaaatttaaattttgaattacttgtactttcgtcctaagcacttgattgactaaatatttacggattttatgccctagaatcaacgcctcaaaaatatttatgttgtattatttattttcaaattaaaaaaataccatatcacgcgacttaaagtaataaaacctaccctaaaatgccattagaagaacaaagggccatcgacccatcgtagggagagaaaaaaaacagtttgctactcataatttgatactaacaaggatactttggccgagattagtttcaaaatttttcttcaaacttctaatttttttatcacatcaaaactttcttacacatataaacttttaaatttttcatcgcatcgtttcaatttcaaccgaactttcagttttagttttagtgtaaattaaacacaccctttttacttacgtgcggcctctattccctcccgctttatcgcacgtcctgtttcccggcctgcttcctcgcgcgcgcgcggtcggtgagcgaccagaagaggttttgatgccatggctgaaactgaaagcgtgacctgacctcccaccaactccccccaaggcggggctagtcgatcgagccatccgattcattcccatgacccacgcgcggcgacaagtcggccggtgatttcaccgtaccagctgcccccccttgtagtatcacgttcgaacggtgcgcccgccgatcgagcttgcgctcggtgcgccagcgcgcaagaaaatcgccgcgcgacgaggcggcacgcacgggatactgcgccgcgcgcggcttccgctcttccgcggtgggatccccaggcgtccgccgcccacaacgacaagttggcacggctgcgcgaaggaacgaccagcccagccggcaggcagcatagcagcagacacgggcggatttcgtctcggcccgcgtcagggcccggctgttcggcggatgtcgctggctggctcggtccatgcaaacaagtggaaagtggcctatatctggattgagcctggccttgtcaacaagataggccttgtcgctggctcggtccatattgggctttcgggtgtgacatggaagttcgattcttttcttcaagtagaactggtggcactgttaaaaagacaacatgtttttttattgatcatttgcttctacccctggggacagtgtatagcataggttgttcataccatacggttatatgggaaaatatataagtgtaaaccatatatataatgtaaacccgaaaactatcgtacaataaaaaaaatggacgtctgaaattgtccacgttaccctgagtgaaaaaattattttcagatttaaccatagtaaaagttttaccatgacatggataagcattagatgcccatatttttatcctactatagtttttttttgtaacatatatgtgatttacaatacatattttccctcaattatataatgctatgaagaaatggtcatatgtctaaggatagcatcttcacggtggaaactgaactagagaaaatgaccgtttacgttctttatgaagaatataacatggcatgttcaagacaatatgtacattgtgtgaaccagcagtttactgtttatttttttagtgcaacgaaaaagggctataatcttttcagggtagggcaaatagagaataaataacatttttttccttgtgaattactcctatcaattactttacttcgttaaattcagaggaaacataaagttgataacattgagtatttaatacaaacacttcataaaccagagaaaagatcaaaattatggcatgaaggaatgaactttcagaagtcagaaactgtgagctatagatagactgatagagacattaaacaacaattaatttcatgccatctaaatttgagagactgttgccattacattacaactaagtgatagatatactcaagacaggacttggcatttgaaagtcaagagactggcatgcaaattagcaatgctcaagacagcatgtacatttgaaagtccaagaaactgaacatcactacatgctacttctagagacttttgcagattagcaatgagtaaatggagacaataactcagaccaaactgcaatattgagacctacaatgaaacaaacataacatgtattttacacgattgttacaaattcgttcgccccatgcttggcccagaaagtcttcaagtcaattggaatagcaaggttatacccctcaccacttcaccagtcaccggctagcttcctccttccagcaatacatgcaccccatgtttagttccaaagtttttttttccaaacttttaactttccatcacatcaaacttttcatacacacacaacttttctatcatcgtaccgattttaaccagacttccaaacttcagtgtgaactaaacacacttcagtgtgagtcattggtagtggatatgtcgaaatagaagttgtgcaacatgcaaactgccagccacctgcaccccaacgataccattgctggggggatcagtgcaagagctgctagcacacaggtgttgctatccttgaaagatccaaatcaataaccattaattaccatccccacagtcttctcgtggatgcatgcatgttatgtttgaagctttaccaaattttggtgtggtttttaaagagtgaaagtttctacaagattccaaaatttaggatgtattgatggttgaaatattttttgttcgctgataacgttgatttgggcaacaaattaaataggcacagtaaatactggagtatttgaacaactttgtggtaatccttgcacacaagtcataattcgtaatactccccttttctcaaaaaatagcaacttagaccgaagaagacatcacttagtagtataaatctgaacaaactatcagttatctactcacgtaaaggtgattatccagatttatagtattagataatgaaattgctatatatttatcgacaaattttctcttataaatttattaaatgtaaatacaatataattgtaattatattgtaacttttatgcaactatattctatcttttatgtaactgcaatgtaaattgaatgtaacttttatataattttaaacttgtatgtaagatatgtgtaagttagaaagaaaaaaattcgtagcgcgcgtgggagaggagattcggtctcgcaacctcctcttcatgaaaacagcgtgttaccataggagttttgaaagctgaatagaaattgtattatagtacaatataattgacaatattattatattataattatactgtatttatatctgataattttttatcgataaatgtcctagtctccattccaaaacaaattaacttctaaagattaatttgaataagcatttattcatttaagtttgtctcaaaagataaacaaagggcgtatattcagtaggtggagtacgccgatgttacggcagttcgggaatgtacccgcagcttctagaaccctccattctccccacgtataaggccgcgccccgcgatccaagcagcagcagccatagcccccgccagctcgccgccgccgccatgttcggcgtcgtcttcccggaccacagcttcccgctcgacgtcaccgccttcgcgcaggtggcgcccaactcctgggcgctcgacctctccacgctctccctcgccgccgccccgcgctccgccgtcgtcttcctgctcccggccgccgccgccgcgctcccgccggggaaggccgtcgccgtctacttccagcccgccgccaaccgccccttcgcgttcctcggcgcgctcggcccgggccgcccctccgcgagcctcccgctcccggaggccggcgacgaaccggagccccccctcggccccgccaagctcggcgtcgccgtggaggacgcggcggcgctccctccgccccccgacgggcagcgcgccgagcgtgtcgcgctccgcgtcggcgagaacctgttcaacttcatgcagtcgttctgcggcgccgacggcggcaagctggtggtgcccacggacatcctcgaccggtggttccgcaagttccaggagcgggccaagaaggatccctcgtatctcaagacattcgacttttgagagcgaaggtacagaacagccttcccggtttgcatcgattcttcctgtaatcctgttttttttttctctttttgttcccctttggtaccaaatcgtcaattgctaatgtaattagtagttagtgttacgatgctacagtacaatgcttgtaactaatgctagtcttagtgcagtaggactaaaattagttttagatcatgatctcacattctcacagacggggacaatgttggagattttataagacaatgtagtggactagtggtgaacatggtatactttgggtatgcatgtaccggtgtatcctagaggcccaaattgaatccttgtgtaggccttgtcggttatacaaggattcaattcggccgggaatgacaagtatagtaagaaatt

SEQ ID NO: 6215 - DNA, 1867 bp, Oryza sativa
cagcgagcgagtagaattatctctcgaacaccaatggaggttggcggtgtgagagattgcgacgtactggttggagaaccagcgagcgagtagagttatctctcggacaccaatggaggttggcggtgcgagagaatgctacgtattagttcgagaaccagcgaacgtgtagagttatctctcgagcaccaatggaggttgcggcgtgagagattgctacgtactggttcgaggaccagcgagcgagtagaattatctctcgaacaccaatggaggttggcggtgcgagagattgctacgtactggttcgagaaccagcgaacgtgtagagttatctctcggacaccaatggaggttgcggtgcgagagattgctacgtgctggttggagaaccagcgagcgagtagagttatctctcggacaccaatggaggttgcggtgcgagagattgctacgtgctggttggagaaccagcgagcgagtagagttatctctcggacaccaatggaggttgcggtgcgagagaaatctacgtactggttcgaggaccagcgaacatgtagagttatctctcgagcaccaatggaggttgcggtgcgagggatgggaacgtactggttggagaaccagcgagcgagtagagttatctctcggacaccaatagaggttggcggtgcaagagattgctacgtactggttcgagaaccagcgaacgtgtagagttatctctcgagcaccaatggaggttgcggtgcgagagattgctctgtgctggttggagaagcagcgagcgagtagagttatttctcgaacatcaatggaggttgcggtgcgagagattgctacgtgctggttggagaaccagcgaacatgtagaattatctctcgaacaccaatggaggcgctagagttgggttatgtgcatctcatgtggccagcatgactcacacacccaacttgtagcatatctggatgtccgttcgcaatcatgtcgggtgaccaagccgacggtgttcgcgaggaattatccgttaacaaccttttctcgagtagtccagccatggccggtgctatgagataggtcgtcggtcttcgttggtaggttgggcgcgacaactctgcatttgttgagatcgttctcgataatgcggtgtacttgaccacaacctactcgagtgctcaattgttcctgaaaaatattttctagaagacaagacatatagcagataatatcgagtatgtactcaaaaactgcatggatcttctagtattatcaggatataacgagcagatgtaaatgtcagggcattatgtaaaccgtaaacaagcatgatttatacagaaaaagacagagcgagcccccagcgttagatcgtagtcgatttaacatcggggatacccgcgcaacaaatattattgtataaagaacatgctctgggtaaacataataaattatagatctgacaatactgtatgatctgaataggtacgataaattgcagataaaatattgcgtacctttgtagatacatgccggatgtatttacgaaattagtagatcaatttaaaaaaccaatctaccaattaccttgttgcgtactcgttcgatatcatgcgatctgacatcttttggtacgccgcggagcttgaggcttggatgatctcgatagaccaagttgtcgatgacgatgatggctccgatctggttaggttggatctccccctcagctgaagtcgtcgagtagctcgttgtcggagaatccatcttttgaacccatcttgtcgaaatcctgaagcaccaaaatccccctacctggcgcgccactgtcggcgtttgatgtcgcaattctggtatacatggtatgtg

SEQ ID NO: 6216 - DNA, 5689 bp, Oryza sativa
gtgcccagccgcgccactcaaaccggcgcgcctcccgttgcatcccgcgcgcgcgtgccgtggtggccgaccgcctggtcgccgccgccgtcaccctctgccgcgcctgcccgcgcctgtcgcccgtgtcgccgctccgctccaaaccgccccgccgtcatcgccgtcgtcatcacctcggccccgccactccgcgcgcaagccgccaagggacggaggcagagcccctcctccctctgccgcgacgcccccgctcccctcctccttttcccaaagaagcaaggggcgagccccctttctctccctccttttccccttttcctcccgccggcgtcatcctccctccgccctgtcgccgatttggccgcaagcgccgagcgccagctcgcgccttgaccgcccaaagtaggtttccaaaccgacattgccgccctttaaacccaggcgccctcccttcctctttcccccccaatcctccccgtttctcgtccgcgccattgccgccgccttccgagctctgtctcgcctccgccgttcatcgccaagcgccgggagagccggtgcgttcgtggacgcggaaggggactctgggcgctcgtcttcctcctcttccccggcccgaggccggagagattactcccgcgccgtcggcctctcgtcactgcgccccacctcgtctcggtaatgcctccctctgttcttcctcctcgctccatctccccccttagttttcggtagtagcacgagtagcctccccgtagctagccggcgccgccccgaccgttgccgccgctcgcagtgtgctcgccgccgtcgccgcccgtgctccgtagtacccgctcgtcgccgacctcgctcggcgtagctccgcccaatccgacgctagcaacggattcccgtagctgcgtagatgctctcaccgccgggaattggcccctcgtgacctcgtcgccgtttccccctttcctctccgccgggcgccgccgccgcaatccgccgccgacggactccctccggcgaatctaagccgttggctcgctccctctctttctccctcgtcatcccggtgtacgccccgtcgccccccatcgtcgcaaggcgtcccggagaaaccgccgccgcccgccgtccattcgcggccggcgccttcgtcttcctcccgccagcccgtgtggcagccacgtaggcgacacgtcggcgccagctcggccgagatcggatcgggccgaccccggtcagcccctctcgtgcgcgcgttccaccgtgagccgtgaggctgcgcgagggcccgccgcatccgttccaccgcgaaccacgcgcgtgcaccgcatcccttccccgcccgcgcgcgtgcgccgcgtgctcgctccgcacggtgaaccgtgtcatcgacaagcgggtcccacccgggaccacgtgtggtgagcccggtccaccggccctctgtctcctcccctcccgcgcgcgcgctttagtctattttccctccctcttttcttttcttttcttttctttttcaaaaaggatttaattaaatccttttcctttagaccaaaaatccaataatcttagaaattcaatatcttcccaaccgtaaatccgtttgactccgttcaacttccaaaattcctcaaatctcgagatctatctaatggcacgcttagaggtcattaatagggctttatttttgatgtttgttgagttgtcccgtttcgcgtgtagtttcggagcccgaagacccgcagtgcgaggatttcgaggatcaagctccagatctcgagcaaggcaagccacctttgaacatcttgagcctatatttgaaatttaattatgttgcttgaaaaatattatgcattgataggatcgcacttaatctgttgtcccgtctgcaaggcagattggcggacctacctaatttgttgcatttgatccttcctttgttaattgatatatcatgtccccttgtaaccatctagttgcgtctcgatattcgtgcaccctgtgcgagtatcgacggacgccttcaaacttaaaatctgagtaacaacttgggtaaaactagggttttacaaaagacttggaaaacccgacacctgggtcggtgcttgcgaactaaatgaatttccaaaaccgcggaccggggaacgtaccgggtgtacggtttcccgctcttgcacttaaggaccgtttccttggaatttcatccaaacataagacaagtacgaccacatgggtgaaatgggacacccctggctgagtaactagcttatcaggggagccttgatgccgagagacatgtggattcgctggggtggtgtcggggaggaccactgggcttcctggcacagtagggtctgggacctaacctgttgttggtctgggacccctctcgtcggcatatggtaaacctgtgtcggctttggaaatgccttgtcatgaaagcttggaggtctcccgacgtggctgattcccacgggctgggtgatccgggttagtaatgtcgtgtgggtaaagtgtaccccccctctgcagaggttaacaaactgttcgaacagccgtgcccacggtcatgggcggatgtgaggtgattcctagcgtagttttgtttgactactgcttgtgaaattgctgttgtgaaaaggggttcgatgtttgaaaaatctgcagctgacgggatcagctaggcccgggtggccgtttgaaagttgttggcccgggtggccgtttgaaagttgttggccgggtgccaatcttgatcaattctaaagactgatacattgtacaaactccgaccggacgagacgcactgtctcatccgtgtcgtttgagaagcactcacttagttgttttcagaaaggagttcaaataaaatcaattgtaaaaacaacagcctttccttgaagcctgcattaaacacttatttcccatggcttgctgagtactcccgtactcacccttgctctatataaataatcccccccagttgctgaagaagatgaagtggatcctgctgatgaggagttcttccaggagcaagccggctacgatgagttttagggtttcggcctagttcccaagtcgcgcctgtgttgtttggtccaagtcctggcttccgcttcccttttgtaatgcagttgtgagctcgggatctgtccgcagcccaacatgactgtacctctactctataataaagagacatctgttgctgtgataatctgtcttcttgtgataccagcactgtgtcctgggactggtatcgattaacaggttaatttggagcgtcacgggctagttccggtcggtactagttcggggcgtgacaaagggctgcgccgcagtacgccgactcctgctccggtgccacgggggagctcgccctcatggaggacgcaatccaggagatggagtcggggggcttgacgccgaaggaggggacgacgtggacgcctgctccgcgcaacaaggcggcctccacttcttcgctcaccagcgaaagctttgctgcctctatctgagcacagggaggcgcctcgcgctccccgccgtggagctggggcgcatcctccagcgcggggccggggttgagtggcgagtggtggccggcgcaggtgaggggccccgtgtgcgggggaggcaagtcgccccgggcctggcgcttgggcaacggggatggcgagggaggcttggtcgccttgcgcatgggattgggcttgctgcgacggcggtaggtggtggtggtggcggctggtggcaagggattaggctccattttggtgtcatcggccggcaaaattatttatgtcagtccgccggcttctggccagccctcaccaccttcaaggtccgcaccgtggccttctccatcaagtatcagtcatcaaccctcgggggtatctcggggaatcacgactgatactcacaagtatcaggcctggtacccaggtatcaaggtctaatacctaggtaccagccggtacccaaggttttagaggagcgcacgtggaagctcacctatacagaggaaaggaaggggaggagtcacttaatatttagatcccacccgaaaattttataccttgtcacatcgtacgtttgaacacctgcataaagtaattgcacatattgtgactactttgtaagacgaatctttaagcctaattgctccatgatttgacaatgtggtgctatagtaaacatgtgctaatggtggattaattaggcttaataaatccgtctcgcggtttactaacggatactgtaattagtttttttattagtgtccgaacaccccatgcgataccctatataatacccgatatgacacgctaaaactttacaccactgaatctaaacaccccatattcattttttgcaatggcccaatggactgcatgtcagcacggttgaacccctggcgcccttgtcttatccttctactctactctccaccagaacacgcacttcccctgacaggaaagcatccagaagctttgcaaggattttcaaggcgatgtaacacttacacagtggcattggttggggccccccccccccccccccccgcttttttttttttttgacaactctacggtttccacttgtatttgtatatgacattaccttgtacttcaaagttcatatctttcaatcatgcaagttcataaggtttgctccttgcacggttaaactgccatattttttgtagaccaatgttgtcattgctctgaactcaagctcaataagttgcatactcagcttcgagtgcttttgtagcgtctggttggcacattgcgagacatcatgcgacattggactacctgtatggctgtagcaggatattttctagggaaggcaaagaagaattcagacttctctagaccgcttctttcctctgccaagttgcagtctcgcagaactgtcttccttgtttgctcagcatggttgtgacttgtgagaggcagagagggagttgacctaagagccagcctgaagattaggcagggcctaccaacttgccattcttcagacaaatccacttgcacaatctgataggagtcttgtctcctgtaaaaatatgctcgtaatctcgcctgatgtcaccgatgaaagatggtatttgtcatgtacatgctatgccattcaatatggctgaaacatgtatagtaaaatgaagctctcgttgggaacacataaaaaagaatgcaacttgttcgtgagcttcatctcacggctgatttgctgatgtgattgttgagggattaggactgcaatattcactaacaagaaagttcttttgtactgaatggactttttaagcttgatgattaacacaatatagaaacattatctagttacttattcatatgtccatcaacggcgctctgttctcatcgatctaatgatttcgccatttcccttgaataaaattggacccatatggtttagcaggtgttaggtgatgatgtaagatgattgctaatttcttttatcagaaacgataagagcttaatgtggttatcaagtggaagcatggccagtggtccagtgctactgtaatttagttatttcttttttgaaaaaacttgatttaattactttctgtgctgagaagaatcttctgggataccccctggttaggaccaaatatccattattcatcaatcaaactgcagagtgaaaggtgaaacta

SEQ ID NO: 6217 - DNA, 13610 bp, Oryza sativa
cagaatcaccacaagaatcaaaaactttatttccagttttcttaaagtgaacctcaaaattttgattaacaatttgtgaaaccgaaagcaaattgtactttaagtcctcaaccaaagctacattcttcaattcaaatttttcatttaccttaaccaaacctgtagcgagacggcatttgtagcagcatcaccaaagataatcgattcagtcttgcatgcctttttgagtgaggagaaccaatttttatcaccggtcatgtgccgcgaacaaccggaatccacgatccacacgttctccttccttaccaccaaagcctacacacaagcacaagtcgaagcctcagtactggggttagatgataataaaaattaatttaggaatccagtactgagacacatgaccagaagatccaataggcatatatccacgtgcaaaatcaatttttgaattttcagaaaaattcctccgaggccggtctgaccgaggtacagtggccggtctgaccgggggccggtctgaccgcctctgtaccgccgtctgaccggtgcccggtctgaccgacgctcagtagccggtttgaccggtcgccggtctgaccgcgggacccactgcggtctgaccggtttcttcgagggaaaaccatatttttgccattttgattttgcaaaagcaatctctctctcctttttctgtttatgagctaatctgaaacaaaaaccaacaatatgtccatctttgccacaaaaagaaaagtatatttctcacgatgattagacacattggtagaattagaagatttagcaacacaaataacaacatgagatttagcatgcacaacattggattttgaagaagatgcactcataatagacatgataccagtagatttaaacacagttttattagtatcaggtttaaccaaaatctcaccacttctagcaccaacacctaacacaataggaggatgtctagaattatgagcataaggattaaaacctaaaccacggttatgtgtgctaacctttgattgatccaaaatcatattgaggttctttttaccatcagaaaatcttagcaaagaatttttcaaataagaaaccactttttccaaattagcacaattttcacaatctaccatgacacctttgcttttacgacacttggagcaagaaagcacttcattgtttttcacaacatcttccatgtactcaacacgacctaaagcatatttcaatttcaacttattcaaattacatgttgagcaatccagaacatcatgaggttgttttaactttttagcagaaatcatgttaaacatcaaactagcatgaaaagcaatttgatatttttgcaacaactttttagttaaaaacaactcatccaaagtgcgtgtgtgcaaagcaaaactacaagcaagagaagatttatttttcaaatcatgtgcatcattaacatctctaatttttgaaatctcattcattaaaacctcacaattttcgcaatcatcatcattaggaataagagattttaatctagcaatttcagatttaagagattcaatgataaattcctattttctatacatcttctcacacttcttattcttttcactcaaaatattaatagcttcctcaaaatcacttacctcattttcttcatactctgtgtcagattcaccacgcgccatgaagcaaacattggagatgttctttcccttatcatcatctccacttagtggctcgaaggcggtgcaaacttgttgaaaagccttcctgagattctccagcttcctcctttgggatgaaccctttggcttgttgttgttggtcttctcaccatctttgtcttctcttttgcctgtcccattcttaggacaatgcgaacaaagatgatcaattgaaccacattcaaagcaacgatttggaccacctctttttgtcagggttatagataccacatacctaatagtagttggctaaatctcggcaggatccatcacataccatgtcttatacggaaactgacctcgagggagttccggataaggaaagacaaccagagttctacatggaaacgacaatgactactcggattgtatccatattggtttccctagttctacttggacaaggggacacctatgggtataaatacaagcccccctaggaggagaggggacacgagagaatcaacacccaccatggaggatcaacacccaacacaatcgacatagaagccacaacatagaagactacatacgccaagacacgccgccggatatcgacttcagggataagcacggctagtaccctacggtgtctccggatactgtcaggagagacgaaagcgccatctctgatctcgccgggcacggattcgaggaggaaggctaccctgttgtcgactacgagtcagatcgtcagaccgtcatgtcgacaacagttagataggctactccaaatattgtactggtgtgattatcatgaataagagcaataccggcttcggccaacaggatgtagggttattacctgacaattcaggggcccgaacctgtataaaatcctcgtctccatctattttacctcagtctcgcatatatcctagcactgacaatccacataccatgtaataccagaattgcgacatcaaacgccgacagtggcgcgccaggtagggggattttggtgcttcaggatttcgacaagatgggttcaaaagatggattctccgacaacgagctactcgacgacttcagctgagggggagatccaacctaaccagatcggagccatcatcgtcatcgacaacttggtctatcgagatcatccaagcctcaagctccgcggcgtaccaaaagatgtcagatcgcatgatatcgaacgagtacgcaacaaggtaattggtagattggttttttaaattgatctactaatttcgtaaatacatccggcatgtatctacaaaggtacgcaatattttatctgcaatttatcgtacctattcagatcatacagtattgtcagatctataatttattatgtttacccagagcatgttctttatacaataatatttgttgcgcgggtatccccgatgttaaatcgactacgatctaacgctgggggctcgctctgtctttttctgtataaatcatgcttgtttacggtttacataatgccctgacatttacatctgctcgttatatcctgataatactagaagatccatgcagtttttgagtacatactcgatattatctgctatatgtcttgtcttctagaaaatatttttcaggaacaattgagcactcgagtaggttgtggtcaagtacaccgcattatcgagaacgatctcaacaaatgcagagttgtcgcgcccaacctaccaacgaagaccgacgacctatctcatagcaccggccatggctggactactcgagaaaaggttgttaacggataattcctcgcgaacaccgtcgcttggtcacccgacatgattgcgaacggacatccagatatgctacaagttgggtgtgtgagtcatgctggccacatgagatgcacataacccaactctagcgcctccattggtgttcgagagataattctacatgttcgctggttctccaaccagcacgtagcaatctctcgcaccgcaacctccattgatgttcgagaaataactctactcgctcgctggtcctccaaccagcacagagcaatctctcgcaccgcaacctccattggtgctcgagagataactctacacgttcgctggttctcgaaccaatacgtagcattctctcgcaccgccaacctccattggtgtccgagagataactctactcgctcgctggttctccaaccagtacgttgcaatctctcacaccgcaacctccattggtgttcgagagataattctactcgctcgctggtcctcgaacctctcgcaccgcaacctcagatggtcgaggtatgactacagcaataacgtagcagtcctcgcaccacgacttcaaatgatcgagagacacctactcactggttctcaaccagtcaatcgtagcaatctctcgtacatttacttctagtggtcgagtttagactacatctagttctcgaccagcggtgtagcgattctcccactatttctacttctagtggtagagttgcgactaccacctggtcctcgaccagaggtgtggcgattcttccattacctctactccaacaaagttgacatcagatacacaatatcgccaagtgttttacccagagatcccttaccacaaaagacacatagcgttgaaacctatcctactgttcctttacgccgtcttgacaaggcctccgaggaacctaagggaactttggctggggacgcccagagccgataaggccttgtcggattcttcagagacgaaagaccatgtaagatctggtcgtgtaagagttctcgccgtgcgtattaaccaagccgtgtaatcggaaatggattttccaacttcatggctgggggctaggatcagtgcttgttcaaccgaggcaggtcaaaggtccaagagccttgtcatccgagaacgattctccgacgacaatgctgggggctagggagagtgtatgactctacaaactgactgatcggagtcggtaagagataagacactcatatacaaaacactggtctgtacattcaattcactagtctgtcatattataacatgttaccctttgagcgttcgctcgggggctatttctatctaatattcttttcttagtattgattttaggaaaattctattcgacattatcgaagatcgcatgtctctatggttctacaccaagatcaactaaggcgaatacgacaaatgttgacaaggctctgtcgcagactctacgcctactcgattactcgagaacggttcgtggatctcgacgaggaatacggaatgaagagatggtgtacccgccgagataaaatttcttgacttcaatccaaattctcgattgcagcaagacgggagacttagtcatacgctctgtactttctcggtcgacatcagagattgacttagacaaaccctttcggtgcccgcacgaggctgataaaggaagtctaacattatctctaaactcaccgagaacggtcacgtgagctcgataatagttcctccaaagtctgcggttgagaatatgaactcgttcatttgcatcgaagtcgggggctactgtcagggttatggataccacatacctaatagtagttgactaaatctcggcaggatccaccacataccatgttttatacggaaactgacctcgagggagttccggataaggaaagacaaccagagttctacatggaaacgacaatgactactcatattgtatccatattggttttcctagttctacttggacaaggggacacctatgggtataaatacaagccgccctaggaggagaggggacatgagagaatcaacacccaccatggaggatcaacacccaacacaatcgacatagaagccacaacatagaagcctacatacgccaagacacgccgccggatattgacttcagggataagcacggctagtaccctacggtgtctccggatactgtcaggagagacgaaagcgccatctctgatctcgccgggcacgaattcgaggaggaaggctaccctgttgtcgactacgagttagatcgtcagaccgccatgtcgacaacagttagataggctaccccaaatattgtactagtgtgattatcatgaataagagcaataccggcttcggccaacaggatgtagggttattacctgacaattcaaggcccgaacctgtataaaaattctcgtctccatctattttacctcagtctcgcatatatcctagcaccgatgatccccataccatgtaaatactagaattgcaacatcaaacgtcgacacttttcctgttcttggaattattcatagctcgagcaattctgttagcaaccaaagccaaatcctcctcctcgatttgttcgagttgatcatcggatgtggcattaaaaacagcaagaaaagaaggcttagatgaagaagcatcaacatccgaagaggaagacgaagaaaccaaagcactcgacttagaatcaacttttcgagaaagaacattcatctcatgtgttttcaattttgtgtaaagtgaatccaaagtcaaagtagacatgttaacagactcctgaatagatgtaactttcatcttccaaatagacatgtcaagatcattcaaaaagtgacgagaaatctcagattatggataattagcatcataagaagaatcaacagatctaagatcactcaaaattttattaaacctagaaagatagtcatctaaagcttctccaggtttcatctcaaatttaatgtactcctttttgaaaagatctcgacgaagttctttaatgttattagttccttgatgaaaattactcaaaacattccaaatctcatgagcagtttgaagatgagcaacacgatcataatctgaacgagaaatcccactcaaaagaatattgcgagctttgcatttttgttcaaacttagtttttaaagcagcagtattaatctcttcaggaatcacataaggacgagaaacttttctccaaatatcataaccttcagccataatataagattgcatcctactacaccaatgagaaaaatccgttccatcgaaaacatgaggcttagttgaaaacctagcgggagtagccatgacaaaaactctagatcgataaaaatccaaagaagaaaacaaggctctaataccacttgtaggatcgaaacacaagaactaagccaaccagagggggggtgaatggttggtatacccaaaaaccgaaaacttttagcggaaataaaagttaccctcgaaattgacggaagtcagtctgaccgagattgatcttccggtctgaccgaagcgtagccgccggtctgaccggtgttgatcttctggttggaccgccctggaatccctgtcgcgcctgttgtcgccgccggtctgaccgcaggtcacccgccggtctgaccgccgtaatgccgccggtctgaccaccggtgtgtcgccgattagaccgcaaaaacccagtgaaacacaaatcgaagaactctaaaagtggatgacgactttattgattctctctgtgtttacaaagtgcaccaacagcactccttatgaaaattttgactaaactcgaaatcctaactcaaaactcaactcaattgctctcaaaagcgataccgggaagcctcacgctccccctctatttatacatgaggtaggcagcctaaagccatgaaccaaactcatactaagagtcctaaacaccttaggaaaccctctagtacaagaaacaaactttacataaccaatcgtaccaaatttggactccttccaaattcgtctccgcatcccatacgcacacaatacctccatcgtatgtcatatggaatctccatcaaccacgtgcatcaactctagcctaagtatcccgcatgatctctaaccaccacggacgtcgtcttatccccaagccgactcccgatccatcaccgcaaatactctcccgaggcatcaagtcacctacacatgaaataaacaatgaaaccatattccgagaccaagctatctccaacttgactcattagtagcaaacaacagtattacatacgtatagtatccatctagaagtcataattatgaaataatcacggatatccaaacaaacaacccgaaactgaaaccgacacagcgtcggccggtcagaccgcgggctggcaggtctaaccgcgcgcataccgccggtctgaccggctatcagagcccgatctaaccaatcacataaaataatataatcctgcgatcacctgtgaatccaatcgtctccaaaaccacttcgtgaataaattccaaataacaaaaccaataatctccaatgtccaattgttcatcacagaataataatcaaaaacacctttgattttacaatatatcgtgttcttttctcctgaaaatgaagatgaagattaagattaagttttttacgcaaaatgatgtgatattaacatatcattgattgtgttttagttattacaaacttgataaatagattaatataatattttagagtaactttcatatagaaaatttttgcacgaaacacaccgtttagtagtttaaaaaagcgtgccacaagaatcttaatcttcatctaacttttgttggagaaaagaataggactactgcatgagctcgggctacttttaactattgctataagttccaaccatgatcaagaattcaagatatgtgcctatgagcatggaagaaatacgctagagaggataaggttacaatcaaagtaggagagaagctctcaggcgtggaagaaaatatctcattaatgtggggaggagaagtgcttgctgatgggaggtaacatggctctaagagcaagttgctgagatggaggagataagagaggagagagagaagaaacggactgtaaacttagaggcggtttagacacaagaaccaagaaactctgtaagagagacaagtgggtctatattaattgtaaataaccttatagccaacaaatcggctgtattactagccttgctttaatagttcagcgattctagaacgacttacgagaaataaggctacctagtctaataattacccccctccattttaaaatataaacataatattaaggttagaggaaagaattcagtggatgtgcacactccttaagaaataatttggctaaagaacaaaagcaagaaacttagctacaaaactaaaatcatctataccgaaaccttgcttttgatgtccctattggaaccttgatgctttgttatgctaaacttatatttaatactaattacataattacttactcttcgttccctaattgttttgggtaccgatgaccactctgaacaccctagctaggtccgccccaaaagaaaaaaaagatctcactttactcacctcaatggttaaaatttaaattttgaattacttgtactttcgtcctaagcacttgattgactaaatatttacggattttatgccctagaatcaacgcctcaaaaatatttatgttgtattatttattttcaaattaaaaaaataccatatcacgcgacttaaagtaataaaacctaccctaaaatgccattagaagaacaaagggccatcgacccatcgtagggagagaaaaaaaacagtttgctactcataatttgatactaacaaggatactttggccgagattagtttcaaaatttttcttcaaacttctaatttttttatcacatcaaaactttcttacacatataaacttttaaatttttcatcgcatcgtttcaatttcaaccgaactttcagttttagttttagtgtaaattaaacacaccctttttacttacgtgcggcctctattccctcccgctttatcgcacgtcctgtttcccggcctgcttcctcgcgcgcgcgcggtcggtgagcgaccagaagaggttttgatgccatggctgaaactgaaagcgtgacctgacctcccaccaactccccccaaggcggggctagtcgatcgagccatccgattcattcccatgacccacgcgcggcgacaagtcggccggtgatttcaccgtaccagctgcccccccttgtagtatcacgttcgaacggtgcgcccgccgatcgagcttgcgctcggtgcgccagcgcgcaagaaaatcgccgcgcgacgaggcggcacgcacgggatactgcgccgcgcgcggcttccgctcttccgcggtgggatccccaggcgtccgccgcccacaacgacaagttggcacggctgcgcgaaggaacgaccagcccagccggcaggcagcatagcagcagacacgggcggatttcgtctcggcccgcgtcagggcccggctgttcggcggatgtcgctggctggctcggtccatgcaaacaagtggaaagtggcctatatctggattgagcctggccttgtcaacaagataggccttgtcgctggctcggtccatattgggctttcgggtgtgacatggaagttcgattcttttcttcaagtagaactggtggcactgttaaaaagacaacatgtttttttattgatcatttgcttctacccctggggacagtgtatagcataggttgttcataccatacggttatatgggaaaatatataagtgtaaaccatatatataatgtaaacccgaaaactatcgtacaataaaaaaaatggacgtctgaaattgtccacgttaccctgagtgaaaaaattattttcagatttaaccatagtaaaagttttaccatgacatggataagcattagatgcccatatttttatcctactatagtttttttttgtaacatatatgtgatttacaatacatattttccctcaattatataatgctatgaagaaatggtcatatgtctaaggatagcatcttcacggtggaaactgaactagagaaaatgaccgtttacgttctttatgaagaatataacatggcatgttcaagacaatatgtacattgtgtgaaccagcagtttactgtttatttttttagtgcaacgaaaaagggctataatcttttcagggtagggcaaatagagaataaataacatttttttccttgtgaattactcctatcaattactttacttcgttaaattcagaggaaacataaagttgataacattgagtatttaatacaaacacttcataaaccagagaaaagatcaaaattatggcatgaaggaatgaactttcagaagtcagaaactgtgagctatagatagactgatagagacattaaacaacaattaatttcatgccatctaaatttgagagactgttgccattacattacaactaagtgatagatatactcaagacaggacttggcatttgaaagtcaagagactggcatgcaaattagcaatgctcaagacagcatgtacatttgaaagtccaagaaactgaacatcactacatgctacttctagagacttttgcagattagcaatgagtaaatggagacaataactcagaccaaactgcaatattgagacctacaatgaaacaaacataacatgtattttacacgattgttacaaattcgttcgccccatgcttggcccagaaagtcttcaagtcaattggaatagcaaggttatacccctcaccacttcaccagtcaccggctagcttcctccttccagcaatacatgcaccccatgtttagttccaaagtttttttttccaaacttttaactttccatcacatcaaacttttcatacacacacaacttttctatcatcgtaccgattttaaccagacttccaaacttcagtgtgaactaaacacacttcagtgtgagtcattggtagtggatatgtcgaaatagaagttgtgcaacatgcaaactgccagccacctgcaccccaacgataccattgctggggggatcagtgcaagagctgctagcacacaggtgttgctatccttgaaagatccaaatcaataaccattaattaccatccccacagtcttctcgtggatgcatgcatgttatgtttgaagctttaccaaattttggtgtggtttttaaagagtgaaagtttctacaagattccaaaatttaggatgtattgatggttgaaatattttttgttcgctgataacgttgatttgggcaacaaattaaataggcacagtaaatactggagtatttgaacaactttgtggtaatccttgcacacaagtcataattcgtaatactccccttttctcaaaaaatagcaacttagaccgaagaagacatcacttagtagtataaatctgaacaaactatcagttatctactcacgtaaaggtgattatccagatttatagtattagataatgaaattgctatatatttatcgacaaattttctcttataaatttattaaatgtaaatacaatataattgtaattatattgtaacttttatgcaactatattctatcttttatgtaactgcaatgtaaattgaatgtaacttttatataattttaaacttgtatgtaagatatgtgtaagttagaaagaaaaaaattcgtagcgcgcgtgggagaggagattcggtctcgcaacctcctcttcatgaaaacagcgtgttaccataggagttttgaaagctgaatagaaattgtattatagtacaatataattgacaatattattatattataattatactgtatttatatctgataattttttatcgataaatgtcctagtctccattccaaaacaaattaacttctaaagattaatttgaataagcatttattcatttaagtttgtctcaaaagataaacaaagggcgtatattcagtaggtggagtacgccgatgttacggcagttcgggaatgtacccgcagcttctacaaccctccattctccccacgtataaggccgcgccccgcgatccaagcagcagcagccatagcccccgccagctcgccgccgccgccatgttcggcgtcgtcttcccggaccacagcttcccgctcgacgtcaccgccttcgcgcaggtggcgcccaactcctgggcgctcgacctttccacgctctccctcgccgccgccccgcgctccgccgtcgttttcctgctcccggccgccgccgccgcgctcccgccggggaaggccgtcgccgtctacttccagcccgccgccaaccgccctttcgcgttcctcggcgcgctcggcccgggccgcccctccgcgagcctcccgctcccggaggccggcgacgaaccggagccccccctcggccccgccaagctcggcgtcgccgtggaggacgcggcggcgctccctccgccccccgacgggcagcgcgccgagcgtgtcgcgctccgcgtcggcgagaacctgttcaacttcatgcagtcgttctgcggcgccgacggcggcaagctggtggtgcccacggacatcctcgaccggtggttccgcaagttccaggagcgggccaagaaggatccctcgtatctcaagacattcgacttttgagagcgaaggtacagaacagccttcccggtttgcatcgattcttcctgtaatcctgttttttttttctctttttgttcccctttggtaccaaatcgtcaattgctaatgtaattagtagttagtgttacgatgctacagtacaatgcttgtaactaatgctagtcttagtgcagtaggactaaaattagttttagatcatgatctcacattctcacagacggggacaatgttggagattttataagacaatgtagtggactagtggtgaacatggtatactttgggtatgcatgtaccggtgtatcctagaggcccaaattgaatccttgtgtaggccttgttcggttatacaaggattcaattcgggccgggaatgacaagtatagtaagaaatttatgatagatacaacgagagaccgggatttatt

SEQ ID NO: 6218 - DNA, 26685 bp, Oryza sativa
  unsure (1)..(26685): unsure at all n locations
caatgtgatgcgatggttcccttacttgagtttccgcaatgcatgcccaagattcaccaatgttggttcccacatttcattcaaggaggatgaagtatgctccagtgttagctcaaaccactgaactgctttttgatacctaaacattttttttaaaaaaaacagaatatcaaattctcaactactttaatagcagcacaaacagttctttttactgaaaccactagaactggatgtgtcaaacatttttttcagcagagaaccaaatctaatgggatgaaattttataagttgaagagaatttgaaaagcaaataaaaaccaaacttgtatatggatcatggacatcaatcacacgtttcaaactctaatgatcatactataaatgcataaaacacacttgttatcgtgattgcgttaatgcagggcccagctggtgcagcattagttggaaactaaggggaaaaaaattagttgctctcttacttgggtttacttcactgaatactatgtgaagatcttgtcgatacaaagggaacagcaaagcatccgttacaaatcaatcaagaaagatgaaacattttttctccccaaagttcatcataatagcctatcctttcttatttatcctggagccattccccttcttttattcttcttttatcccaaagttcctccggtgtagccagtttctacatgctaaccttaacatgaactagggttcacatcatcccacttcaaaaagctttccatacaatactatgcatactacatccatattctattcaaaatttcagaaccaccaaatcaaccttgtatatcatggacatctttcaaaacatccatgttagcataacatttttcctataggaatatcagatatagaacttataggaatgctttccctttcatgagagcaaagcatcttacaagggaaagtggagcatcactggttccaataataataggataagcagacaaaagaaacctttagaacagagaaactcttactctttcatattataagctacaacccccatctcgttatatataagcggatcagatgggcagatagattttgcttgcgtgaagaactgcatcacagcagaaagaaaagggggtttaaaaaaatgatgacaaaactattatgccttgccaaataaaactttgcaaataacatactctccatgataggctctcattgtgagctacaacaaacagtattcactaagtaaaaggaagttgtgcatgataatatctcattttctataacccatccaatattacaaatacaggatgtattttcagcatctgaccaactactattaccacattaaacctccttttttgccaaaaacaaaatatggaatgagaaaatatagggaaaaaagtcagctctaagtatagtttctttatcagagtggaagcctcataagaaaattagtctcggtaggatttctcaagttattacctgctctgcaagtttgaaattgtgcattcgcaaatattgcatgcccatgtataaagttggcagatgacatctgaaatagaaaacaatttcaacaaatagtgagccgaaggacagacaacaacagaggtgaagtaattgaagtgcaacaagaatctacactccaaaacaaagagaggaactcaatccacaatgctcataatcagtaatgtgtagtagatacaaaagcttgccagtgtcccaaaaaacacgaatagcagtttccagaacagaaggccaaaaaatgaaagaaagtagaaaggatccacaatgctcataatcggtaatgcatagcagatacaaaagcttgtcacacccaaaaaaaatacgaatatcaatttccagaataaaaggccaaaacaattgaaagatagtacaaaggaaaattaatgcaactaattgtgttaagataattgctccttagacaaacaagtacaagtatgctctggtgttaatattgagttgacttaagtgtaaaaagaatcaaattaatttaattaatattttgctaaactgtacacagcataataacataacaaataaagaagtttttttacacaaacaattacttcgaaaggaattactgacccaggaaatagccgagctgctgtccgaaatgcagccattgcttgatcaccctcctcctgtgcagcataagcaataccagtaccaatccaagcaggaggaaatgtcccatctaaccctgtagctttgctgataggaaatatattagtgcaaaacatattacagctacttaaaattgaacaagaatacaaggtataagaagttgtaagagggttaaacccatccatgattaaattcaatgaacaatgagcattgaacaaataagaaacaaaataacctgcaacctttggactggtataactgagacacatgtcttaagaaaatatatattgtttatttgaacttggactctggagaattattggacagatatgtttcaccttacaaaccatctgacagactgatactacatgagtagaacctactcatttctgtctttttatcacattgttctatcattccagacaactaaaaatatttaacaaagaaatatattgtttgttataagaaatcaatcagtcagttggatatgcgtagatttcaggaggcaatggcacctatggacactgttctctccatcagatggtaacactattgtagcacacatgttataccatgtctgccatgttttcatgacaaaagtgttgccttacgcaggaacatggttgtgatttgcagtgcagaggatattcactaatcacaccctattttattttacatcccaacatcgaaggcacagcaggattatcttctaagctatcctaaggcaaaaatgcatagtgaaggttcaaataaaaataatacagtagaaattaagagaagaatatgcttacccaaagtatctgcgtgcttgatcatacttcttaatacagtagtaataacacccaacagcaaaccaggaaagagctctacagatggaaccacagctgacattaaaataatatactttgtttgctcatgtctgactacaaacaatcaagtgtactttagtattatgtccctccaactattggagtctatataaccaacatgaagggggggggggggggtcaatctcttcttgttcatcacataaataaaggtcagttaacatattttaccccaatcccgatgctattaaaggctagattttacaagttgcattaaagtttgcagaaagatgaataatgtgcacaacactgtcattatatctaagattgttacatgcaaatgaaagggggaaaagcccatctagcaggataacaaatattatgtgggtctgaatgtgggcaggccagtgggaatactcacttctgaggatagtccttcactagattgcaggccaaaatataaaggtcatttgaatggccaagctccattgcagctgccaaatgaactaacgtgcatttcaaatgaaaagggtccctttcaagtaacctgaggcacatatagcatcacaagaatgataaaccaatattgatcaaggaaacatatgtaccgacaatgaatcatttaccaacttacgcagatgtgagttcgaaacatttttggtactctccactctgatgatagtattcagctttgcaagccaacacgtcaatattatttttcagtgtcagtcctgaactcaaagatgaaatactacaagattctcgttcaaattccttgaactttgcttccactatatattctttttcatgctaaagccataaaacaaaacaaaccatgatcaaaagaaatataagtgaatgcagatacacatattgtttattaaattgcaaagcaatgcagttaataagtcgtgtaccttccttatcaaacaagagtagaatgctgagagccacccatcttcttttccaaattttagagaggacaatagctcagattctgatatcattgcataacaataagtaccaagaacaaagagaggattgaaggtccaacattaagcatatcttcttaaaactagtccagtaataacaataaacattgtattatttaaaagaaatatcctaagaggatggacatgacagatgggaagattgattttgtaaaacttaccttcctcgcatgtcaacatgtagttatcaacaaggcattcaagggcctgccatgtacagacataagaagttaggaatgaactaactggggttaccacagaggcccaattccatgttagcatctggatgccaaattccatatttagtagaaccaaaaatacaaaataatggtggttcatgtaattgaaaaggtattgtactaaagagtcacatgattcttctcacctcatagcacaaaggatcagccttcactgcagctttgtacctgagataacagcagaacaaagccataaaaccatcttaaccaagctatttggccagatatgcccaaaaaaaaacactgattagacaatcctgcttaaatcttaatttcaaacaaagaaaattagcagtacttccaggtagcaacagttatttcaactattagcagtgtgtcctcgttttacaagaaaaactcattttctttatatcttctaaagagtatcgaataacccaacattctcagtgaagatattgagtaaaaggtgtaagagaagaaagacttcaaaataactgcatcgtcattcaccagaaccactgaatacactcaattagacaaaaaatgaaatgatgctttaccattgtcgagcaaggtcacagttgtccagtgcttcgtatgccttgccacgtaaaaaacatattgccgctttgatctggcaagcaaatattactatcaatcaccatactaagagagagagagagaggcatggggaagagaaagaagagtcaacacacattgatctcatggtcttcagcatccttatcaaagtaaatgtcactgccatcatcctgatcaacaacgtttccatgctcatctatttttgcatctccaagtatgatcaaacactgatgccattctttcaactcctcctaacaaaccaaaacaaaacgatgaaacagtagctaagataaaaggaaagacggtagataaaataaaggactacacaggactgtacaccagagcacaaatcagaaaaatctatactgaatcataatattttctggtatggttcaattttctaaagtaaaatcttagaagtacattaaaaaaatcactaatcctatacagttcttttgatctttcctataagaaaccagatttttgtttcgagtgtcatggatattgattgaataagcagtcaaaatcatatgtgcagtttatatatctgacatatatagaacttaaacaaaattctcatttatctaaaagtccgaagcaggaagcacatattataatcaaccaaactcccagatcagaccagctattaagaaccaagctaagcacccgttcattgatggaatgcccaagtaaaaatattctggtcgagaaaatgcaggtgtatcatgttaattattttgaagcatcagcagagcattggacttgaagccaaaaaaatgaaatcccccagtgcaagccattgggcgcaccttgtgtgaagtaaacgaccctatctcaactcatacagctaaagctaaaagctgatcaagcaaaattttatcgagtgcttgcaaacacacagaatcaaatcgtcaaaaaaactgccaaacaatgcccagagtgaaagaacattgaggccaccatacaaccacaagctgttcataaggaagctcaagcgcagccacgcactggaacattaacaggggcagtgaaactaaaccttctatctacacacagcatgcacccaacatgttcgacaaaatggcagactaaacaagggcgtgggtggggaagctcacgaggcacttggctgcgaggaagcggaagcggaggtcgcggaggagcttggaggagttgaggatgtggagcgcgcggcggaagtggcggcccaggaagagcgcctgcgcgagcatgtagacgtcggcggggtcccccgtggccgcggccaccttgtcggcgaggaagatggcggacgcgtacaggtgcttcccgacgctgtcccgcaccaccccgcgcagcctccaccgcctcctccctcatctccgccgccacctccccctccgcctccgcctctctcctccgcttgggatttttctgcgctgcggcggcggtggtgggcggcgctgctggagggaaaccgaattttgtatcccacattcgccactagggttcgcggcggagagtggtggtttttggaaatttctcacggggaaaaaaaaatggagtcccgacgcgccgcggatcgcagcaagtgatcgatggatggaacgtgcaagcagtatggcttatgggccacgggcccacggcccacaacatatgcaaacgaaccagaaagcctgtataggagaggacacacgggccaggcccatcatctggccggattcggaatctacctctgtgaaattgcgatcaaaacctacggaaatgtatagatttcgtggtatacaaatgttgattttgccagcttacattgacgttcttcaccttagtcgtccctgtttgaatttacttttctattattattaacacgggagaaacgataatttgaaatgattcctttggaattcctgcaaattcttatgtctatcttacaattgctgcactgttctttttttttttatcatgtgaagacgaattaatgtgcacgaacgtcgtccatcggagccgaaagcggtcgctacacgccgccggtgatggccctcgttgccggagtagcggtcatcgcctgtgagccgcaccgctggaaatcggcgacgcggggcggcggcatgccgcggggagccgtcgctctcaccggcggcgagacgccgacggcgccggccgggtgcgccgccgccagggcttcttcgccgtcggctgcgaggtcgccgccgccgcaggagaggaggcacgaggcggtctgggagcagcccagcgtggtcacgatgacgtagctgccgttctcgtacagcttcatgacgtagcactcctcgtcctcgagggtctcgcgcgggacgccgcccacccgtcgcgcaggcgccgccggcgaggccacgggaacggcggcgacgtcgtcggcggcggcggcggtggagggcgcgtcgtcaaagcagttgaggtggcagtagtcccagtagatggggcacctcctgatcaggatcgggttgcgcccggtgcagaggtagcagatgtacatctccgtgtcgtcgccgccagtcgtcgccgtggcggtggcattgccgggcgccgtgttgccgtcgccgcccgtggtggacacggcggcggcggcgaggaggaggagaacttggtaggatgcacggttgatggaagctgctgagagaggcatatcacaaattgatgagagatgatgcgtgcagcctgtctcatttataagggttttttttatggcggggatatttataggtcattttggctgcagctgcattttgacgtcaggagcgtagtagtatgaaattatgattatgttgggagaccaacaaaatctcagtcaatgaatggatactacaatttgactatacgagaataagtgcttacctgtttctgcgtaagagtgctatctgaattctgaagggtggtatcaaatttcaatcgagcaatctgctaattatctcttcccatgtagaggttacatgtttttcttcatcaagataaaccagaaaaatcggttgcatacatatgttattttgtaattaagattcggattgtatctctgtttcgttagcacgcttttaaactattaaacggtatatttcatgcaaaaactttctatatataggttgctttaaaatattaaagatacccatttataaaggctgtaataattatattttaattaatcatgcactaatagttttctcgtttcacgcgcatcaacttaatatttcatcctcatctgaaaaatagctttctagctgtactcattttccagatcaaacgtctagggtatacatttcctattttcctctgtacaaattttctaacaaggttcatactcatgaatacccggtacatatccctttcaaaaaaaaaacatagtacatgcacgtagactacgcatatcgctatgaacagcaaacaaatgtagtgcaaatcagtagtggaatagtgatttactaattcagctgttcagcaactacgcgctccggcggtggatggtactatttgtcagcggtggacacggttaattagcaagcccaggaagcaatggattctgtttgaaagtggtgagcaacaagcaaagtgtgttgtgctgccgcagccatttaccaaaaaacaaaccaccgaaacggcaggttgggacgtttttagccatagaacgaggagacttctcgtgttgctgccgcaagccgcaagatcgatccgatcagtaagaaattaaacggctgtgaatttatcccaagaacacacactcgtaatttggttaacagagacagatcgtagtttgcaaatatgagctggttgattcttccacattaactactacttcctgaaaaaaaattgtgaaacctaaagtgttactcgtattattatttttatttgttttgcttgcttgaatttcttttggttttctctctaccatactgcctatatatttatgcacagattgacacgaggtttagtgctatgtccaacgttacattcgtcggatcggatcatcaaacggcacgtacgcgttgtcgacatgggctcgcggacggcggcacccgggcacggctagcgctggtcgccgcaccgctcgaactcggtcaggccgcgcggcagcgggctaccgatggcggccggggtgatctcgccggaagcggcgcccgacgacgacgacgacggcagcgcgtcgccgtagctgcacacgaggtagcatcccgcggacgcctggcagctgaccacgtcgacgacgacccagctgccgtcagggtacaccttcatgacgtagcagtcgtcgtggcccccgccccggccgttgtcgccgccatcgtcgtcggcggcggaaaaaggcagcgcgcgcggcggagacgaggaggaggagcgcgacgccgacgacggcgacgagaggcaggcgatgtggcactcgtccttgtcgagggggcaccagctgatcatcagcgtgttgcgcccgcggcagaggtagcagatgtactgctgctcctcctccgtcgtcgccgtcgatagcggcgaggagcggccgcggcgcgccatcacggttgcgttggcggcggccgccgtggcattggtgccacgagccacgacggcggacgtggctggcctggcggccgccgtgcctaccaagaggacggcggcgacggcgaaggagtaaaaggagaagatggaagccgagaaagccattggcaaataataattgaaggcgtgtgcgcggtgacactgacacacgcagcgcgtggcttatataggatggtatttaggtggagagattagtactatggtcatgtttggaaaataggtttgggatatgatttcccacacctcaaaggataagtcttaatcttagctatccatcattctcaccatatttcatcctatcgcttcattcatttccgtttcctaattccacctctcctaacctattttccaaacaccctatagtactaaattagcgagaagattggatgtccttgagctttactgcagaggagtatatgcaaagaagttatcatgggttttaaaatttaatcatttcctcccaataaaactttgtcagtgatatgggcccggggttatcatgtttagagggaggaggctgccccccccccaaaatgccacatggccctcccccaaggggagtcaggcccgaggtggggtggcggccactccttcccaaatactagtcggaggaggccgccccccaatgccacgtggccctcccccaaggagagtcaggcccgaggtgggatggcggccactccctggccgagactagagggaaaaggctgccccaggcgccacgtggccctcccccgaggggggatcgagcccgaggtcgggcggcggcggccacctcccgtgactaggggtcgggctcccccgaccacctctctaggtcaccacgtacaggtgcccacctacccgcatttatggcgacccgagcggtcgcgccacgccggcgtgcagtgtactcaaccggtctgtgaccggtcgaataaccgatggaactggctagtgcacctgtgcgctgctcgtgtgttaggcggcgtgcagcctgacatgtcccatcaaataatgatggtgagaggttctcatcctcttatcccagccggagtcggtcctcccgctctggtcaaagctaggctcccgttccccgatgtaataggagcccagaagtcttcacccattaaatggtgaatgacatgggcgtccctcgtgtcaggcggcatggtgtggtaggccccacgaccgaggcgacgtggatgcggcttccaagttaaggaacaagacatgcatttaatgcaaagatggtaatacttctcgaggaagttagttgttgggcctatgtggtatccccttgaactataaaaggaggaccttgcccactgagaaaagggacgatgacgacgacgacgacactcagtaggcctgaactctaggagaagaagagcgagaatgctctccggagtttaggaacccttgtaacactcaaccataattccaaacacaggagtagggtattacgcttcttagcggagcgaacctgtataaatctcttttgtctcatcgtctttggggattgaacgccctcaagatcacacagcttcgctcaccaagccctgaatctcacccgctgcccccggccgaactcacaaaggggggcctcacggttccctgatggaggagttcattctccgacatctggcgcgccaggtagggggcgcgttcgtgatttttgaggttctttcgagcgccggcgcgataagtgttgcgccgccaatgcgggggaaggcgcagcttcctcaggagtgccgcaccaccccaggcagggggccaggcccccctcatcttcaccggataaggctggcggccaggtctttatggcgagtcttcggaatgaccgatgacccccaaagtttcggcccagcctcaccgaaaggtaccacggtagcatcaacccctccgagtccctccagatccacacgacgatcatagaggcggcgtggggtgacgaccgggtcaaggcgagtttcttccccatggcccttcatggccaagcgcggggatcgctcatgaacctgccacctgccttcgtctactcctgagaggactcttgcagttgagctccgggtgccgtcgaagcccgggaccccctgtgctggctcttccatagcggctagcttgggtcccaccggttggctacggtgcccggcctggctcaactgtggacggggatcgctggctctagagtttttcggctctcacacacgggcgaaagtagtcgtccgtgtagaaggaagagatattgaaaggaggccaccgaaaggaaagatcaaacagaatgtgtagcgtggggacacaggcttgtgggaacctaacctcgtttgctaagtggtcgcaggcttcccaaagtggttagggacccatggagggaggccctcttcaagctaaaggtttgaaaggtcgcgacatgcaagcaaggtttgtgtttgcttcattcatacaaacgattctttgctaaaagtatgggggctacgattcctagctctatcctagccctgcgtcgagctttgggcgccgtcgacgtctgggtccccctgtgctggctcttccgtagcggctggttttggccccgtcggctggctacagcgcccagcttggcttgatcgtgggtgaagattgttggctatggaaaatttagtcctcgcactcgcgcaaagatgatcatttgcatagaattattattgcttatgtttatctctcgcccatctcttcctcgcggtcccgcggtacccacgtgtcgcgcgctggcttgcctcccttggtaacaaaaagtttgtattcacctcatccattcaaacgattctttgctagaagtgtgggagctatgattccttaagcttcttatttncccnctagccctgcgtcgagctctggtcgccgtcgacgcctggggtcccctgtgctggctcttccatagcagctagttttggccccaccagctggctacggcgcccagcctggcttgatcgcgggtaaagattgttgactatggaaagttcagtccccacgctcacgcaaaaataatcgttttgaatagatgaagtataacacgaacagaggttaacaagaggcaggggcaagcaaggtacgcggcgtaaggtcacgggcccgagagagtctaacaacatttgctgagtatatacaggaaataagttcacgacctaaggtatgggctaaactcccgagcccgcagtgcctcggagaccgggaggaaagtgggaagttaaggcgacgtatgaacgtgactaaactcccaccgcccaactcccagaatgataggacagaagatcgggcccgcatgtcaactgactagcagattggtgtcaaccctgatcacctgggaaaggttttggccagggctaacgccgggggctactgtcggtgatatgagcccgggggtatcatgtttagagggaggaggctggggtggcggccactccttcccaaagactagtcggaggaggccgccccccaatgccacatggccctcccccaaggggagtcaggcctgaggtggggtggcggccactccctggccaagactagagggagaaggctgccccaggcgccatgtggccctcccccgaggggggatcgagcccgaggtcgggcggcggcggccccttcccgtgactagggatcgggctcccccgaccccctctctaggtcaccacgtacaggtgcccacctactcgcatttatggtgacccgagcggtcgtgcggcgtgcagtgtactcaaccggtctgtgaccggtcgaataaccgatgggactggctagtgcgcctgtgcgctgcttttgtgtcaggcggcgtgcagcctgacatgtcccatcaaataatgatggtgagaagttctcaccctcttatcccagtgtcatgaccggcaatggtgacactgaaaaagttgtaatcaataaagctgtgagagctgccagaatccaccaaaagtaacaagactttactgtgaaccaatgctctcaaacgaatagcagtaggaaggtgagctcctgtcaactgcagaccttatcgctattctccgttacaaaaagacgagattgagaaacaggtgaaagaaatgattgatgctggtttaattacacctagtatgagtccctatgcatcacctgttttacttgtcaagaaaaaggatggtagttggcgtttttgtgtggattacagaagattaaatgctctcaccattaaaagtaagtttcctatgccggttgttgatgaattattggatgagctctcaggcactaaattcttctctaaactggacttgaaagctgggtatcatcaaattcgaatggtggaaactgatgaagccaagacagcctttaagacacatcatgggcaatttcagtttagggttatgccatttggtctcacgaatgcaccctccacctttcagtgccttatgaactcagtccttgcaccatttatcaggaagtttgtgttggtgtttatggatgatatcttagtttatagccctgaccttgatagtcatttgcatcatcttcagcaagtttttgttattttgaggcagcaccagttgtttgctaggaggtctaaatgctcttttgcttgcactcaactggaatacttaggacatatcatttctgacaaaggagttagtactgatcctgagaagacagcagcaatgctggcttggcctgtgcctacttctgttactgaattgaggggatttttgggactgacaggctattacagaaaatttgttcagggttatagtatcatagcacgaccattgacactcttgttgaagaagaaggcctttctttggactgatgctgctcagcttgcttttgatcagttgaagacagctatgagtaacactccaatgttagctttgcccaattttcagcttccttttactttggagactgatgcatgtgcttatggtcttggtgctgttttaagtcagcagggtcaccctattgcttattatagcaaaactttgggccctgttaatcagaaattgtccatttacgaaaaagagtttctagctattatgatggctgtggataagtggagatgttatctgcagagaggtccatttatcattaaaacatatcacaaaatcttgtgtcatttggatgatcaaatattggggactgaattacagcaaaaggcaatgactaaattgatgggtttgcaatattcttttcaatacaagagaggggttaataatattgttgctgatgctttatctagaatgccttcctcctctcaattttgtgctttttctgtggtccaaccgatctggattcaggagatgatcaattcttatacagtggatcctcaagctcagcagctactagctgagttggctgtgcattctcctaattctcaagggtattcattgacacaagggattattagattccagaataagatttggattggatccaatgcaggactgcatactaagttgattcaagcttttcatgcttctgcacttggtggccattctgggattgctgctacttatcatcggattaagaaattatttgcttggcctggtctcaagttggatgttgaaaattttgtgaagcaatgtcaggtttgccaacaggccaaacatgaacactgtcggcttcctggactgttagctcctctcccaattccaaaagaggcctggcaggacatctccatggattttattgaaggtttaccgcgctctgatggctataatgcaattttggtggtggtggatcgttttactaagtatgcgaatttcattcctttgcgtcatccattcactgcatcacaagtggctcatctggtggacaaaactgtatttaaaactcatggcatccctcgttctattgtgtctgatcgtgatcgtctctttactagcaagttctggacaactctttttgctacttgggacactcaattacagatgagcacagcatatcacccgcaaacagatggccaaatagagcgtgtcaatcagtgtttggaaatgtatttacgatgcatgactcaggctaaccctaagaagtggagccattggattcatttggcagaattttggtacaatacaaattatcatacatatcttggctgttctcctcataaggctctttttggggtggatcctcattattctcaagttcctgatctgacattggctactctgcctgatgtggtggatgttcagactgaaaggcagcacttgtctgaatttttacagcagcagttaactcgagcccagctgcgcatgaagaacaaggttgataaaggtcgttctgaccgtgtttttgctgtgggtgatgctgttttcttgaagttacagccttatgctcagtcctcagtagttaatagaccatatcctaagttggcttataagttctttggcccttttactgttttggagcgcattggagtggcggcttatcgtttggatctacctgccagcagcactgtgcatccggtgtttcatgtttctcaactcaaagctcaggtgccagatcatactcctgtttatacttctttgccatcccaagtggttcttgatgctgctgacgttgttcctgaggcgattttggagcgtcgactagtgaagcgcagcaatgcagctcatgtccaggtgttgctgaaatggtcttcattaccagcagatcatgctacttgggaggactatcatgttgtgaagactcgctttccagatgctccagcttggggacaagctgaaactcctgcgggcggcactgtcatgaccggcaatggtgacactgagaaagaggtttaactgtgaatgatagtgtgtgtgttttgggctagactttatcaaatagaatgcggcctgtgtgccttaaatcgtttgggccaacagcccatgtaatcaggagataaatactcgagagagagaatggctgtggccaacctggcaaaagaaatcgaatctatctctctccaaactctgtctctcctctgcctcagctctgtttctcttcgtccccaactccgatctcgtctaaatatatatatctctctctctcgtcggcggcgagtttcgcggtggcgtagtgttacacccagccggagtcggtcctcccactctggtcaaatctaggctcccgttccccgatgtaataggagcccagaagtcttcacccattaaatggtgaatgacatgggcgccccccgtgtcaggtggcatggtgtggtaggccccatgaccgaggcgacgtgtatgcggcttccaagttaaggaacaagacatgcatttaatgtaaagatggtaatacttctcgaggaagttagttgttgggcatatgtggtatccccttgaactataaaaggaggaccttgcccaccaagaaaagggacgacgacgacgacgtcgacactcggtaggcctgaactctaggagaagaagagcgagaatgctctccggagtttaggaacccttgtaacactcaaccataatcccaaacacaggagtagggtattacgcttcttagcggcccgaacctgtataaaccccttttgtctcatcgtctttgggggattgaacgccctcaagatcacacagcttcgctcaccaaaccctcgaatctcacccgctgcccccggccgaactcacaaagggggtctcacggttccctgatggaggagtttattctccgacaaacttcatggacatatatctatatttaaactacaataaactatatccaaatacactgagaaaaataaaagcatataaagttcctatgaagaaaaaaaaatcaaaaccttaaattggcggatccaaatttcaaacatttatttttcaccgttggatacttggatggtactagttaactcacgcaaagacctacttttccgataaccaattcctgttacgggtaggtggtgcatacccttggttaaatattcatgcatatgaccttttttttttcaattatacggtagagtacgtgcacacaacactatacacatatttttatgggagtatccacaggtttgtccatgatgcacactaaaaagagcgagaccagcgacacatctttggtgtcactaaatttttgttgaaattatacttgtattattgagcacatcaaattttaatcctagtgggtgaaatcatacatttacaactacaccaccatactgttagtgcttacttacatgcatatgaaattcccaaatggatttatcaggtaatttgggaaatatccgtatagttaaaatatcttatattataggacggggtagtacctaaccttcaaatgtacacaagttaccgatccaatttctaatatatttttattgttgtatcccttattaaataaaaatatgtgtattgcattttcttaaatctgttaaagttccccgcaaaaaaaaatctgttaaagttaattaaaaaggaatctccatgaatttctaagagaaaaataaaaaaaatacaatccttgcatagttggctcatactacgtattaattattaaccctcgcagggttttatcgaagggagaaattttctttcaggtattatcaccttacgtgcagctattatagcgtgttaaagttcatggtgtcatcattgttggaaaagacatcaaaactagttacagaagtactcagagttatgagaaaaatcgtatggttttagtgcaaaattgtttcattttgtgtcaagtttagacttgcagtagatggttcattcgaagagtcgtatgagccttactgaagtggaagccgagctttcccccaacggcaagagtccaactgtccaagagcaatcaggaaactgcaccggcagattagtaccatccgattccgattctgatccgagcttacttctccttattggaatcggatacggatccattcctggcccaggagccattgcccggtctataaatatacagtactactccggaagaccccgcaagagcagcaaactcaaggaagccgacgcgacgcgacccgaccgatcaaggagattgcggagatgggcaaacgacggtcgcgatcggaatcggatgctgaccaccgcagcggtgcgtgcgccggcggagaggccaagcggccgcggccggagcagaagcatctctacctggcgctggacgactgggagaaagggtacaatctctacaaggttgacgtccacgcgatcggctccgcggacacggaggccgagtcgcaactgcccgagcctcccgtgctccagctcgaggccgccaagggcgcacgcgacgtgctgttcgccgccgtcggcaccgacatcctcgccctgtggcagccgaggtacgagacgacgcgcaccgccgtgtacgacacggccacggggcggctggacgccgccggccctcgccacccgagggcgctgcagcccatgcgcttcgtcgtcgcgtcgtccgccggcgcccgcgggctgtacgcgctgcacgggggcggcatgcacttcctggagcgccgcggcggcggcgaggcgacgaccgagccgcggtggacgtggagcacggcctgctcgtcgctgcgcctgccgttcgacggcatgcagcccggctcgccgcgccgcaccatgcaaataacctcgtacgccatgcatcccgacgggcgcaccgtcttcgtgtccgccacgagtggcaagcaccacggcacgttctcctcctccctcgacgacgacgacgacaacgagtggacgcgccgcggcgactggctgctgccgttccatggccagggccactacgacgccaagctgcgcgcatgggtcggcctccactcgccagggcacgtgtgcacctgcgacgtcccgtccaccaccttcagtagtgtggcggcggcgacgtcgcagccgccggcgtggcagctggtgaacgcggagcacctcttccaggaggatcatccggagcgcggcggcacgtcgctggtgtccacgggcgacgccgagttctgcatcgtggagtccgtgacgccgaaatggatggatccggtgtgggatcgcgacgagatcgacgagtacgtgctccgtgtcaccaggtttcgtctcaagcacgaccggcacggacagctccgtgcttcgtccaggtgtcgccgcgcttcctacagggtgcgcaagcatgactctgtctttgcgccgcaagcgttctggatgtaatcgtgttacactagttactaaacttactactacttgtaaattgtaagaagtccaaactttctcaatcacgaaaaaaaaaagaagaaaagaaaatgtctcgttcgtgaaaaaaccttgaacgacaccacatccgggatcagggagatgaacagcaggtggaaaattgcttgcctgcctcgcttacgagccgtgagttgtgacttgtgacttgtgaccgtgcgtgacgacgacagaggctgacaggcaatttgtggacgagcactgctacacgtgctttttttttaaaaaaaaagaactcttataaacaatgatgtttgatttaagtatataaaaattatagcaaatgcagatatactcatagtgttagtaatagataataagagtttagtaagacgaaattgtatagacttttccttcatggacctaaaccgccaggcccatgggcctcagcttctggagtctggaccagcgtaacacattgaacaaaacggaaagacagaaaataaacaaacaaacttgaaaagaacgaaaaaaataaaaataattgaacaaggaagatgaaaattatacgagaaaaaagagtagaagttttggagcattcccttgtcataaaatttagagacttttaggagaaaaaaaaattccatccaatctaccaaaccccatctcataccatccaaaatggtcgtatccaactaacaaaaacaaatttacatatcctatatacttatgcaattcatccccactaagttattttcctgcttcctggtgcagccacgtcacttcagaaggagaaccgccagatcagttttctacgccacgcacgcttgatccttgaacagacgcatatgctctccttcctgccggtgaacccaatcagccgactccttccatctccatgttgtcccctgagcttcctactgccgctgtcgttcgacctcccagcagttgcttgacgttctttctcctttgtaatggccgacttatatatcttctaccggctttccatcttattgagtctgtttattgctcaccttaattctatatatatatatatgatcctttgaagtctgaacaagccaattgccaatgcagcatatcgggcattctcgtggtctcatggcaactatacattgaccagttctttcaccttgcaagtgaactcctagcccattattccagcaagtctgacttggaagtcattggaaacaaaacaaggttcctccgatttatcttgctcgatattagtacataaattggccttttttttaaccactcgcacgagacggtgtgaacttctattgatagagcaggtaaaaattacaagattacaaccttggaaggtctaaccaggaaaaaggaaaaaaatataccaccacccacacaccgacagcgccaacacacaagcccgggagaaggcaagcaccggaccgatcgccgctagaccaacaaaggaacatagacgagatcaccccctaggggatgccaaaacgacgtctccaagaagagaagtgacgggagaaccaccgccgccgccgtccgtcaaggttcaaaggagccaagactaggctttcgcctggcaaccacctttgaggggtgagacagcacgacaacaccctcaggagggggaacatcgttgccggtccggccaaggccgggctaggttttcacccgctgctcaccacatgcaaatctacagctggtgtcccgatgctccaccactgctcaagctctgccgacatgtggcacacctgcaccgccgccccccgccgaccagccttcgtgcgcggaagaccgcgccacacccaccggcagctcctcctcataccgaggtcgcctcctccaccgccggccacgcctctcgcgccaagccggcctccatctccgccgctcgcgccgagccggcctccactgccatcggctacgcctctctgcgccaagccggtctccgacccctcctccaaacgatgtcgcgccggctagaagtagccgtctgccacgccctcggctagccgaccgaagccgtcatgcctccggtgaccgcagacacgatcaccaccaccgctgctgccaaacacccgttgccatccacacctcgcacccgactccttccccgcctcaacctgctgtcgccggcgatcgtctgcacgacgtcgccagccgctgccgcatccagcgacatcagcaccgcctcacagacccgaccgccgcaaaccagccgccgttgccgctgtcgctgtcaccagccaccgacgacagccgccgtctccgcaaaccgccgccaccgccaaagaagccactgcaccgtcgccctccaccaccaaagcagccagcaaccggcccgatgccgccgccatgtcctcagctgccgcagcaaccaccaccggccaccctccagatccggccgagcggcacggatctgaggtacaccgccgacgtcgtcaccgagcaccatgccaccgtcccctccttcgctcccgccaccagcgccaccatgccggcctccgcctgccgtgcaccaccgccaccacgcacgcaccgctgccaccatgccatgccgggttttgccgtcgctggccgagccgccccgccagtgctgcgtcagtcgaagctgccgccgtcgcacgggctccgcgcgcctccgtcggccgcggacttagcctcgcccgccgccgcaccaccgggcgccgcccacgccgttgccaccgaagccggccgctcctccttccccgtcgtcggacgcctccgccgcgcggggagcgcaggggagctagatccggcgtcgccgcacgccggcgagcccgctgccgcggcctctaccccgccgccaacctcgcctcctacgcccacgccgccactacaacctctgccgcaccgccgcctccttcaccccgccaccgactcctccaccccgctgccttcttcacctcgccagccggtcgggcaggccggtgtcgccgtcttcgcgccccagaccgtgtcggtgcccccaccgccgacgggagggagagacgaagccccgccgccgccgtccttgtggccgtgcggctttgccggcggccgctcgggcggcggcgaggcggcagaggcaggagtgggggagcgggcgacggcggcggtggtttctgcctcccgtgtcgcccgtgagggagacgatgcgggggctctctttcgatacgaatgctcaggttacagattaaattggccttaaggccccctttgaatcacaggaatgaaaaaacgggggaataggaaaaacataggattctgataggaatacaagtgtaaaacagaggattgcaaaacacaggaaaaacataggaatgaccgtttgattgagccgcaggaaaaacacaggaatttgaggagagagaaagactcaaaggattcttaacatgaggtagaacctcatgttaaatttccttcaaaatttgcatgggaagaggcattccataggaattttataggattccataggattcattcctttgattcaaagggctatataggaaaaattcctataggaattaaatcctttaaaattcctatgaatttcctttgaatcaaagggggcctaagttttgtcgtttcagctcatgccttttctccgtgcttttctgactccatgggcaagatttactatgtccctcactacgtgggaactctgtcatgtggtgtatctgtatttttgttctgtctatcctctacagggttttgatctattacgtgtactctgtttttcactaaaaaatatttcacttacccatgtttaatccccccccctattgtttttctacggatgggcctaataaatgatggtagcagatcttaatttctgggcgtaatatcattttaattaattccaatcaaaggttgttgcacttagaaacccagacttcatctgaagattcgctgctaagctgtttatagaatggagcaactgaaaacgaagaattaaaagggttgttccaagtagttcatcttttaaccttgcaggcacttcatacctcatatacattatttttgtttggtttctaagcccccagtgcatttgttgcttgaatcacagaaaactgatttcttagttcataaaagcactgggtcttcctaggaatatataatctagaatttcaagaggttcagcttccttttttttttgcataacacaattaattcattccttcgagttttacctcgcattaacatttatgttgtactgagaatgcgaattttgttctgtttgcatgctcattgttgctgacttgctgtggacagagtagactgttacatggaaaatggaacacacatactcacttgggcagtagctacaagcaagttaatcgatgtacaattttttctatcctcaatcaggatacattgattggtgataataactacttagctgtagcttcagtagtctccgtagaaaggattggcacttttacatttttagataatggatattttatacccggcttcatctatcaaaagatagactcatgccaattataacaaacgttcttacagagtaacacttggaaacaaaaccgagataaaagttcagacgactaaagaccgatgtgtctagctgataaccatccattggaactaaaaaattgcaaagctgatgactcaagatgttgcgatgccgcgatcaactgtgaacgcagatcctcatgccgttgcagcttcgcccattggcgtaaccaatgcgtacccctgaatagtacctgcaaaaaagatttcggtccgtaattgtcaaacactaactcgtttcttgttaaccaaactgtccagaaaagcgctgctgctgcagttaacagtaaagtattttgttttttattaccccccttagaccactgttggaataactcaactaagtttgatggggtacttataccaaacaaaatatgaaccgctcgccacaagaacttggcaatatagcaatcaaaaaacaggtgttgaattgactcaggctgatgacagaaagcgcattttaaatcaccatgccaattcctcctagctaaattatctttagtaagaatgacacctttctttaagtaccacaaaaaaatttttatttttgaagggaccttaatttgccaaatatcctgtgaaactctaataccattactgattagtgcagcatacatcgatttgacagtaaaatttcctgaggcctgcaaagaccacacaaacgagtcacccccatcctgtaataatacttcctgtatggaagcaagcactctattccatctactaagattcgctcccaccaaattccgcctaaacgaaatattcagaggggacgaactaagtactttggccacagagtcatttttccttctaacaatattaaacaatgatggaaatctgtcctttaaaggtttattacccagccacgtatcgcaccaaaatctcgtttgcgatccatctttgattttgaacgatcccaagcccaggaaagtgtcttttatgctcattaaacctttccagaagtgtgaatccgtagcccttttctggcaacaacctaggggcttttccttcaagtatttgttcctaatcagttcctgccaaagtccgtcctcatttaacagtttgaaaagccatttgctcagtaagcatttattttgaatctctaaattggggatacctagccccccttgtatctttggttggcacatgactgtccatttagctagtctgtattttttcttgtgctgatcattctgccaatagaaccttgatctatagcagtcaattttttctagcacaccttttggaatttcgaagaaagacagcataaacatcggtaagctggaaagcacagagttaattagtacgagtctccctccggccgttagtaattttcctttccaaccccccaacttcttttcgatcctatttttgatttcttgccaatctttattgttaagttttctggtatgcatgggaagaccaaggtatctaaacggaaatgacccaatcttacaccaatagtggaataaaaggcttcgttctcttttgctctaccaaaacaaaagatttcgctcttatggaaatttatcttgaggcctgatagttgttcaaaggttgtaagaattaacttcatattaatcgctttggcgacatcatggctcatgaaaattccgtatcatccgcatattggagtatcgacaggccatcctgaatcaggttgggataacaccctctacgcggtcagcgtttttggctctagcaatgagaatcgctaacatgtcgacaactatattaaatagtactggcgacatcggatccccctgcctcaagccctttttggattggaaataattaccaacttgatcattcacctttatactgacattacccccttgagtaaacttctccacccaactgcaccatttatgtgaaaaccctttcattctgagagtttgttggagaaaagaccatctaactttgtcatatgcttttcaaaatctatcttaaaaatgaccccatcttgcttctttgtgtggagttcatgtaaagtttcatgaagaataatggccccttccattatatttctacccggtaaaaaagccgtttgagtaggtttaatcactttctgagctactgatgtaagcctgttagtagccactttggtaaagattttaaaggagacgttcaggagacagattggtctgtattgctgaatagtcctaacatccttctgcttgggcagtagaataatcgtaccaaagtttaggctattaagaggcaacgatccctgctgaaatccgaaaacagagctaacaggtcgtcctttataattgtccagaaggcctgataaaactctggtgggaaaccatccggaccaggtgcagtattatgtttcatttggaatatagcacattttatctcttcttctgtaaaatctgccgttaaagactcattttcttctgcagagacttgtcgtatgtcgtcgacctgagactcatctaaaaaaatagatgaagtctgtgatgggccgaacagggtcttaaagtacttggtgatgtgctccttaagttgagcatcaccagtaatgacctcgttcccgtcctgcaattggaaaatacgagttttcctgtgacggccatttgccagaagatgatagtattttgtgttagcatctccttccaataggtgcttgaccttagcacgttggtaccatttaatttcttcctccctcaataactca

SEQ ID NO: 6219 - DNA, 19452 bp, Oryza sativa
atgatagggaaaataagaacccgggaatcaatccactagtcaagaggtgtggaactaatccggatgttttgttgtgcctaatatgagtaaattggttcccgacccggaataaatcccggtctcttgttgtacctattataaatttcttgttatacctatcattcccggcccagaacgaatccttgtgtaaccgaacaaggccttagggggtgtttatacaaatgaagctgcattgaaccttatcttgttggtttttgaattgcctgtacatcttacatttctttactcatcatcgtgtgctatctgaattttaatcctgaaaatagcgacatcgctgttttgagaatggccaggacacgttagaattgcagttgttaatataggacttcagctgtaatgctttatatgatgggagaatccattcagtccataattgaacatgaatgtttttttgggttaagttctagatactctgtgtttatcatattatactgtttgtttatgtgctggtgattctgatttaatgtttacatatcagtttggcaatatcattttcacctttgaaactaccagcttctgctcgtattttgattcatctgttcatgatcttttcctacgtttttggatacagatatcagatgcaaactaagttcttaggtgtgatttttgtttcagttcttgtttgtgtcagaccaaagaatcaatgagtcaaaactaaattttgttttaactgtctttttttttttttggtggagccaatagatcagtagacattgaaaggtttagccttcgctggtgtgctgttgctccccttttcttgggtatgttttgcctgcctttagtttttgtaatagcttattatgggtttatgtagtcttttttgttgcaagaaatttgtcttctttgttgcccaaaacatacccaagcatgaagtactgtcaaggaaacaattttatgcggcgtttcgatttttacgttgtgatcaccgatcaagcattctcttattagttattacatcttcctgcgttgataagaggcaagccagtaattgagtactaaaaaaatcagtagcatggctgaaattcccagctggagttctagtttataaactgtttgttattgttgtctgaaagtagatggctttgaaagaactgtgtttgtgtttcggacagccatttcctagtataaatatgaagatgtgcaccactaaacacaaattacgaaccttaacagagatcgaaatattagtaccactgttctgcagaactattgcgacgagcaactagcctatgtcttctattttcttttgttaatggtctacttttgtgcataatgcacacgctaattaatttcgcatgggcatatctttttcaggttattttgcagttcattgcaaactgcatgtcggcagaaagggttggttagtagagttttgtatttgtagaccatctatcagttctgtatttctagacagaaattaacttgtcattcagggactggattcaatcatggttgccagttttttttttctttttttttctgtacttctagtactcctagagaagtggtaccaaaagccagaaccacaagaaggtacttgcgtcaaaagatgaaatcgtgttgccaaactgtacagtaatacaattgaactttgctactgcgtgtcaactttatcttggagttgccgtttcatgctaagaaaggggtaattctcaagttgtttactgttctgctgttcactggcgttttagctactacacaggcttgttctttacacatgtcaggcctccctatatctttggaagaccaaaatgcagcaagggtgttgtaaaatgtactccctccgtcagcaaaaggtaatttgcttctttctggtccaaaataggggtgctggccaaatatttcctcagttgaagactatcagagcttctatcgcaatgaaagattatcagagcttctatctcctctgctttttggaggatttggaatcacaaaaacaacgttatcttcaataatcaaccaccatcaggtgcgtgaattttacatcaaagaagcagatggaccggccctagatgggtggaaggctgtcttctcaattgctatttcttcgggctcctcccatgtttaattctgtttctttctctttattatgtactagtatgctccctccttgttttcttctttcctgtattttaattacccgttgtaagcgacttggttactccattaggaggagcttatatcaatataattcaatattcgcccaaatcttcagtccttgaccaacagttttgatcccacaattgcagcagcaattggtaacaagtccacttgcttctactgcattgcttagcccacttgttaggtttgtaacatatagttttatttcttaccgataatcaagtactccatccgtttcacaatgtaagactttctaacattatccacatacatatagataataaatctaaacacacatatgtctagattcattaacatctaaatgtatgtgggcaatattagaaagtcttacattgtgaaacgaagggagtagataagtatgaagtatgaactaaatggtagtaaaacatatgcgacctttgagttaccttcctgaatgaagtatgaactacgatttccatagcagtacagcacacaaatcaaaggcctcaggttgagtctgcaggatgaaattacacagcacctttggattgcaaatcaacaccaactccttttcacatgcaaaacaatgactaaatacaaaactcaaagaataccaagaaaacgaatataatgcacaacttaggcatgcttcctaaccaacccactgatcaatcgacgtaatttaggtacaacagcaccgcagatgttaggtcatatatctacaggcaaatcttatctaaatcctgtcacaacctgtcgtcactcattagcaatgtcaaccagttaacacacaatggcccaatgtcgtggatagtcttcactaccatccttcttgctgagaagtctctcatccctaaccagaaatgcagcatttggaaatcaggattatcagaacctcaaaagatcaactgtgacattctcgaaaatgtccaatcgaacgatgggatctcagtgcaaaaccaaaggagaatcaggttctgagccgctgatggaggcaaaggatgacatactatcctccttcgaaaccgttgagaagttcagtggtgcagcagccagcctcctgttctctttgaagtaattattgtaccgtccagaatatgagcgtggagttagaagctcaggagtggcactgcctgcagaaactctacggggcaccggggtcatgaacccagctccatttccattcgggtgatggctgctcgtcctcctattaaagctgcttgtcttttttggactaggtttggagccgaaaatcaactctttctccttaagcaataagctttgcagtttcttctggtcctgtagtaagaattatcaacacatccaaatagtgaggagtcaactcttgtggtcgtaatgccaaaaggaacacatgatgcggtacaattcatacccggtgtcgtctcttgtcttcttccttttgtacccttctgagtttttgctcctccaaaatggcaacaagacgggccttcacatgcaaattcaatttatgtaattcaatggaacatagtgtactgtaatgatgataaatatggtagaccagctctacgacttactccatcatataaaaatggcacacttctttcatcctcccacgcaaatgttttagctatcaagttgtcaatcattgctgcacagaaagtatagcttctaatcattttatgtatcaaatatgcgagtgactatagatggatctatatcagaagcagcaagtagaccgagcttgtgaatcaggaaatgcttagtgattactgttaggagtacatcattgtctaataaggttatacctatatcagaaccattagcccagttcaaccaatattttagcagaatgcaacacagtgttcaactgacataccagcagacatggaaacaaaactcacatggtattttttgaacaagtatccttgccttctctgcacgcttgagatttatatgggcacccctaccagcactatacctgctactatcctgcacaaggacacacaaaaaaaaaacccttaaagatcttaactaaatcatagaagagatgtgaaatatatgttgtcaaccaaggcctatatgaatattcagaataattaaaacaaaaatgaatcgtacttggttatattcctcaagccaagtttcttcatcacaagctgatagccatctgtctactttctccatgatatctttcctggttagggactcctccctcgcttttgctatttgtgtttcaatgctggaaagaagttcacaaggatccactagacctgaatatgaaattattttagaacatttaagatattcctcagcagcaattttcaattgtaagcaagagagaatatcagtagtataccagaatcaatcaatgcggttatcttctcaggtgctgtgctcatatcaggctccatatgcgcattactgcagatatcttctagctctaaccttttcttaagaacaagctccttcattctacttgccttttgtttagttagtctctcaacttcctcttctgtctgtattcaaataattatgttaataagtccaaattacagcttgtaaagaaacaagtatctcacagatagtagccgaacctcctgaattgtctccagcgacaggacactagatgaagtgatctcttcctcagtagatccaagaacagcagctactctggtgaaatgtctcctctcttgttcagttgactccatcaaattccataacttgtggagctttccgacgatttcttgcaactgaacaaaatttccaaatagttagaaaagctataaaatgaaattgagacacctctgtactctgtagtttcctaagaggaatcaccttcgaaactctagtcctcttttctgctttgagcttaaggatggtctcagtaagaccttcaagagtgctatcactgatattcgttgaattttctgagttggccccatgtaaacttggatgcacatctttaactgtctttgcaaaatccatcccaagcacagagcataggcagtgcacttcatcgacgtatatgaagaccttctgaaggcgatcagactgaacaaggagggaatgaaaaagattattgctttcactaatacaacaatatggcatggcaaagttaggattttagataacaaaaatgaaataacctatcctttgaaatatataactaatcttgttctcagcatgttgaaagtgacagtttatggttgaaacaataggtaaacaaaaaaatggttgtagcacgtaaatgcttaaggcatacacatattttgatatccaccattcactttatcatcaatatctagtcatatgcgactttgtgtgaaaatatgtacattttgacaagatacatttgatttattttttattattattattttggtgcaactcatatccacatgatggctgaatgggttgaagcaagttgagcaaagaaccattttaagtcaagatcatagttaccttctctttctgtaaattgcgaagctccgcttgaagatcagaaagccttctggttgacaaatcatgattgtccttggaatgattgaccggaccattgtcatgctgattattgtgatccgaaatttgtgcttttatcttctcgatttgagattggacaagtgagaattgttttattctttcttctttctttgacctgagatcttccagtagaggcgtcactttggcaagttgctctttcaatgattgcttttcatccacctgtagacgaatatctcaaattactcagaaatggaatatacttatacagtgatgtcaaatatgtgacagagaacctttacgatataacaaagcataataattcacctttttttacttaactaatgtgaccctaaacatgccaaaagcaattaactgtggccaatgcatgtagaagttgggagtcaaaagaccaacacctttgctttttttttctttctaaatgccattaccaaatggaatttcaaacaaagttcaccgtacagcaaaccatgttgcatagtcaacctcatgtgtaaaagaaaagctaggcatcatccaggtatgcttaacttacaggaatcatatccagcgattcttcaaccaagtagatggtccacaattataattctggccaggaaagaaaatggtcctttgaaccaagttctacactaaactagtttctcaaatgtgcccatcagacatgactatgtaccaaccgagtgacccagctgtgcatgttgcagtgatatgatccccatcattatttgaacaaagatggccaacctgctgaatatggtatattctacgaggtgtagcatgacactaacaattatttcatacttgttgtacaagctacaagataacctaccaatatctgtagctacagacaaatcaaaccttatacgcataagacacacgataacataatcaaggtccctaggcacaaggcttggaacaagaggcaaaaatagaagtatgggctgagtataccttaaattttggggtaatttcacctattgaagccactaaaactttaagctctgcttctttggccatcaatgactgacggagctgggatctctcagcattggcactatcaacctttcgacggtacacacgcatgcactctgtttcaagttctaagaacatgcgatctttatcttcttcgcgctccccaatctcagtccatatttgctaaaatagaagttatgttagaatggaaacaattgcaagaattacatataagttcgtaatattcagagaaaataaaaatgtgcagccacctgagcagcattaatggtagctacatgtgacatttttatttatttatttatttatttttgcatatttgatgtttttattcatctaattgacacattggcaaaccggcaaatgataaattgttatagaccatgtaatttcatgccacaaggaacaaaaatctaatacgcaggcttttgatgaagcaagctgactgctcaaccacagacaacagagagagtaaatgaaactcaaaataggggtatagagcatacaaaatgtaatgttcataagagagctactaacttcccaaaatgtatataaatgtgtctttgcataccctaaccaggccccacttctctggacagcattagttagtggaaatttaatttgtttttattttctttctgcagagtttttttttggtaaaaataaggggcatagcatttcttttgaaacagcagaggattgcactctcacttacaattcccaatttcgagtacgcctgatgctattaaacttatatcattatgctcactgacacattagctgagataaatactactcctaccaaacgtaatatttctgacccgtggtacatcaacagtggtataataagagcgctcctaactgaatttacacaagcagtactactccaagttcttcagctccaaattcagactttagtaaaaagaaaaagtaaagtaaatcgtcgcatctgctttgcttcccgagaaacatagtagagacccggaatttccataaaagaaaaacatagaaaccaagaagaagctcgtagtaaatcaaaagtgaaacctttaagaatgaaatctgcaaagctgtaggcagaagcaacaaactcctgctgttatctaaatcctagcatctgttcaaaagagcgaacttttttggtagagaaaacagtatgcttgcaattcaagaaaaccaaaggagttggaacttttgagcataatttggacatataatgtgtgctcatctcgaaaacaatacacagaatttacaaaaacaccagtccagcttggctcaaactgtgcaatttcatccaaaacaagcaacgaaatcctagtatttctacgatttaaacgagcaaacgaatcaagcaagaagtatcctctcctattccttccaaagaacaccttccatttctccttaaatccgtcgtattcttgcagagaaccaaatcaaatcaaatcaaggacgccatgaacaaagaaccgaattacgcacctcgagctcgcgcagcagcctgccgcacggcgtctcgaagctgacgctgctcctcaccgccttgtccatgccatacccggccaagaccatctcgcccatctactctcctttcctctcccactcctctctctctctcccccctccaggaaggagaaagagaaagcggctagaggcaaaggatgcacctatccagtgcctcttcctctctctcttccgtcttcttcccccctcctcctcctcttgtcttcttggtttcttggttcttggcccaacgacgacaacaatggcgcttctcgccggggctgcagccagcaaccctctctcctacgctttcctcgcagcaaccctcggctctagaggactagagagagaaagggagggtggagaccagagagatgggcagcggtagttgctggaccatatatggatctcactgagcacagttggtagcacaatggaaagaaaacgaggtgataagggtgaagaaaccgagaggtaggagacgaccagagggatctgtttgtaaaattcaagaaacttttggggtgatttggatgaaaaaggtagtaacaaacaaatctcccatttttgcggtttggggacaaatctgaagatcttggactcacacaagcttagtagaattttacagcatttgtttaccttttttatttcctgttttattacatagtagatcacaattatatactacataagaaaagtgtccccatcaacttgtttcttttacaatgtttcggtattctaagcgaagatttggcaaataaatactaaacacattatacaggaatttgagaattttttatgttccaaattagtcctttaggtcatttagaattaaaaatggctgggcttcataaatgaattgcccccaaagaaggacattccctgaagaaaactgataaatgacaggtacataattaaatgacagcattgttgcctgttctgaagcgcgccagattgtgtgaagcaagaaccacccggatttttgtgtgattaatgtacacataagtaggaaaggtaggtacagttaaccacaaggtttttcatgccatttactgcacaagtaaaaaattatagaagagatgaggcaaagatattctgctgatctactccagagtgaaaaaacaaaattatctaggaataacaaggtgatcttctctaagaattcacatctacaggaagttttggcacctcggatgttagcccttcaccaaatacaagaggttaggctaaaaaccatgtaaaatgcaccacagttagattccaccattttaattagatggggacttttgttgcgatgtagattgcaacaggtcactcttggacccaatcaatagtgtagatcatgtgtgttgcacaattataagatctaaaccgtacaattaaatcagtgcatcaccgcagtgtcgccatgatttaaatgcaggaattttctcagttcctgataagagcattagagttcaaaaaaaatattaggctgttttatttttattttatgcagaaactgacctgaatgtttatccccattgacagtttgtgccgaccattaggcaatatacagacagagttgactagaattatatggatgcttgtaaacgaaatgatcaaatgaatctgaagttctgaacctacatgcatcatccacatgtacagtgtgacgagacatgccccatgtgatgctgaggtcaacctcaatagattagcaaaagctatgggatttagaagtaagtagtgtgatctaaacaatgtactggatctaggctcacctgccctttctgtcctgatttaattggaggaagcttctctcaaactgtcggatttgagtgttacctgcaatgctttcttatgaagatcctgcacttcgcacatattgattgctctaatagctctggtctcagtactagtactgtactatgctacttcagattctagattttccttgtaatttttgtctctttttcgtccacttagctatgatgggtctatgagaagcatttgacagttgcatcttctctcagaatcaaaagttctctaacggcctaacttttaattaagattataagagttggaatctagatgatgaattagaagccataaattgattttttttcagcttcttcagattctcatcagttagattctcatcagctgcttcttataatctaaaactccctaaacaaatcctttattttcttcttaagaaaggattgccaatttggcatgtgttgtctacggcagagaggtgagcagtctctctgccaagaaggaattcagacatttcttctcatggtccattgcttcgacattaatctctgcaatggtacaccatcgctgtctcctctagtttggtcaaacaaacctacttcctctattctaaaatataacaatctaaaataagataagacacatcataaactataaatctggacataatagtggatctcatcccatactagattactatattttggaacggatgtagtaatgcagaactgatataggagtatccaagtgccactagtagtactatcctgtcacaactcacaattcacacatgcttatttcatgcagtttcccccttttttttaactttgctgtttctctggagctagtgttcgtctgtatcgcagactcccagtttgtgtttgactgcaaaaatccatgaacccccccaacttctcaacctctaggaaagagagagcagaatataaggtgtgttatgattgtttatgttgtgatcttgtgatctttcagttgtacagatggacaaggagcgaaaggacaaatgtatcatctgccgtgcttgatgctcccttgcgtcttcggttgagggagcaattagcaaataatacaataccttcagatagtgattaacacgcgtaggacaaaactgtactcctctgagcctgaagagttattccatggcaaacatgaacggtcattttgtacctttgagttaatctgtgtgtgtgtgtttgacgtcttcctgtccacctgtacattggtcggcacggcctgcaggaaaggttacgctgcactttcttgtgcacatacaattatacaaacttcataaatttcttttctttcagaaggaatttttcatgtctgaacatgaatgtgattttgtgtacatctaatcagggttctatatttcggaataaaatatatttcgggggttaacgatagaagaaaaatttcagaaatcatggaaatttcagacaaaaaaaattaaaatttgaataattttgtcttatttttgaaaatttcaaccaaaataatttcctatctggaacctaaattcctgaaaaatttccggaaattttggaaatcgcaaaatgaaatattgaagcctacatctgatcagttgatcaatctggaacattatatatattgccagagcatcaaacctttttgcacatatgtttgtgactattaataaatacacatcaatacattcatgccctcttcacttttggtacatgttgaagaaatggagcaagattgccatcgcctcaatcggttggtggtgcaacagaaaggatgaaacagatgacacgtatggttttccagtgaagtatctatgtggatgaagtgcaggggaaggcaaaattcagctccagcctacacatcattcggaagttggccaaaaatttgagtaacaaacaacccgctttggtttgtccccaattccaaccattttgagatcaggaaatgctatcattactggtgtaatctggggcccctcaggccaatcagtccaaattaaagtaaatcaaatacccccaatcatttgatttggttgcttaacaaatgatcatatcattatcttcccggggggcctatcatgtccacaattccaacctaattacctcaaaagtttttctttagttgtgggcttgtgggcatggaatatatatagctagcttttcttgcaaattttggagccaattatcttaagactgtagatgtcattttttttaggtcgcactcttagtagtgagtagaccttgtgtcactgtctgcatgctacttgccaaaatgcatgccacacattggtaatgcactaatactagtatatgcatgcagtttacgctaggagaaatacagatgagcagagaaaaagaaagaaatgtgaccctctaccagcttcagatacacctttcacatcgccagctgtagttagttcatggaattatcatcaagccaatgagaaagcactgaacaaaataccttctttttttaaaaaaaaaggaactggacaaaaatcaaatgtctacgtatgtaagtatctgtctgcacattgacaatgattagtacataatttggacagttcagatcaatttggatattgcagttacaatccttcctctctctttttttttgggtttgcatagtcaatcattagacaatcatttgtctgtgggtatgtgtatatatatagatggtgatcaattatttatttcaggtgtttaaagtaagaacctgaggctatctaacacatgcagaagcaattcatgttcatcagtaaataatatctgtttcttttcccaaatacatgcatgaaatgggtagttagttacaggctacgtatgtgggctaagttgcttgcattgcaatacatgcagcaagggagcatctcaacaccctagctatctacagaaccaaatatatgtagttgcaagcactttgcttaaaacaattaaagttccctttcctttaaaattttctcctctgtaactcaccattttccctaccttctacagaaaagaactgaatattgcaacaccacagagtagtacaccacccatactagaactgaagaggtgacagtgaaaaaattatgcctttttttgagaggaagaaaaaactctgcataactggtgagattaaaaatgctttttatccaaaaaagttcttaaccttcatattagttaaaaagaaaagttggggagggaataatacatgactaggaaaaggccatactgtgtaatatccctcgtcaaacgtaaaaatttgtttttttaaagaaaattgattaaaaccagtcctctacaccataaaatttcgataagtaagaaactaaagactccacaacggaagctaacaatatacaaggctctatcagaaacaatcaaatcatgggactcatgggattctgcttagtttaaaatgtacactagtcaatgcttcaaaagttaaacaatgtaacaagccaacaacttacaaaggcgacaaataatcccgccggtggtttagtttactttactgataccttccaagctaacatgaactgatttttggtcatcattaagcctatataaacatatcaaatcctacgcactaggtcgttaatcatgatggcttgctcttcctgtaaacataaaagggcactctaatattagaaaattgagtccacgaaatggaccagcctccaggcagacactaaacaaaaaactaaatcgtttcgtttgactaaaaatgagataaaaattggcatgaaaatcccatgtctgaaactgctctaattaaaaagatataagcacaaagtagagagggacgcaggagctacaaaagcatacacgtgtggcccatcttgccgagctgccggacttctgaattttcaggtgatacatcttaatctgacgacaagaatcgtcgctttggaagctctttttctcctcttttctagttcagagagattttctgacgaagtgccctggtttttccttctgtttttttagttcagagagatttctgacggagtgccctggttggtggtgatcctggtttaaggatgttgaagcatacgccatcacggaagctcccgtgcaatgatctgacaacgcaaaaatgacgtgattcagttggttgcagcataaatcaattcggtttgatgtaatagctgtaaaggcaaaaaagatgaagtttcaaatggggcatagagctatgaactaattttgttcatcccatttcaatatactttcttggtttctgtttgtctctgacaacatgaagcaagctccaaacatagtgttagttgaacaattgtaattagaaagcaagttgcatgcttggacactgacttcacaccagatgttcaatgatatatcccttaagccgtgtttcttcatcggccgtacagtacctggagccggaaaatgattggaaattgcttgagaatttcaatgtttatcgtctagctatggaccaatatatgcctgatttgatgatcaataaactcgaatacacgtttgcttgcttcttttctcctcaagagaatgttcgattatccaatggcttgttgtaggatgtagcaatactctctgatccttactgatcaacgactcttgggaccccttgtatgtgttttcattcgccaattatccatcggattttctttgaattaggaaatcaacaattatctttgatattatatctgatctcaaagagagttgacgggtcatctgtcccttgatgcgctgaacaaaatccatttgcgtaccgtcattgtcatcatcattataccatataccagtctagaattttttaaccatgcattatatatatcatacagtttcatatttttgacaagatattgcacatttcaaggctgaaaaccaaactcaagttttcgttgttaccacaaacaacaagtgaaaggaaattgatggtctcacatagacatgaggtgacgtccattcgtaatctcgaggtaccatcggcacagctgcatcattcacataagctgaaacatcagaagacaatacttctgtacatgtttacagaattatcagtgagcattattcatcaacatatggcattaaacgtatttacagaatcgattggtaaaataaggcactcataaatattagttacttcttaatatccaatcatgaatttcagttgaatcatcattacttcaattcccttgcatttctttaatctttgaaaagcaattcccttgcattttcaacattttagtctcaacaatgtgtcaatgtcggtcgtcgggcatagacgggctgcacaaccttgtacaaacatgtgtagcagtacttacagttacatgagaatagtgcttacaacggcaaaactgggactcatgctctacgcataaagaattcacaataaacctcagatattgaaatctctctcgcccttccctttcatttcatctggtttaagcacgtgcattagaatagtcagaacaaccttcatgatttcttcttcatcatatgatgtcgtaaacgtaactgccaagtgcagatattgaacaagttagaaacaaataacgctctttgctcaactagagaaggaaataacctaactaagcaacgtgcatcttctggaccatacaggcatacatacatagatagagtaaaatatgcggccaaagcttaccccaaggaaggattgggaactcccatctctgcttaggaactgatatggcatatgcagtaacctgaaaagaaatgagacatcatataaatcataattcagcagtctatacaaaatctcagtaacaaaatgctgcattaaataacatacaagagctgaagcagcaagttgacagggagagttaaaaagccatgaactatcttcagtctcataaagaatatccaaaatttccatgcaaacatccatatttaaaagatcacctattttggatatttccctggcaatagacaagaaattaagtgatatatcagtagaaactatatggttaagcttctcatagatcaggaagtcaagaaaaaaaagcaaaaactggtagtttaataatgctgtccggcgatggtaatactaatacaggtaaacaggattgctaaaacaaatgataccctggcaggacagtctttcaagggaaaggaagaccaatgggaagagtggatgaagaagcaaaagattctttttcttttgttttattattcgcttcctcagaacacaagtgaatcacaaaactagttttaaatatgatctgagatcatctatactaacatgacacatttaaacatttctagtgcaaaattttggcactaaaaagtaagaactgctataaggaactaggcatacactgattgtgcttggtgagtaaaataaatgcaacagattatagtgaccaatcagtacagctgtctgttgtgatatacatataatataattcacaaatacatagatgtggacagtggaagccataaatgtagacttagaagagaagatatgttcgtcaagtatttattagttccaaatattcaccctcaagttttataacttggccctgaggcctaaaaacgtggtgctactgctaactgtccattacaaacaataaaaaaaatattaaacaatccaaagaacctgaattgcacgagaagctcctctaggtatgtaaaagcaatgttcaaggacccaatgttgtattccactacctacagaacccacaacacgaacaagaaggagataatctttttagacaatggaagtacaagaaaataatagaagggggaaaaggaatataacaatgaaatggagcacgccatgtagttgtatatatttcgcattacctccatgaacaccagttcctgtggcattacagcaaacaccttttagccactacaagaaaactttcaaacaaggaacaacaatgcgtcgataactcacagcattggcgaaatcgcggcaagtgaaatgctggtcggcgatgatgcgatcaccaagcgccttgaggctcttcaccgacagcggcttcagctcgtgaatctaaacaggtaaccaaatgaaaaataaaaaggaatgtaattccacctctcatggcaataaatccacacgacgtttgctcaacaaatgctcacagaatcaccttgctggcgatccacacggcaacgagggcgaagagctccaggttgctgtccctcagaggctcgagcagccaggaggtcacagctcggccaccccgtgcgccacagaaccccatcttcctgcagcgacagcgagcaagttagtaaaacaataagaaaccaatttaacccccacaaaaaccaaggtctcaacttcgcggggtcacctccggagggagggcagtaggcggtcggcgaagaaggagagcgcggtgtacttgacgacgggacggaggtcgagccgctagaaaggaatcgcagcagaaggcggcatgcgaggtgaggtagctgtcgaggggaccatgccggaagctgagggggtggaggggagcccgtaccgtggaggcgtggaggaggaactcgatgaggcggcggcggcgggaggggccaggccacgcgcttgccgccgcctccaccgcgcggtcctcgtccatggtggtgcgcgccgcggtgcggcagcgaggagttgggacgccggctagattgccgaagaggtggggagaatggaggagcggctgctcaaccaggcctccagaattcttcaacggcccactaacctcatgctttcggcctgttcggctcttggtgttggaccctgtgaatagtgtgctgttctatatgaggaaaacggaaggggatcctctcacgtgaagtcagatgcctacatgtcagtgacatatcacgaagaagttcaagtcatgtatccctttccaaggaaaacgggtttggctatatgtttctttcgaagttgcattttcccgattttgcatttcaattagaaacatatgacctatttgagaattttttggtgactgcagttttttccaaaatctcagctcccaaaacaattcatattaccactcggattctgaattgaaaaacaaattagaagccggaaattaagaaatcagtttatttcatattttcaccggctggctattaataatctctctaaacagaattacctacattcaagcacaagaattatgcgttgtaaatttatatactttttaaaaagaaaaaacaatgtacatttaattgttacacaaaaaccaacatgacaactctagggatgataggatttgcttagttgatcaattgtcaaattctgaagagaaagaccgctcaaactctgcatccatgaggacgccggccatgacatggacaatgatatcccgctccttgacgatatccacgcactctgacggcacgccgttgacgaccagtgcaccgtccacgtccctcctccaggcggagatcctcagcccagacacggactccaggacaggcgccaccgccaccatctgctgccggtggcgcggcggtgccacgtccgcggcgcgcaggcggcgagggacggcggagaagccgagcacacgggagacgacggcgtaggtggcgtcatcatcggcgccattcccgttggtagcgctgtcgttggggcgttgcagcttgaggacgcggcgaaacgactccggcgagggcacgaagacggtgaaggcgaggttcttggggagcatggacaccatcatgtcgccgaactcccccaggctcgccgtcatgtcgtcgcagttgacagatggtggtggcgaggaagacgaggatcttcgtcctgatgacacgacgctgctgtcccgcaacgacggtggcgacgaggagggagctgaggtggagaggagaacgaggacgaggaagaggagcgtcgctgcgaaggcgccaccggcgacgccggcatggaggtgtcgttgccatagcagccgtggcctgaccaagaaaagtctcttccttctcttcggcagcatattcatcagtgtgtgtcctcgctacctgttgatttgctggtcaggttattggcacgaggagatcacgggaggggtcgaggcagccgcccggcgatgtgggcgcaggagcacagccgcacatgacggatccggctaccttgcctccaggggcggcccaggtttttcaacttggctattcgaaattgtaaaagatagaaaaatttttccaacccaagatctaatagttgtataatatgtaacggtataaacatgatttcataaagtcataaatggatagaattgaccataaattgaatgcgttaagcatattagagtacagtactaaactattaattgacaaaacatatcaaatttatagagcatacaaaactctttaaattaaccatgggacctttttttctcttcatgtttcaaacctacaaacaacaatatcaaagagcaattgagcaaagcagcactggttcctaaatcctaatctagatagtcattcacatttcacaagctatgaagctaaaataaccaatacacttcacacaatcacacaatcagtcaatcacactcatcaagcattcaagcaatatcctcattagtcagtttcagttcga

SEQ ID NO: 6220 - DNA, 32079 bp, Oryza sativa
  unsure (1)..(32079): unsure at all n locations
taatgggaactctagctggaaaacttgattgagggtcagacggcagtgtttggcacaaccatcacttgctgactgataagatcatgtggacgccgcgattgtgctattgtctttaaagaaattaaaaaaaaatcataaaaataaaagtcatgagaaaagattaaaagctcatgttctatgctttgttatcatgttgatactctttatgaactgggcattagcacattagcatgggttcattgctttgtttatgtaaatcttgcatgattatgagctggtttgcttccttttaagcttcttctagaaatagctttgcacactaaatcactaattcacttgaaagctttttgcttgctggcgatactaacttgatattcatgacttgtttcatacttcttatgcacatgcttagctaggcttgagcacatgcttgtatctatgtgatccatgtctaccttttgatgcctttagataactctcaaagctctcaaaacctaaaatttgcaagtttcatctcatttttatcttgcatttttgtctcttttgatcttgatggcatcattgacaaagggggagagaaatttgcacttattgaaaattaaaacttgctttaaatcttggtgaaagggggagtttggcacatagggggagcattcttgcatttgcatttgcatcccttttttcttcttgtcacttggtcttgatttttcgcgatttcaaaatgaccaaagttcgcttttgcaaaatggtttgctttgtgaatcaaaaatcaaattttcaaaattttgcttgagattgtcaatgttcccatcaagggggagattgtgaaaccatgtgtggttatagttcttttgtgatgggaaattgacaagtaccggatgtgcaagaagtgtgtgtgtggactaacgttggtcaggttgcgacatctgtgccaagacaacggttgtttggttcatgtgtgtgcaggtgatcggggtcgatcttggtcaacggcggatcgggactagactcagggaggagttgaggtccaaagcgatcaaggatgccgggtgacaagattggacacaaggttgcacacggtggacgaacaccgtgtgaaaaggtctttgcaacaggcttcacaaggccaagtgtgcaagcatcggattcgcgaagaaatcagaagggactgtgcaagtgcattgctgctacagtacttgctgtaggtagcatacatgcatgtacacgtactgtacttgtgcaaggaggagcttgcactgtactggttgctactagcatggctcggtggaaaagtcaagctagctagctgtgcatgtgcgctgtgattggttggcagggaggccaagccaatccagccgttccacgtggcccaagatggtgaatggctcggctcggcaggcctgcatcgtccaagcagcgacggcccaagacggcggcccatggcgcatgggctcaggaggtgcaggcagcttgcatgcgcaaggacgcgcgcggaaaaaccgtacgcggcaacccccgtttcgcgtgactcgatcggaggcgggtgcaggagcgcgggacccacacgcgattttgcaagcgcgcgcgggagcggctcagcgggacgcgtggcggcttcgggctggttgggcgctggcgagcgcgcgctgaggaaaaggagacggaacgcgcacgacgcggctgggcaacgtggcaagtttggattcgtcaagacggagagcacgcggattcatcagcaagaagaccatgtgagggttcggatcgatgaggtggcaatcatctggagcttttcctttgagtagaaggaacaatggatggaccagatctgttctgagttagggtttcgccctaggggtatttgagacaatgtcttaggggtcttaggctataaatagagagatggatgcaagggtggaggtcgctccttttggtaatcattttgagatgctcggtgagagagtttccgtgtgagtttggagtgtgtttgcccgagaggcttttgtattaggattagtttggagtgtgtttgtccgagagattttaagtttgtgttaatgttcctctgaaggtgtatgtttgctcctagttgagcggttattttgcatcacctataaatgaaatgatttgaaggatttcatttttgccttgtccatttaaattccgcaatttaaattccgcttgcaatttgaactttgcgatgatgagttttgctctctctttctcacctcacttctagtttcgggaattccttttctcttcctcctctagtttcgggaattccttttctcttctttttctctcttcttttctagatccggcttctctaatagccgcgattctagtaaggattttgagaaatccggcttgatgagtattttcgggggcaagatttgaattgctatattcacccccccccccccctctatagctgttcttggtctttcactcttaaaaaaaaacaaaaaaaaattatctcatctttattggctatattaattcatacccttgtaagattatgtgagtataaaagtatccatgcgatggccaaaggtggagaagaagagggaaggggctgacgggtggggttcatgttgctttccacgtgggcatgccacgtatgtataaatagttaagaaatcacttctctccagtgacaaattattaaacgcgagcataagagagacgacaggcaaagccaaaccacaacatcaatgtggcggggatttgacgcgtttgtcatcctagttgccttgacaatttgaaaagagcgaaacaaatgattgggtcttgaatgaccaatgcaaaacattgcgggaagttgcagaggtggcagtactctggcgtgatatgggagtacctgtctggatggtgtgctcagtcattcaaaaatgtgttgcgagagatcgtcatgtcgaaagggctttcatatcgatatgtattaaggctgcgttcgttttgggtgatagggagtgagaatgcacatcgtttttcgcgcgcacgcttcccaaactactaaacggtgtgttttttgcaaaaattttctatatgaaaattgctttaaaaaattatattaatccattttttaaatttaaaatagttaatacttaattaatcatgagctaatgtttcacctcgttttgcgtattttctcaatctcctcaatcccctcctcctcaaacacaccctaagagaggagtgagtgtgttcgcggggaatcgagcgtaggccatagggcgcaccacctcagaccctgtccactgcgctaggcgcagttctcgtacctccttttcttatcttttgtacatagtttgtatctgagcgaaaccaatttcctaatttcaatacaatgatatgcgctttgtgtataaaaaaaaaaggagttaatgatctcaaatgatagaggagatgataatgaatcatacaccaaatacacccaactgttcaaatacaaatttcaggtattttgctgagagtgaattaaacagcacattcaaatctacttcctccatttcatactccatttcatattataagtcgtcggacttttttcttaattaaaatattttaagtttaaccaaatttatagaaaaatatagtaatattttcaatacaaaacaaacatattattaaaatatatttaatgttaaatttaattaaactaatttagtaggtgttgctatttttttttataaacttggtcaaacaaaaaactttgattaagaaaaaagctagacgactatgagtagacaacagttcatattctgccagctactcatagccagatcaagcaaaagttcaccatgaaaatcggggcatgctttgcagcaagattttcttacttttatatatgaaaacgggtgcatgcttttgcaacacaattgtccttttccaccaccattatattgctaatgttaacaaggttcaggaagccttcttacatttgtacctcatggcacagaacacaaaggccagcatattcaagaaacacaagccagccatcatccagaagaaccgatccaaatgcccttcgttcaagttatcaggtatccatccaggactgccttctctggctgtgaacactggcacaagagaaacgataaacgagctgaggtaacttcctgccgaaacgttagcaagtgagaatgcgagacataagcttctcatggcgtccggtgattcctggtagaaaaattcagttaacccaatgtttgagaacacctctcccacgcctatcaggaagtactggggtccctgccacaggatgctcattggaacagccaccttcctgtgcaccaaaccttcatcctgcgcaatccgcaaccgattactctccaccaatgctgctgataccatggagagcatggaaaagaacaggccgatccccattcgctgcagtggagtaatgccatttgctctgccagtgaattttctgaacactggaacaaggactctttcatagactggaactagtataaggacagcaatgacatcaatggattggaaggacgccgcaggtatttcgaaagagccgatgtgtttctccatcaccatcccctgttctatgaatgtcgaaaacatgttgtccagaactgcagcaaataatatcatcgttgcccaaacggggaacatcctgatcaaaatcttcagttcctccacttgagtgactgtgcaaatcttccatgtgtttagtaggccatcagattcaaaatcagatggtgtcaccattgcagctctatcaaagaacctgagagaaataaaataaatagatggctaacttgatagagctgagatggaatggacagctccttgccgactttgcattgacaaacaaaggttcatgaacaatgaaggtttgcttctagtatgtataaatgaacagcagaaataagtgtattacgggagactttgtttcaaaagcgatatcacaagagacatttctttagagaatattataaacaatgtgctgaaactcttgtaatgttaactggttttccatatttgtattgtgtgatgtgtcccacagaagaattttcaaagagtgaaagaatgaaatgctttactggaattaagtatctctactccctaaaaagaggagtttcccaaaatattaaaattattattcaaagtgttactgtaggatttttttaaaaaaatatttgcatattgtacacaagtatatggctggttgatataatttaatttagttttatatttcaagccatcattttgaaattttaaaattaagctatatgatattcatgtactaccagtgttttgtaatatacgacgctgttaatttttggatctaatgtttgaccattcatcttatttgaaaaaactatgtgagtaccatttttttttgttgtgagttgttttatcattgaagatagtttaagcatgacctatatttttgaatgtttgcactaaattttctaataagacgaatggtcagacatcatgtccaaaagtcaatagcatcatatacttaaaatagaggtagtatataaaaaccagtgcatcgcatgggcactacactagaatgagttaaagacaagcttacaaaatcatattactagaaatgaaataaattatagttcaacagaaatgcaagcataaataaaagcatagaatataggcatcaaagttgtaatgtcaacatagtgtattacttaagtccagttgtatgctccaattttcggctgccttcgattgctgaactctgccccagaaactcataaagaactgaggaatcacatggcaaatctttatcgcgtttgtgaatagcagcaacaacaacctggcatattctcgcaagagggcttcctccaggtttctgaaatctatacatagaggagccaaagataaaagtaccaaaacctaaatacacaaatagtgcagaaatggtaaaaccccagatccaacctttgtgatcttgcacccacacaataacagtccccgagatcaatgagcccgcattggctacgaaataggtccaattgaaaaaagaactcttttttgttctctcattttcatcagtgtcatcaaattgatcagcaccaaatgatgatatgcaggggcactgtgcaccataccctaaagcaaccatgtacaaaccgacaaagaatatgatgttctgagaagagactggatctgtccatatgatccatgagtgaggaccagtagagattaatggaactgctgctgacagaagcaacatcatcaatccctaaataaaaggataaaggaaaaaaatgtgaacgaccatttctagaaaaatggtataaaggaaaatgtaaacggtcatgtctagaaaaatgatataaaggaaaatgtaaacaatcatgtctataaaagtttgtcaagtgttgaatgcatcactcctcttacatctgaagattaactgtataaactagagtttaatactgccattcgtccatctgaatttcatactattgttcactgaggatacaaatttttgctcactgagtggacgtaggaattgggatcatctcttacagtgtttacttccaaaaaaaaaggattataatcgttattttagatgatatacaaacgtgcattagttcatactgtcacttacgataatgaagatcgtgcagaagatcagaattgtacagtacttccccagatatgaatcagctaagaaggctccaaccagaggtgcaagataacttgttcctgaccaagttgcaacatctcttgcagcggccacgtttgtttcatgtagaacttttgtgagataactgactaggttttttacaattgaagtaaaggccagataagagcagaatgaaaaaactgcaataaaaaatgaaccataaaaggtccagtataaaattaaacagaacccaaacacaggaggaaagaatattcataaatcataataatactgtaatatatataaatgctgggaaatgaaatcagtttcagatgttcgagtatttagcatcaaatatcctactatatcttcaagcagaagcttgacaatgcaacatcatttttcagcactaaccgatggctaatgaggaacccttccagttccctgtatgtttccttaaagcaggatgcccacggatgcaaacagatccatcacctgtatattcaagggtctgcatttccaagtaaaaaacacaaatagcctttaatgccagtgtcatccatcactggtatagatgtttcaatagagaattgtgcattttcctaatgtagatggaattattctatatatttccaggaaaatttatcctaagaacaaaattatattatatacattggaagcaaattaactgatcatccaaaaaaactgcaaagtatcactaactaaaaacattattagtatgcaagggcctagccattcttatggtcacattagtaatatattgctaccactttatgtccttattgtaaggatgatatatttagacagaacatttgaaagtttatcttggattgcatgccccagtcggccatgccccatactagtgcaaccatataaaataattttaagtaagagaaaattttccgactgaacttcactctatatttcttttttactttcgcaacactctagaactagagcattaaacagaaacaaaacatcagctgaaagcagtattttcacaccatttgatgaaagcagaaaaggcacctcaaatttggccaaatatttttttctctttaagagaaaaaaatcagacaaatctcgctatgagagtgagagagagagagaacaaaccacttgcgaggagttctcttcatccagcagaggcttgtcatgctggtatgaggagtccatggctttactttcttacaagtaaaccaggttaatgtcctgaggaagaggaaagaaagtagcctgagattttgagcagatagtggaagtgcagattagaggttttaatggaaaataatggaaaacatattgccctacaataaaaaaatgccagagttataatttataaataataatagaccacccaacaactgggcatactgtgagtgatgtcaggtttcagtttagacaagcagcacgttgggcatatggctatcatttaatcagaaaaatctgtcgtacagagttttaatgtgataatcaatagtagcctgtagcccttttttgtccattatcttagactgacgcatcagtactagctctcacctaaaattactagtagttctagaaagcaagcggcgtcatggcatcaatcatctatttcagaaatgatgggccaactacttcgaataaaaaaacagtatttatatatttcttccatcctaaaatatatcaatattgtactaaacgagtcacatcatattactattaatttagacatgctgcctatctagattagtagtaacatgctacatccgatcctaggttactatattttaggacggaggtagcaaaactaaagccgtactcggtagtaagtgaagtatactactatctccgtctcaaaatgtatctatttttagtacagtaacttgtcccaaaatgaagctatttattcacctactctctcctcttaaccaatcacaaccatttttttcacctactttctcttccccatcaatcacaactctcctccaatcatctctacctacttttttaatatctgtgtctaactcaaaaatacttacattctgagacgaaggaagtactcatcagttgcaacggattgagatctcaccctactctcttgataaacgaagagtgatcatcttggtagccaatatgatgaaacactcacacggactgagaagacagaacctgctacgaacaataaatgggcagcgcatcaaccatcaagtaatccatctaacgctacgacctatccatcttctaattggcgagacggattagccatcctgacgaacgccgtaacagctagagctcagccgagaggcaagcacgcgaacctaacatggatattcttctgctccccccattttccccttcgctagctcgcttgttgggggaaaagagagaagatgagaccgtagcatccaccctcccaagaacttctctctacaactaactttgcaaaattcaacgaaggaacatgcatgcgactaatctgacgagatagtttgcaccgaaaagggggcaattaaatttgcctcgcttcaggtactagatggagacgaaaatcggagaaatcacgcaccgagagaatgaagcatgaaccggccggattggccggactccggcgagcccgacactgagcccgccactctctgctgctccgcgtgggccgtcctcactctcctccacgccgaggcgaaggcccttgatgattttgcgctttgtagagtggggatgacacgcgggtccacctgcttggaataatgctaccggtgctctctccgactccccttttcttttcttttttacttcttttcccgattacacggaagtggagagtcacaactcacacgcaccactgcacccgcatgtaactctcactaaaatagaaaatgagcaacggcaaattataatgtctctcttttttccagcttcagtttccttttatttttcctgcacgtaagcgcctcatgcaccaggcgatttgtcttttccatgtatgttgttcctaaatttggatggtactgcaaatcctttatatttttgagctgtcaagcaaatatactgctagacattcctcgagagggaaaaaaataagtagtattgtaagtttaaatctgattaatgcactagcagtcaaactgccattcaacctttttaagtcttcagttcagtttgacacactcgattcattttttcctggaaaaagtatactttaactccctcaactatggccagagtacgattcatgacctccaaccacaaaaccggatatatcgactcctctaactaccaaaaccggtgcaaactatatcctaggtggttttggttgacgtggcacctacgtggcggtgttgacccggtcttcgtcccacgtgtcgtcgacgtgtcgcttaggtggcattagagtaaaatcaaaaatttgtaggaccaacgtgtcattaacaaaaaaaaaatagtgggacccaccgacatatggccccacgtgtcattctcacccctctcccctctctctcatcttttcctctcctctcaccttcaatcactagagcgcggggcggcggcgacaacgcacagggaaggaggtcgctggccgtccacgcgcgggggaggagctcgtcggccgttcacccgcagagaggagctcgccagcgccccatcccttcttcttcctcatcctcctctctctctctctctcccttctctctctttctctcccctttctcttcgtctgcaggcggcggtgggtgtttgagggccgtagcggcgacagccagcgggagggcgggcgctgcctcgagacggagcggcgacgaggcgccctcgaggcggagctacggctcgtcgtcctcaaggcgtcgcgacggctcccgccgcgcccacgcacgtcgcgatgcctttgccgccgccgccgcctacctcgactacatcgtcgacaacgcggacgagtttggcggcacctgctgggccatcaccaagttcagctgggacgtcaagtatgccggcgtccagatccttgccgccaggatacgtcgtgatagcaacaaacaccttgcattgacgtgatatgatgtcagtgagagtgagctatgtaggcgatgagtgtgaatgtattttgcgtgtgcagctagccaactactgatgagaggggagcacgaggagaggcacagggagacactggagaggtacatgagagaaggcagagcaccatgtgtgcgcgtgcatgggccggcggcgccgacgccaacgtggagcagagccccggcgccggaggcggcgacggcggcacaggcgtcacgacatgcatgggcggcgggagccatcggaacgccttgaggacgacgagccatagctccgcctcgagggcgcctcgtcgccgctccgtctctaggcagcgcccgccctcccgctggctgccgccgctacggccctcgaacacccgccgccgcctgcagacgaagagaaaggggagagaaagagagagaaaggagagagagaggggaggaagaagggatggggcgtcggtgagaatgacatgtgggcccacatgtcggtgggtcccactattttttctcgtgtgaatgacatgttggtcctacaaatttttgtttttactctaatgcccgacacgtctacgacacgtggaacgaagaccgagtcaacaccaccatgtaggcgtcacgtcagccaaaaccatttctaaaaccacccagggatatagtttgcaccggttttggtagttggaggagtcgatatacccggttttgtagttggagccttggaggtcatgaatcatactcgggccggagttgagggagtaaaagtatactttttcctttttttccttgagttgggcccaaccgcataacgagcagagcacgcaccgtgggacgggccctgcaaaaatccgtcgagagaggcccgtgttatcgacgcgatgtgggcatacggcatgacggcccatgtccaaccgcgccagtccctagttccctacgccgcccttcgacgctttgccgaacgaagcccaattcggtggcctagtttcatcccttcgcgctatccagcaccgcggctcgcgctcaagtcggcctgtgtggtgtgctcggctgctcgcgtcgcggtgtgtcgtgtgcgtgacgggggtgggggtgggtcgcgcccccgcatcacagcgtccgttcaaggcttcacgcacatgccgcgccccgtgattggttggtactcctatctctagtagctggtgtactccgcgttgccgggtcgtcataggattttttttttcctttggctccctgcttggctgcttgtttttctttctagcagttaagtaaagggtatgtttattcctgcaccagaagtagttcaagagtatatatgctcgttacagatattcttccttgcattgcatgttacgctcgttacagatagcttacctgcgaattaaaaacaagggagaatatagacgggtgtgctgagtaaagtagcaagataactcccaactactaagagcatatatacccaataccaataaagatagtataatctaaacaagctagtaaaacgccatggtcggctcgcgatagcagtgcatgcataagagcaagtttaatagtatagccaactactagcttcaattcatctatagctaatataatagcttattcatgcaatagttatatactacactattaatacatggtcccacaagtcatacacactgtgtctagaggcggatccaacgtgggtgcaggggggactnnagtccnccntncaccnacaagacccatggatacccccggagcacccccttcgattttttcaccataaatgctaaattaaatgtttctaaatggctagaggttgaagaaaccatgtaattgaggccctcctcccctaattttctgtttctggatccgcccctaattgtgtcttagagtccgtgctataattggctacaaatctgtagcccgctactcttctctctctccttatttatcttcttaaaatatatttacagctagcttatagtctactattgtacctgctctaaagaagtcctcgatccttgctccttggcacgaagcaagcaccagcgcagaaattcaacacgatacatatccgatctcacctggggaaggctaaaaatgggcgtacacacgcacgccgtcacgtggatgtttcttcccggcgaccgactgaccaaaacatgcacaagccggggcagcggagacaagtacacgtggtcgactggtggtagctcgcacctcccccggttttggccttctggttctactagccttctaggcgtccagtagccgcgtcccttcctttttcctttgcctttgcggctttgcctctgatcccaagtcccgacgacagtgtagcgtacgtagacgcagcgcgatttctcagcgcggacggccggacgggtggtgtggtgtttggggggattttcacaaagaacggctgaaattttctgcatgccatgtacgatcgatgcctgcttttgctacccgctgcacaggctgcctgccctaccaacctaccagcgctttgacagtttgtaatgggaaagtacagttaattagtaacgtgcatggactgcttgaatctttctgctacgtctttgccccggtccgagcggaggtcaccaggtacgtatcgatgttagctttttatacgtctttgctccgtattgtgtggagtcatgaccgtagaaatgtcaagttttgatctcatgcaagctagtcaacacgatctaagccggaaatttacctttcgttgtctgctcaaacggtaaggcctgattgccagggaaattaatttgacgcaacgaaaatccggcaaaatccatgtgtttcatttgagtttattgatattttagaaagagtttttctttaccattcttgagacctctttgtacctactacctatgttccaaaataaatgtattcctaggatttaaaatatgttccaaaatagttaccattttagaatactaattatcccaccaatcacatttccattcaaatttcttcctattttaccctcagccatcctccaactctcatctatacaccgtttgatgagggacaccataatcattcgttttaaatcttaatatatgctaaataatctagagttacaattattttaaaataaaggtagtacttaggagtacattacctaatgattcgtctaggttggtgcctcacactatgtacatgctaaacggtgtgttctttttaaatatctctaaaaaaaggttttaaaaatcatatcaatatattattcctgtttaaaataattaagtaatcatgtgttaatggttcatcttattttacatatcttcttaatatttttatttcctttaatgcctaaccattgaaaaaggtattaagaagatatatgggtaagtaatttctggtttcaaataactcccccctcctcccaactagcccgtgagatccaagctcatttggcaatctccattgggtggccattcctccttaggttgagttcgtttcctttctttcccaacctatctctattgttttccgccattcccccttagagcaagtttaatagtatagctcactactagctccaattcatctatagttaatgtaatagccaattcatacaatagttgcttactatactattaatacctggtcccacctgtcatatacacattacatcttggagtctgtgctacagctggctacatatctgtagcccgctgctattctctctttccctttatctctttaaaatatgtttatagctggcttatagcctgctattgtacctgctctattaggctaagtttgttttttttcctttcccaacacatctctatcgttgtcggtgatatgggcccgggggtatcacgtctagagggaggaggccgcccccaaactcgcgtggctccccccgaggggggtcgaggccggggtgttgcggcggctgccccctcccagcttggggttgagcccggggtgttgcggcggctgccccctcccagcttgaggccgggccgcccctaagcccacgtggctccccccgaggggggtcgagcccggggtggcgcggcggcagccccctcccagctagagggaggaggccgccctcaaacccacgtggctccccccgaggggggtcgagcccagggtgttgcggcggctgccccctcccagcttggggtcgagctgccccgaccccctttacgtatcagcccacatgtacagggttaggtgggcgcgcctaacgcccacctaactgcatttaaagcggtctatgcaatcgcgccatgccgcatttaatgcggcgtgctgcgcatttgaccggtctgtgaccggttgaatgactgatgggacggcgactgtgtacccccgccctgtcagtgtgtcaggcggcgagcggcgtgctccgtcccgtcccatcataatgatggggggcttcatagcctcttacccggtcggagctagttcaaccactctgaactgacccgggttcccgtttctagtgtgaacgagaacccggaagtcctcatccattaaatggcgaatgacaagggggccctgcatgatttgatgggccccgcgcagcaaccgacgtgcagatagcttccgggctaaggctcaagacatgtaattaatatagagaatattttcccttctccctaggtaggactcgcagcacatgtggtatccccttagagtataaaaggaggaccatgtctagcgaggatgggggatcggactgaggatccctgagccaaagcttgtctaaccctagcttgcataccagggattcagggactttctaagctcagaagaatcatacacacaggagtagggtattacgcttcatagcggcccgaacatgtataaatctcttttgtctcgtcgtcttggaggagcttccgagatcaagatcacacacagttttgctcaccaaattctcgaatctcacccgctgcccccggccgaactcacgaaaggggggggggggtctcacgatctcccgctagagagagtcacccctcgacaatcgttttccgtgcacacgcttttcaaactgctagatgatatgttttttttaaaaaaaatctatacgaaagttgtttttaaaaacatagtaatttattttttaaaaaaaaatattagctaatacttaattaatcatgcgctaaccatcgcttcgttttgcgtgctgggattgaaggttcccaacctcactcacgtgcatgaccccctccccccgaactctgggcttgttcggaatggagggattacacatgatttttgtaagattggcaaatcctttggatttgatgcattcggttcataagaatcacgtgtaggaattttgtaggaatactatagcaaccctgtgaaaacgtaggaatttcataggattctgaacatccactcacatctctttttttttcattagctaccacagggtacatgctaatcacgttggattgactagatggaaactaatattttattgtttaattatactataatatatgagatcaatattaattggaaaattcctacggtttatatattcctgtattccgaatgcttcttaccatcaaattccttcgtttttcaatcctacatcttacataagcaatcctatattattcctgtgttttttttattcctatatttttcctattatgtgatccgaacaagccctcacaggtgacttcaacctcttgggcaacccggccttccccacaagtttgctagctagcgaccatcgtctcctgtttgatgagcacgaagcacattgaatgagcataggatgcaatttttgttcttgccttatccctgttgatggattgattagattttgttcagtacctgattgtaagggactataaaatccagcatatatggttaagaagaaagagatcacaatagaaaagcatgctcagccccatattcaatggcggagcaattatcaggttatatggtcaggcaaccgcttgatcttcgccacaataataaacattattaaaaaaacaatcggccaccaaaaacgttattcgtgaagtgagcttgacggcattgttggctccaacattgcctatagagcaccgatatggataacggttcgaacttatcaaacaccaaaacacagtcacatacacgagtacactacactgatcgtataagaatgtgagtggacatcgatatcaatcaaatttactgacttaaaagcctttctagagggcatacaagttgaaacctaatgtgctaacacccacgccaggcacaaagccagcttccactaccaccgaacgtggcgtgaaacaaaacctgcattaagtttttgcggctattctacgggctagcactctgtttcgcgtcataaagatcgataaactataaataaaaccaaggagcaaggcaagagcttttctgcacgaaatggccatccccgcgaattctccgaaacaaaaagaaatggccaacccccccccccccccccctcttcaccacacgcttcttccgatgaaatggaatgacgaacggcgcctttcgcagagacatcagtgctcgcatgtgcggtacagcgtcacgtccccgctctctagaaataaatcgtctgccgagaaacgcaaagggcgggcagggcagggcagggcagggcagccgcgagtcggtgggcagccggggtgtgggtggggtggtgtggccgtgtggggagccacgcgcggaagaaaacaaaagcaattaagcgacgctggtttttcgatcttggacggcaggtaagcccgtgggccggctgcgcacgcgggattcccccgcggcccgcagggaggcgcgaccaggggacggcggtttcgacttcgcgccggcagagggggcgctgggtgttgggagtggacgacgcggtctctctctctcgctcgcgcgtcggcgtcggtctttcccagcgcgcgcggaaccgcccgcgcgccgcgtgcggcctgactcggacgccacgaggcccgcgccgcggtggtggtgggttcggcgcagcagccggttcggcgccttggcggtaacaggccggtggtggtttggggctttgggcatctcgcctagcgatgcacatattccttggcttaaaccccacgatttgggctactgactaatcgcgtgctgtatttccttgccttttgcactttgttttttgcaattcgtttgcttccgtgggagaagactttgccccttcgtcctgcgtgtacagtctatatattaatacagagggtgtttgtagtcagacacccggactatgtcaattcccacggcgtgcgagctcgcgtcatttgataactgagttcgtgtaattaacccggaaagctatcgaattctacggctctcctctaacatgcatgaacttcaaagtttagtttatttctacggttattaatgacttaaaaagctttgtccactacttaaagaaaacaacataaatcattttcttacgtgccaaattaaacggcacctccaccctaaggtgagtcctccttaccgtattctttgggtcttcctcccttgtactagttcactagttatagtgaggtgccttcagctcacttgtatcggtttgctctttcccaacaagtgcactttcacctcccgcaacctatagctattaaattattgagcaatgctacacgtactaaatttttcttactaaacttttactaacaatcatctcaaccgtttgatttaagtagatggaagtttataaaaaaaaatctagatgcacgcgtagcatgacacatcagtgttagtaagaatctagtaagaaaaagttagtatgtatagccttttcctaaattattttacccttgtttttctcttttccttttactaaaataatgtatatttttaaagtctctaataaaagttagtcctattgtttaatatatcataaaacgatgaaaaatttcataatagagtatccgattaacttttttttaggtactacttatgtgaaaatgaaaatgtgaagtcttctcttacttttgacgagtaacacatgatagtttggggtgggggtgatagcattgatatatactatcccctagcctagaacaggggcggatctacagaattaaggtcgacaccgacgactttcggtaaaatctataataaaactgcttatctatatgttataacaatatgacctaaggataattagcatgctatgacaccgatagtcacgttatgacaccaacgaatctattttctagatctgccactgcctagaacccttcccttctcttttcctacttttttttttctgtccaaactccaaaccctcaaatgaattataattttgatgtcagggcgaatatggcatatgtcttgacgaaggttgaatggtaagtggtcaaaattttcgtccttttcaaccccgtttcaagaatttacagctaagattctcttacgttcaagacatgtaacaatgttaggttattatctgaaaaacgtaacaatgttaggtctccctgtatcaacaaattaacaaaaattagcgttagtggacgaaagtatacaggtcttatttctttgtaagaaaaatatgcaagaacgctactgggtttcatcaagagtaggagtactttttgtgcagcttgctgacgtcatgagtttctcagctgccgttctctgtcacgagtcacgaccacctcagatcaaatgtcaaaaggggcgagtgacgtatttgatacaagatgaacgaatggaacctgaaaaaagcagttaaatataagtacaatatatgtcgaacgtgtgtcgatcttacataagactaaccattttgcttttcgttgggaaaatgatttaaaactctcgagggaatgctttcttttcatgtcatttatgtagttgtattttttttaaaaaaatagattaatatgtggtatatcactacataaatatataagatcaaatatgatatctacaagttaaaaaaaactctagttagtttacatatattgacagttaaatttgtttgctttgtaaacttgtagaaatcatagacatatcatacatcaatctaccttttttttaacttttgagtaaagtgaattgttggtctctaaacttgttcacctgtgtaatttaggttctctaactctcgaaaatttatttttcaaattcctggacaagtgtttcattctgattccaaattgcctagacccctctataaaatgagggcctgtttagttggtgaaatgagaattttttgtgtcacatcggacgtttgaccggatatcggaaggggttttcgggcacgaatgaaaaaactaatttcataactcacctggaaaccgcgagacggatcttttgagcctaattaatccgtcattagtacatgtgggttactgtagcacttatggctaatcatagactaattagactcaaaagattcatctcgcgatttacatgtaaactgtgcagttagtttttctttttatctatatttaatgctccatatatatgtttaaagattcgatgtgatgtttttgggaaaagtttcgtgggaactaaacagcccctgagtcaatgcctcatgtggcatgtcaggtgaacaacacataggatcccggatgggtcatgaccgaaataacatactttaacaagtttaggatctaaaaatgtattttgagagttagaatacttatatgacacaggagaccggcagtgtactttactcttaattttgtataagtatttaaataagagtataagaggacaaaaatcatttttatttctggtgtatataatatttcgtcttatctcttactagctggtacaagtaaccagtactccctctggtaaaacaaaaatacatcatttgattttctttcaatcatactagaattttgatcatcaataaatttcaaaatacttaagtctaaatcataaaaaatgatatatgtagctttgtcttgataaaaatactacctccatcttaaaagaagtacacttttatccatgaatttaaactttattttggcaccaaagtagtacgctaataatccataaactaattaaactttttgtaactaatatgggtagaccagtacttagccacttctttatattttgtccgaaaattgctagattgacaagtaatacgaaacggatggaggggttgtgattaaagtatcatcattgtgacctaaaaatgtatgcgtatattttggttacagatcaacgatgcttttatttatttgaccatttatggtcagaatagactttcataaatttatcttaataaataatcacggtccaattcacaccagaacgacctaaaaatatcttcatattatttgatcagaggagcatgtgttttacagatcaacagttcctttgtttatttgactattcatggtcagatttttctttttggttttaagaagactgtgcaccgtctctctctctctctctctctctctctctctctctcacgagtactgagtactgacaggttagtttgtttccctattcattggacaattacgcagttacacaccagtgcccattttttgaccaactagtgaaaacggaaccaaatcaaaagtgtccatttaccgaatcaagtaacgacagcacacggcgatttgtctgcgcgacgaaggctcgcggcctcgcgcctggcagctcgctcgctcgctcgctcagtcgaccgtcgctgcttgacttttcccccttttcaaagtcgcttcctctagacccagcgagagcgggcaatgacggagcggccactgcttccgtccgtccctctctccttccgtccctttcggcgtttgttgtgctccgtctccgccgcgtcactattttttgcggtataaaacccggcgctgccccctgcctccaaccacaccaaaacaactcgcatccgtttcgttcaagtccccccccgaaaagagcttagtagaagcgcgccacagagccttctcgacctggctctcctctagccacctctgcttcttcttcttcttcttcttcttcttcgtctgatcgccaccgaggctaaagccaccaggaggagcaggttgatagctcggcaggcaagatggtgctctccaaggccgtctccgagagtgacatgtccgtgcactccaccttcgcctcccgctacgtccgcgcctccctcccaaggtacgtgctctcgatctgctctctctctgttcttgctgttcttggcccaatgcagagcttcttccaatatttcatggctgactcgatgggattgatcgattggtgttattaggtaccggatgccggagaactcgatcccgaaggaggcggcgtaccagatcatcaacgacgagctgatgctggacggcaacccgcggctgaacctggcgtcgttcgtcaccacgtggatggagcccgagtgcgacaagctcatcatggccgccatcaacaagaactacgtcgacatggacgagtaccccgtcaccaccgagctccaggtacagcaccctgcaggcatctctgcttcgttgaattttctcctatcacctcgcgttttctcgccgccgcgcgcggctcgaatgcacactggaaatccccggatttttggtcgataaaaccggcttggccagttggcctggcctggcagattggtgataagaatctcaggctagaaactttatttccgagtttatcatttgcgtcattcacgggaggcagaatgggggaagaacatggcacagtttccgagatgatcaccaattcgcattagaaaaaatatataggaagtccaataaataaagtaaggggatgggaagaatgatcaccatatctcttcatttttcgcattaaaatatggaaggtgcatgaatgaagggaaatgggaaagaataatgcttggtttggtcaaaacagggcaagagaccaaagttccatctactgaaacggcgtggacaacagtcaaaacctggaacacagaaaacaccactgcaactttcccctttttgtgaatgagacacattattagtccttttttcagccagacatgctttgggccagatgatgtcctagcatgaaatgtacaacattttttttgggccgggccgttctacagctaattaacgaacgctttggatgtgtgacgctgtgcagaaccggtgcgtgaacatgatcgcgcacctgttccacgcgccgctcggggaggacgagacggcggtgggcgtgggcacggtgggttcgtcggaggccatcatgctggccgggctggccttcaagcggcggtggcagaacaagcgcaaggccgaggggaagccgttcgacaagcccaacatcatcaccggcgccaacgtgcaggtgtgctggagaagttcgccccaggtggagctccttcgaggtggagctcaaggaggtgaagctccgcgacggctactacgtcatggaccccgagaaggccgtcgacatggtcaacgagaacaccatctgcgtcgccgccatcctcggctccaccctcaacggcgagttcgaggacgtcaagctactcaacgacctcctcgacaagaagaacaaggagactgggtaactaaaattactatttctactacactaaattatctatctatgaaagtgagattaatcgatgtcattgcggccgtggtgtgcaggtgggagacgccgatccacgtggacgcggcgagcggcgggttcatcgcgccgttcctgtacccggagctggagtgggacttccggctgccgtgggtgaagagcatcaacgtgagcggtcacaagtacgggctcgtctacgccggcatcggctggtgcatctggcgcaacaaggaggacctgcccgaggagctcatcttccacatcaactacctcggcaccgaccagccaaccttcaccctcaacttctccaagggctccagccaggtcatcgcccagtactaccagctcatccgccacggcttcgaggtataatcaatggaacacaattaactctcttgatcagatgaattttttttagctgatctgacacacccatcgatccgatgttatttgcaggggtacaggaacatcatggagaactgccacgagaacgcgatggtgctgaaggaagggctggtgaagacggggaggttcgacatcgtgtccaaggacgaaggggtgccgctggtggcgttctcgctcaaggaccggagccggcacgacgagttcgagatctccgacatgctgcgccgcttcggctggatcgtgccggcgtacaccatgccgcccgacgcccagcacgtcacggtgctccgcgtggtcatccgggaggagttcagccgcaccctcgccgagcgcctcgtcctcgacatcgagaaggtgatgtaccagctcgacgcgctcccctccaggctcatgccccccgtgccgccggcgccgctgctggtggtcgccaagaagtcggagctcgagacgcagcggtcggtgacggaggcgtggaagaagttcgtgctcgccaagaggaccaacggcgtctgctagtctcaattagcgacagcgccacggcctacaaatccacaaatcaagacgctgctgattgatatgattaattacattcatggtgtgagctaccattactgtattttttttttaccgtgctaatttgagtggagccttcgattctaggtccaaggtactagtagagttcataaccaaaagccatgctcttgcttttgtttctccttctgataatctgtgcagctgcgctgcagcctgcactcatctcccgagagttgtaagttgaaactgtacgattttgatgttccctgttctagtgtaagtgccaattattgagtggtatggaaaatatttcttcaagaaaccaatcagagcgtaatttccgtgcttgatgttgtgcttgcttcttgccgttatatgttccccgtagtaccctctctacctgcacttgccttaaacttttttctcaaccttatcagtagtactagtaattttcccctgatttgccttaacagtaggagtagtactaatagtatcaagtagtttgttctaaagaggacttctaaaaatgtaaattgggcccaattgagcccgactcggactcgacgcaacggcgatagccctataaaagcaacggttagccgcaacgctcagccatcgaacgactcattgatcaaagaggagagaaaaggaaacgactcgttgatcaagaaactgactcgatggcgttggagggagccgcgggcggcggcggcgtcggcggcggtggcggaccaccggggcaggaggcggggaagaaggtggggtggagcaaggaggaggacaagctgctgcgggagctggtgcggaagcaaggcgggaaggactggggcgtcatcgccaccgcgttccccggccgcaccgacaagtcgtgccgcctccggtggaggcagcacctggaccccagcgtcgacgtcgcgctgcccttctccgccggcgaggacaggaagatcgtggagctgcaccgcgtccacggcaaccgctgggccaccatcgcggccttcctccccggccgcagcgacaacgccatcaagaaccgctggaacacccacctccgcaagcgccacgcccaggacgtgcagcagcgcccgtcaggtggcctcgccctcggcctcggcggcggtggcggcgctgggcaggctgcgggcgggaaactgacgccggtgtgcctccaattgttccctccgacgcaggcaccgccgatcggggagaacttaccggggccggcaagaagcgctgtgccggagctcctcaagctcttccccctggctcccggtgatctcaaggacaatgcgagcgcggcggcggcgatggatgtgggtaacgaggccgtccgcgcgctccccgagttgaggctttccccggcggcggtggtgttcgacgcaatgccgctgcaggctatccggatgtagattcttgcctcgtcttcaattttttcttgtttcttctattttgttgtttctgagatgaacagctcttcaatcaacgcagggtatttcctagaggaacttagttttgatcgaagagctgtagattttgatcttcttggtttcttgcaacaatcttgctagttagtggtgatcaagaagccgtcttgtgattctagttcttgttagtagtagtcaaaaaattgaggtatcaccttcctgtaattacttgattgcaatagtaatcaaggtctgaccatcctgtaattacgtgatgtcgatgaatcttttgttgtggtattcagttcgaaacttgcaattggtttcatcaatgtctggtctagattacgctgacagaatgacagtatcaatcttcagccgtgcttgtgtgggactttaaaacatcctggtatgggtctgggccagttcttcagaatttgtttgatggatcaatctgcatccctccagtccacttgttgtttcttcctgtcctgtgttggtaatgtgatctggaacgactgcccgccgtggcagttaactgtaaagatgttatctcgttgatgttgtttgtctttcgttacagacggactctgcttctcctgaacagtcagactctgttttctcttgcctgtacatattcagttacatttacattttggagatggtttgagttcagccaacaacggccaaggagttcgacctgaaggcaaacaatcttaaagtgatttttgagtaaaaaagttcgattttttaaaagaatgattctttttttttgaatgcctaaaagaatgattctaagtagtttttatatatataaaaaaaattcttcctagcaattatgggatagagttgtaaacgaaaatgacaaagaaaaccctacaatcaaattctaaagcactgataaatcgaaactcctagtgggcgggcgatcgttcccctctcctccaccacttagttttcttttttggcaccgtattacttttctgttttagtaaatttatgcacctatagtttacacatctaaagtttagagatccaaagtttataaatcaaaggtttatatatccaattcaaatttgaatttgaattcaaatattttttatatatagtatttctatacatctaaagtttatacacctaaaatttatagacccaaagtttataagtcaaaagtttatatacccgattcaaatttgaatttgacttatatctaattcaaatttaaatttgaattcaaatattttttaatatattatttctatacatttaaagtttatacacctaaagtttatagacctaaagtttataggtcaaaagtttacataccaatttaaatttgaatttgaatttgaattcaaatattttttttatttatagtatttctatatataaatttttctaactcttgttttttcttattttttaaaaaatttatggtatagtaggaaggtaagaaggggaggaggaagggggagaggagtgtgtctaaggggaggatggggatcgatcacttcgcggcttcgcccgttagcatgccccctgataaattgtgtttaagaataactgaagtcccgcatatagcgtctccgtgaacgaagcagttgtcccatacactgggactccgattaaagcggagccaaaacaagtgtctgaagacaatatttccatattggttagctctatgatcagatattccgatcaccacaacgacggaaaaaaaaggcaattatagttgtctatttggtaatttgtatattcttgtagataaaagaattttcctatgaggtactagatgcatagtattactagatgataccccgcgcgttgcgacgggatatttgtaatgcatgtttgtttattattgtaaataactttaagtgattagtatatttgcaaggaagttgtaagttatatatagtctttcagaaacactacatactaaaaagagaacgcaagtaatgattatttaagaactgatttagctaaggaacactcttgttaccgctcatggtaaggaatgcgattgtgaaatactatgatagaagtatttgatcacacatgggtataacatgcaaagagccatagcatatacatttcgttacttatattgggatagtagcttcagttgtgctatgtaaaagtgccaatggactgagggttccgtagctggtacggctgaggtaggcagggcgatccgacaaaagcggatcacgcctggccaccgccggtggccggcggctgccggagccacgctcgtatgagcgctaggcgggggaggctcctcactatcgctcctctggccggtggtctcgctagaagccgaggtcagagcggcgcagatgccggccgtggtgtcggtggtcagcgcgcggctgtgggtggcgtttcagaggagagcggtggagcgctgtgtgagcaaagggcacggcgtcaattgtccaaggaggtggcgtgggcagcggccatgaccggccgccccaagccggtgcatgctgtgaccccttcgccagcatcgccgatccgctcaaagttttgggcaacgccggacgacgatgactcggaggatgatgatgaggcaccgacaccgcccccgttcacaggctcatcggcgacatcttctccgtcgacggaggaattcgtcaacgaggcaagcgcagcgggattctcacgtgcacagctcgtcatggcggagcagcaactccaagcaggtaagaacagcgaccaacggttgccggaggtaatcttgtccacgctgctacggcggaagctggtgggtccgccatggcgtggccctttaccagcggaacgcgtttctccgccgagaacgctgggcgactgcctggcgtcggcatctcggtgtccgcggcgtaggcggcgcgatggtcgacggtgcggcgttcctcgttcatcgtcatcgccggaggccgggacggttggttcaaaattcgtaattccgaaatcgttgggcgtttcaaacgactccgatcaattactacggcagggttcacggcctgatttccctcctctctgcggtgcgcactcgtcggtctctaccgcgattgccagcgcaggaggggaggtacgaaggccggcgccatctgcatctcagtcggatcggattcgtttggggcccgggaagtggtttcggcccaccaaaggattgatctccctctttgctcgctctggactcaaacctagatcgcgaaaactgcagccgccatcacgccccactgcgacgatctcgtacgctgcggtcgtacggagaggaaaagccatggcggcacacggaggcagagggtttggcggtcaagggggagggagaggctggggcttcgcgcaaggtttccaccctggcttcgacggcggccgcggccgtggccgtgatcagcgcggtcgcccacatggccacaacggtggcggattcggaggagggtacggaggcggatatggcggcggaggctatggtggtaacagtcacggtggatacggaggcaaccggaaccgccgcggttggcagggtgggcgccgcttcgcgccggctgctggccacgcggccggtcagttccacgccggaggtggcgttcctggacaccaggccggtggccaggcggtggtcggccaactgcagcagcaggccgctgctggtcagttccagccggctggcttccagacagcggggctggctgaccaacagcccgcccaggcgcccttccaggcacctctggctggccagcagcctacccagccggctgcggctggcaaccagaccagggaggctggggctgtgctcttccagcaggtcagccaaagccagaaggcccaggtggctgcaccggccaacggtggcggcctcggtacgtctcaggtcgggacgtcggcgctgctggcctccagccaagcagcaccggcggctgctccagctggctccacaagaggggccatcattggaggatcggcacaggatcccgcggcgacacatctggaaggcttcatggcaaccaagcccgaacctgcacaagccggaaagcagaagagcaagggtaaaccctactgtttccgctgctatacaaaggggcacactttagatgattgcactgtcttgctttgctgtgatttgtgctttgaaaatcatgttctaaagaattgcccaaatgtgaagaaaacaaatgcgattgcggctccatgtggttatgcagtagagggcatgggcttttactatatccctatgaatgacaacccaaagagtaatgtggaggagcacacggtcttggtacgtgtcttagacggttcctttactgttgatcaactgacagtggaacttgatagactactgccagctaaaatcacttgggagattggtttgaaggggtctgatgccttcatcattactaattttccatccgagctccgagaatatgcggtgaattggggtccaatggacaccaagacaattaagggaaagatccgcttcgagaaaggtgtcgagaatgatgtgaacagatatgagattgacaaagtttgggttcagtttcggggtctacctagcgagctcagagaatttcctattatatgggctatagggtccatattaggggtctctaaagcggtggatatgcgctttaccaagacgtttggcaggtccagactgaaggtggctgttctagacccgaacaggatcccagattacgttgatgtggtcattggtgacttcgtttatgagctgcagttccgcatggagatagatatgcctgttggagagccttcagtcattgacatggactctaccacagacaatgatggtgacaatgatgggaaaggcgaggacccaatggaggaggatgccaacaaaaataatggcacccctgatgacttaccaaaggatgctgcccctgaaaatgcccctgcagaccagctacccaagcatggcgcgggtgctgagacaggcaagctgaaggagaaaacagtggctaagtctgatccgggaaaaaataaaaggcccgtggctgtactatctcaggggatctctctggagggttccattcagtggcaggcaaacatgttgggtaaccatggctcttctagcaaaccggtggtgcacaagggagagactgtatctcctctgaggtccagcaagcgcaatgtgtcctccctggagcaggactccatggaaaaggccaccaaactgaaagctcgcaaaaacttggattccactgctgcaaaaggtaacaaacccctcccctcctcttttcataatttagatgattctgttatactggctacaactgactctttaggaattaatttgggggacgatgttagttcggttctagattctgtacattctttaaaacaaattgagttacaaagatttaacgacttttgctcatctagtaaagaggagaaacgtagctgcgaggaaaactcatcagtttgttcggaggataatgttgatattgatgctttaaatactatctgttcggaaattgcggaaagccttggtgatgggggctatgacccgctgtgtctacatacccccttatcacaaataaagaggaggcagcctaagggtaagcagaataaaaataaaagcgaacgtagtaaaacatgaagggtattttttggaattgtaatgggtttgcagacccgaaaaaatataaatttttgtctgatctaactaaggagcaaaatctagactttattgctttatcagagacgggcagagcctcttttcctcagtcaacattaaataatatttgtgctggcagagatttcatctggcactgcatggcccctagggggcgctctggtggtatgattctaggtgttaatttgctgtttcttgacattggagaaattgaggaaggagattttttcattcgctttaaattaagacagagagcagatgattttaaatttaatttgatttctgtatatggtccagcacagtctgatttaaaaggtcattttctctctgaattagtacgagtttgctctaaagaaaccatacctacagttgtaggtggtgactttaatatacttcgtaacccacaggagaaaaataatgatacctttaacgatagatggccatttctgttcaatgcagtaattgacactttgaatcttagagaattggagtcatcagggagatcttttacttgggcaaatcacttacaaaatcaaacttttgagaagcttgacagaattctagtttctacggagtttgagacaaaattcccactctctactgttagcatcctcactagggaaatttcagatcatacacctttgctatacaattcaggcggtgcgtccgcagcttaccaacctcaatttaaatttgaattgggctggttgcggagggacggtttcagtgatattgtaaaggaggtgtggcaaggggtgtccattgagggtacacctttagagagatggcagaggaaaattagacgattacgccaatttcttcgaggttgggcgaaaaatattactggtgcttacaaaaaag

SEQ ID NO: 6221 - DNA, 57704 bp, Oryza sativa
ggtttggatcttgttcatggttcgtctaaacttaagaaagatcttgatttggtttgtacaccgtgtcgtcatgctaagatggttgcttcttcacatgctcctattatttcagggggaggatggtcgtatttttgaagacgagagcgacgaaaacgacgacgacgaggtcggctcggccggttagaccgggcgccaagccggtcagaccgccagcacacctccggtcagactggcataggaggtgcggtcagactggccaggatcgtcggctgaaggttctgttgatgctattcgagatggtcctccggaaactacaacttcgaccagtactgatacataacgtggatcaacttcagaagtcgtggctcctttgcacattcaacgatgacatccgccagaacaaattattggtaatataggtgagcggactacaaggtctaaggtaacgattcatgatgtttgtgcaaattctgcatttgttgcttcttttgaaaccaaagatgtgtcacgtgcattaactgatgaatcatggattaacgccatgcatgaagaacttgaaaattttgagagaaacaaagtttggactttagttgaaccaccttctggacataatattattggaaccaagtgggttttcaaaaataaacaaaatgaggatggtttgattgtgagaaataaagctagacttgttgctcaaggttttactcaaattgagggtttggattttgatgaaacttttgctcctgttgctagaattgaagcaattagacttttgttagcttttgctgcttcaaaaggttttaaattgtatcaaatggatgtgaaaagtgcttttctaaatggttttatacaagaggaagtttatgtcaaataaccatcaggttttgaaaatcctgatttttcccaaccatgtttttaaattgtctaaagctttgtatggtttgaaataagctcctagggcatggtatgataggcttaagaactttttgcttgcgaaaggttttacaatgcgaaaggttgacaaaactctttttgttcttaagcatggttataatcaacttttcgttcagatttatgtggatgatatcatttttgtttgttcgactcacgccttggttgtagattttgctgagactatgcgcagggaatttgagatgagcatgatgggtgagttatcgtactttttgggattgcaaattaagcaaacacctcaaggtgcttttgtgcatcaaacgaagtatacgaaggatcttttgagacggttcaaggtagagaattgcaagccaatttcaacaccaattggttctacagctgtgttggatcctgatgaagatggtgaagctgttgatcaaaaggaatatagaagtatgattggatcgttattgtatctaactgcttctaggccagacatacagtttgctctgtgtttgtgtgcacgttttcaagcttctcctcgtgcttcacgtcgtcaagcggtcaagcaaataatgaggtatttgaatcatacacttgagtttggaatttggtattctacttcatcttctatatgcttaagtggatattccgatgctgatttcggtggttgtagaattgatagaaaaagtactagtggaacatgtcattttcttggtacgtcattgattgcatggtcttctaggaaacaatctagtgttgctcaatcaactgctgaatctgaatatgttgctgctgctagttgttgttcacagattctttgacttttatctactttgaaagattatggtcttacttacctctcttttatgataatactagtgctattaacattgctaagaatcctgttcaacactcacacacaaagcacattgatatttgttttcactttttgagggatcatgttgaaaagggagatgttgaattgtagtttttggacaccaagttgcaaattactgatattttcactaaacctttggattctaatcgctttgcttttcttcatggtgaattgggcataattcatccttttggcatggtttgagggggagtttgtacctcatggttttatcaagcaataatatgacaatgagaaaattgagaaaagagagctttgtttatgcatatggtattttcttgtgcatgctagcaatactttgaaggtttatttgtctctaacatagcttgtatgcattctagtcttttcatgagatttagattttgcttttaagggagatgatgcatgacacttaaattctataattgaattaagaaaatatgcaacgttgatgctagcatatggtttgatctataaatgctctatatatatgctttgttgaattgttattcctcaaatagctttaattgctcattgtgaaaaggagaataaaaaatatgaaaaaaatgaataccgaatccttggaaatagtcttgacgacaaggacgtattcgatgtgagcaaaataatgggtgccgaatccctggaaacaatcttgacgacagggacgtacccggaataaaagagaaaaatatgagcaaaaaggctcaagaaaaagaaaagttataaaaagttctcttggttattttgtgctaaaggttatttgagaaagagtgataaatgcaataggtatatgtctttagtgtttattattcaacctatgtgcttgttaagatgttgcattacaaatcgtatgaaatcatgaattttgattgttgattcaagcttaattgtaaaatctttggttcatggttatactttaatgcatgcttgttctgttatagatgggtttatcttctttttattgcaacacatgacttgatatgctatatgtatgctaagctcttgaacattaatgaacataattcctatgcttgatgaaatcattgtcaaaagggggagaagtaatgtgaaatttatttttggaattttggagaagcaaggtgtattttcggagttgttgagaagagcatgtttttggttcatgagggaatttctttcttttaataagggggataagttttctttttgatttttgagcacgatgtgtacatttgtacgaagtgtgctttttaccacttttgtttttatttttccaaacaccaaaacatttttgatgagtttgccaatgtgttcatcaagggggagattgtaaaatcaaaggtgtttttgattattattctgtgatgaacaattggacattggagattattggttttgttatttggaatttattcacgaagtggttttggagatgattggattcacaggtgatcgcaggattctatcattttatgtgaccggtcagaccggcggtatgcgcgtggtcagaccggccagcccgcggtctgaccggccgacgctgtgtcggtttcgggttgtttgtttggatatccgtgattatttcatgattatgacttctagatggatactatacgtatataatactgttgtttgctactaatgagtcaagttggagatagcttggtctcggaatatggtttatttgtttatttcatatgtaggtgactcgatgcctcgggagagtatttgcggtgatggaccgggagtcggcttggggataagacaacgtccgtggtggtcagagatcatgcgggatatttaggctagagttgatgcacgtggttgatggagatttcatatggcatacgatgaaggtattgtgtgcgtatgggatgcagagtcgaatttggaaggagtccaaatttggtatgattggttatgtaaagtttgtttcttgtactagatggtttcctaaggtgtttaggactcttagtatgagtttggttcgtggctttaggctgcctacctcatgtataaatagagggggagcatgaggcttcccggtatcgcttttgagagcaattgagttgagttttgagttagggtttcgagtttagtcgaaatttttgtaaggagtgctgttggtgcactttgtaaacacagagagaatcaataaagtcgtcatccacttttagagttttttgatttgtgtttcaccgggtttcggcggtctaactggcgacacaccgacggtcagaccggcggcatcacggcggtcaaaccggcgggtaacctgcggtcagaccagcggcgacaacaggcgcggcagggattccagggcggtccaaccggaagatcaacaccggtcagaccggcggctacgcttcggtcagaccggaagatcaatctcggtcagactgacttccatcgatttcgagggtaacttttatttccgctaaaagttttcggttttttggtataccaaccatttaccctctctcctctggttggcttagttcttatgtttcaatcctacatatatagtagagatgatgaggaagtgttaatgaggaaatggtatagcagcgatgaataaaggaggaggtggctggtccgcaagtgtggtaaggatagatctacctggttgaaagtgcaataaaatgaaataaaactcgtccaattaaactaaatgatggaaagagataagatatacgctgatatatatttaaagaaggaactaagatataatgcaattatattaatgtgcaaacttaggtaacaaattctgacccaaagtacaatataatgtgcagacttaggtaacaaattctgacccaaagtacaataatgatttttccttttttcttttcgccctctcttaattgtcaggcttgatctccaggccagctagctagctgatctggttctgataagagacactgatgtttgatcaccccttgaaagcgacaacccacgacagggagacaacaatgagaatgttcccttttccacaattaattaggattgcaaaatatgcagtgatcgatcacttgcaagttgcggttgaaggctggcattttgtacgctcaagagaatatataatgcttggtgtttgtcaaattcctttctgctattgtcagtgtattgttaggtgtgaggtcatataattaaaggcgtagtacgttgataaatttgtcatcgacacattcgtaacggaaaataaccttggaacattacaacgcctatatttggaggaaaaagagccacgttccgtgtgctctgcgcacgtgtacttagggtttagaaacttccacgttaatcgttctttatttatttttttattgaatcggcgaaccgccaatttcattaaatatagaaggagaaaactgtacagtgtaaagggaaagaaaaaaaatcaggacctttggccctagtcaactaaggaacaagccaatttctcagatgatgcgcgtctgctaaggcccatatcttggcctcgtccttgatttttgtcagaagaccactcgatgggagcacgttaatcgttctcgatcgtgatgtaggctaataactgcatgtaaatacaattgtaagaagtgcatctacgggttttttaccatttttttctaacacattactaaatctactagcgctatttgtttatagaaaacaaaagtatgaattattaacaatataactctatttataggggagttcactttgattcctaaatcaacttgatcaaatattgatattggcaaattttagcattaccaatatttagtaattaattaaggttgagatgtgtaagttgtatttggtttgccacatttgtcaagattttgtgagaagacgatcctagaattatcaaactttggtagcttgccaaattttgataaagctaaaacctggtaggttaataaagtgatcatcaccttcaaatcttgctaagttaaaaaattaaaatatattatatgtgttggggaagggctccgaccctcgcgcccctttctaggtaatcagagggagggcctccgttgggaaggtcatccgtcggaggttgagttgtccttcaggcaacaagcacgtcgaccctaaggaggcgatggctcaggaggaatagagcggtttcccccttagcgtgaggaggagctcgtggctccgataatctggagtcagagccgaatacggagcatgctgagaaggggagccactaagtataaatatataaatgtaaccctcagaaggggagaggaacagaagaattcacagaaacacttgcttaacatccgtcatttcttttccaacaatatgttagcaatttttttttaccaacgaggtcataaatatccctctctatgactctatctacaactaggaggcatgtaggcaaacctaagattccattatgcatttacacaaagttaatttagttccacatggcgtgttctccgactgttgcctagcttttgcaagatcgatcgagggggggtgggggggggggtttgttaagttaattcgctcgatggctctgttgagcagcagggctacctcaatgatttggattagccatgtccaaagattggagggcaaagataaggcgatggcatctgggggctcccgggaaagagttggcggtacaaactctagtttgtccctttcacccttgtctcatggctctttgctgctacgtgacaagccccttgatccaaatccttctccaattgggtgtgacttgtgctgttctcccccccttgacgctttttgtttgtacacctttggtctctcgtgtgcaatgatgcgcaacgctgtgccacgacagcgaccactgaattctgctatccctagcagtgttcataagtgtagtagtgtagtaccacactactgagagcttaattatccaggggagacgtacacgtacctagctataggctgtgccctgccttgcttggtcatatgtgcatggactcgaacgtgtgtaacgaagcaaaagaaatgtaatccctccgtccaaaaaaaactcaaccgagaattgggatgtgacataggttgtgtttagtttcacaccaaaattaaaagtttgactaaaattaaaagtttaaagaaaaacgttggaagtttatgtgtgtaggaaagtttggatgtgatggaaaagttgaaagtttgaaaaaaaaagttgggaactaaacaagcacataatctagtataacttatgtccatatttgttgtactagattatctcatatttcagtcttaggttgagtttttttttacggagagagtatatgctcctaccaaaatattaatgaacccactagcttatcctgttaatttcttcttccaaaactgacgacacgcactatggcacagtactctgcaatctgcatgcagattgtacactagtaccggaataatttttctggacgggactaattttagattgcagacgggaccgtaaccggtcgcgtctgtaaaaaatcgtgctctatttttacgtgcagctctttaaaatgactgtacggtaaaattaatttttgcagacggaccacttaacatgtccgcacgtgaaaataagcttattttcgcgtgcggacctgttaaataacccgcacacggaaatagcccacctacatttttaatcccgcagttgccgcccatcccactcactcccatatcactctcaactcctcccactcctcccatctccctctcctcctcaccctcctcccatctcctgatcccggagacgacaatggaggcgacggcaacggctaggttggcggcggtggagcggatccatcgctggccaccgcagggaggccggattcgtcgccggcgatcgcgaggaggccggacccgtcgccaaccaccatggggaggcctgattcgtcgccggccatcgcggggaggctggattcatcgccagcaaccgcggggatgacagcatcgggcctcgggcaaggcggtgacaacaacggtggtggcagcgacgatgacagtggtgacggcggcggcggcagccgctggattagggttccgcttttgatttgtttttttaattttttttatttttccatgcgggcggcttaagtgcctgcacccgtacgaaaaaaaatcagattttcgcagacatctcgttccagacgggtggaagatccgcacgcgaaaaccgattctgactgcacggaaaaattgttattgtaccagtggtagctaatgtgttgataactaaatgcactatataatcatacttgcatatatgcagattatataaagcgtacatgtgcatatatagacatatataatttcgctggcttggctctagaggatgctatctatgctatgcatcatcgatcgaggccaagcaaggccattccctgtccacaaaaaaggcacaggacgacgacgacggcgacgacggcaagtacgtactgtcgcgatcgttctctgtcccctttcaatcccattgtacacatgtcgagctagcgtcgaacagtgaccaaagtgctgggaatcaacggctttaatcagtaggacatgaacaggcagctgcactgttcattcctctcgcccgcgagcgatcgtgctctgcattgggccagctctagctagccatgcatgcacggccggctgcagcacagtggcgactcgctgggtggccggccaatcgaccatgcacggctaattaagctaattgaagctagccatagctacatgtgtactggctagctacaaccctttgctttcgccacagggctctcggtcgatcgatcgatcgatcgagagagcagccgccgcgcgcggctggtcgcatccccttgtcgccgcgcacccggagggtcctttgccacggcgatctcgcggtgccttgcgtttgtacccgacctgccaccgttttattccctccgctcctcctccaattccacctgctgatagcttagctgctagatcgatcgatcagatgagatcgatgagatgagatcggtgcgtgcatgcacggcgtacacagtggtgatcgatctcgatcgatcggcctcttgatgatcaatcacatgccgtgctttaatttgcatggactgtgattaattgcatcgtccaagaagtgactggtgcgtgttcgtgtttttgtgtgtacgtacgcccgacagtggcacagcatgagcattgcgactgtaccccgtgctacttgctagctgccgatcggtgacggacgcagctagctatctgtgattaatcgggtgcatggatgcatgcattgtatatatgcatgtgatgcaacgcaactatgcaactaggcatgcgctagctacctagttgactagttgtacgtttcgggcatcgatcggatggtgatcgaggggaatatatattagcatcgtttattagtgatcaggttctttggagatatcgagatcgaagtggctgtagcctacatgtaattgtgtatgcaactagctgcagatagacagactgatagtttctattacacaacgcaatcggataaacctatatcaggggtgggaagaaaagaaaaaacaaaagctacaactaggtaaaagaaagagaaactattacggataaaagctacttcaatcaacgagatggtgaagatggagccacactacactaaaaaaaaccccaaaaacaactacgccagcgaaagatcacacatgactctccgagagaatagactccaaaaccatagagaccgagaagagcgccgagtcaagattaattattgttcgaattacatatttacatgtatggattaattaagagcttgaagggaccctcgatctgtcgatggatggatcgatggatcgtcggtcgacgggacgatgagccgacctggctgaggacgactagagctcaggcaaggagaatatatatatcagaacaagagctagctagtgggtgtgtgtactacgtggtttttggctcgtccacgtgcgtaggcacacgcaccggccggcatttcaacaccaagcgtttggctttaactgacttggcgatctctcgaaactttcaggcagcagtgacaagtgacaatgaacacatcaaagctatctgcaggatcgataatataatattaggtaagatcgttttcttctaacaatattgaatcgtagaatcggacgtaggatcatgatcctgtcatattttcataaagtgcatagttttatataaatgttataatacattgtaaaaaaattaatacaataatatcagttttgttaaattgtgtaaacttgagtagagttattcattttttttaaaaaaaatccaccttagttttgaacaatagcataattaatcatattatcgggatcccaggtaagatcgtccaccgatcttatggaatcaattaatactcttatgtgggaacatgatactataacatatttatggtaggatcaagatcatcgtgccgtttgataggaccatggtatcgtaactcgtaagatattactatgactaggtgttttgaacatttatgctgggcaacagaacttccgagatttcagatgttttggagttcgtttagcgatttttgtttttaaattctgcccggttatggctaaatttaaatagattttaaccaaattcacaaaaaataaaaaatcgccataatttcatactatgtggtagagggagggggggaggggacattgcaaacattgtcaagggcctatttagaaaaacttttgacaacggtaacttctcctataattaaaggctttattaaattcagtttttattcagattttatgaacatatggttacagaatctaaaaaataaactagaattcttcttaacttctctagattcttagaaagtggttagggcaagtactataagcctctacatattgcgcccctaaatttaccacataagattagataatgaggtggaagagagaagttaggagagagagaatgagccatccctcatgcaaggggcaacatctacacaatctccaagaaaagtgaaagatgatgtgagagtagactaatattggggtttgtgtattagatgtgatattttgtatgtgttacctcttaattaatgagaagatgacatggttcaaattagatgtgacatccacctctactataaaacttgcccttaccaaccatagccagctacttctcaaattttttaagctctccaaaaccgtaccagattataagctctccaaaaccgtaccatattataacttggatcgatcaggatcataacaacttgaacactactgtacagcatgtccttgtcgttgcattggccaccgtactccatccgtatatatctgcgtacgtcgtcggcagattagttcaatcgaaggataccaaaactagttctgttgcatgcctacctttttcaagtgcaactagctaactagcaaaatcgtaggagtaccctaaacctcgttaccaagccggaaatcattaggttggtatatcagttcttcagagattagcctgcacaatttaaccttaattaccacaattgatatatatttcgttgcactaatgtattgttaattctctgaactctttcagttaggcatatatcgattcctgctagctaagcataatgattaaactacaacatcagagttttcccccttaattagaaccaacccggccggtacactagatctagcttagttagttagaagctgctagcccaatcattcataatttcatactgatcagattaagttgaagttattaattattaagcagcaataagaggtctgaaagccacccccgacagatggagacatgggcgcgctgaaaaactaagctcaagtgcttgtcatgccctgtgttgcatgtaagttatgatgagttgtgactgttgggttaacatgagtttacaccaaggccagctaattaatgggaatagctgttcttgatgcctatcaacacagagccacttgggtgcttcttccctgtgcctaacatgctgccttttgtcaatttatcacccggctattcatcagttacagtatacgctgcagtcttctctcccttttattctacagaagatttaacacattttatccctatctcactgtcatcctaaaattaagctaagctcgtctactacatttgaacacatatatgtagttgagattacgaaatgtgcaagtacaattagagagagacacaatgatggttagctctttagctgggccaagtatcctgcttgcctcgtagtcatcattgatggttaagcaagaatgggtgggtccaggggggaggccagtctacgtgtgcaaggaagcacagggtgggcccgccttgccgtctcagatctcaaccatcggattcgtgggccaccttgctaagttcaaacgggccgagaggacagacttggggaccaggcccaatagtgacacccccttctcttggcaaagctcccccttcatcttcttcagctctccagtgttttttattttattttctgttgatattccacttgaaaggtttcatcgattgatatgctcagcccttttttaaaaaaagtaaaatgtaaggtttcctaattcctgtagaaattaaaccaattagttaccacgccattgcatagactctatttattatatatattaaaaattaatcatatatgctactatactttttttagaaagagtaaatttcacaaaactacagttattttgcacaatctatcacaaaactacatatttaagagcttgttttacaaaactacagatttagtgtctacttttatcacaaaactacaggtactttgtataatttatcacaaaactacatatttaagaacttgtttcacaaaactatagatttagtgtattcgtttatcccagaactacacatttagtgtcttcttttatcacaaaactacaggtttagtgtctccattattacaaaactacaagttttaacaatgctaaaacatgtagttttgtgataatgaagacactaaacttgtagttttatgataaatgaagatattaaatctgtaattttgtgaaacaagtttctaaatctgtagttgtgtgatgtattgtgcaaagtacctgtagttttgtgataaacatagacactaaatctgtagttttgtaaaataaattcttaaatatgtagttttgtgatagaatgtgcaaagtatatgtagttttatgaaatttactcttttagaaacagagtacaaacgtaggcgtccacaacgtgcacatactcatccctatgaacacgcacacacaccctaccaatatgagcaccctcaaggactggatcgacatgtcttgagattgacgaagttattacatatgtctcgctgttgacaaatatgccgtttaccgctgaaagaatatttagccgtaaatacgagcactcctgtcaatcataggacttgaacccaggtgaactggttccaccacaaaaaacttaacaagttgagttacgcttactttgcaatcatgtaataatatattggcatagttttcaattgtacccttagattaacagaaaagttatgccgattacaacttgttagaaattgctatttttttctagaaaatgtaattaataatttatattttagaattaaattaataataattataataataaattaagttgcaagatcgctacaatttcataattattaattgtgaatttaagaaatatttattttactaaaacaaacgagtcaatggtattttcaatgacatattttatttaacacatattttaatatgttccacgacaatgataatacgatgattgattcttaaattttattaacgttgcagctcatttgtaatgacaaattagcatactgatacacagatagaccgacatacatattctatataaaaacctcgttcaacagtcatatacagtgataatctttctatttttatgaataaccggccaacatatattgcttctccctgaatatatgcatacatactaattaattaactactgcactaatgggcattacccccacctcagagtgcccaattgcccatggatatgcaaaatactgaaaaggacaaaagggtattcttggaacttgccaaatccacacaagtgcaccatgcaggcatgtgcccaaacacatcatgctacagtcctcttctgcagagacaaattacctaagaacagtgacacagtatagctgaaaaaaagggccctttgaccatgacttcacaccttagagaaaaatattactatggggtataggatcgaatcacaagaattaagccaaccagaggggggtgaatggttggtatatccaaaaaccgaaaacttttagcggaaataaaagttaccctcgaaatcgacgcaagtcggtctaaccgagattaatctaccggtctgaccgagtggatgccgccggtctaaccggtgttgaatctccggtctaaccgccgaagttgcctgccgcgcctgtcgccgccgccggtctgaccgcccgtatgccgccggtctgaccgccggtagatcgccggttagaccgccgaaacccggtaaacacaaatcgaagaactcttaaagtggatgacgactttattgattctctctgtgtttacaaagtgcaccaacagcactccttacgaaaatttcgactaaactcgaaatcctaactcaaaactcaactcaattgctctctaaagcgataccgggaagcctcacgctccccctctatttatacccgaggtaggcagcctaaagccacgaaccaaactcatactagaagtcctaaacactttaggaaaccctctagtacaagaaagaaactttacataaccaatcgtaccaaatttggactccttccaaatttgactccgcatcccatacgcacacaatacctccatcgtatgccatatgaaatctccatcaacaacgtgcatcaactctagcctaagtatcccgcatgatctctgaccaccacggacgtcgtcttattcccaagccgactcccggtccatcaccgcaaatactgtcccgaggcatcgagtcacatacacatgaaataaacaaagaaaccatattccgataccaagctatctccaacttaactcattagtagcaaacaacagtattacatacgtatagtatccatctagaagtcataatcatgaaataatcacggatatccaaacaaacaacccgaaaccgaaaccgacacagtgtcggccggtcaaaccgcgggctggccggttcgaccgctcgatcaccgccggtctgaccggcatacacagcccggtctgaccggtcacataaaatgacgaatcctgcgatcacatgtgaaatccaatcatctccaaaaccacttcgtgaatagattccaaataacaaaaccaataatctacgatgcccaattgttcatcacagaataataatcaaaaacacctttgattttacaaggggggccatcagcaaattttatttccccatcacatcgaacgtttgaacacatttacggagtattaaatattaaaaaaaactaattacataatttacgtgtaaattacgagacgaatcttttaagtctaattatgctatgatcggacaatgtgggactacagtaaacatttgttaatgacggattaattacgtttaataaatttgtctcgcaacttacatacatattatgtaatttgttttgttattagtctacgtttaatacttcaaatgtgtgtccgtatatctgatgcgacccggcaaattttttgccggtgaaactaaacacagcctaacagccaacaggagggtagtagtaacagctactgtagcacgaaatggagcaaagattgtgagtgaaaaaagatccgaaaggcagaatgatgcggcgcaggaaacgggcgccgattctgatgaacacacagcatcacagctcgcccgtcttttttctactgcaccaggcgagcgagtataatcatcacgagcgtggttacccccccccccccccccccctctccctgctgctgcagcatccctgcgtgcgcttagctttccttttcccttctttttttaccgcgttgcagaaaagctcaattagtcggcaattccttggacacacgcatctctctctctctctcttccttcctttctctctcactctttcctgcgtattgccaggaattgcagatcatgccgcagcgagcagccaggcacagccttacctggtactactactcctacgctagctctcgctctcggttgctgcatgcagctgcagctgcagcggcagcataggactgattgcattccatgcttcggccaggtgcctttttctttcttcttttcgccatggtcttgcaaactttgcgttgcgtcgcacagtggccgtttcttcgctcgagaaatggtagcttgggattgggaatgtgtttttttaccgacactgatagtgatcgagctgggtgagtgtggactgtggagtgtgaggggggggggggggagcaggagcagggtgtcgttgatgcttctctcccagcgaagaattgcgcgccgcgccggattgataggtcatttcagggggagctgcatgattgcatcggccagagagaaaggcgagctacgcgctcaggtgcggctgcctgtgcggggttggacaccggactggagagagacgacggccctggaatacacagagaaagagagaggggaaagaaagaaagttactgcgacagctatgcatgcatggcctaattgtaaatcggtggctacggctactagcactgcatgggaatgggatgatgcatggaggagtgatcaaaagaggttccaaatttctcttttggggagaggaatttgggggtgatttgatttggtctaaatgattttgtctagcgatggtagtgctccggaattcgtaaccagggaattcctacggctagctgctgctgcggctgctgtttacaaaaccgtgtagttatcgcgatgatcacgtgcgataaccttttcagtttttgaaaccacgttataccttagggtaaccacacggttttcacgatgctaagaactttgcatttaggcccttccactacaatatactctcaaattgactcgcgacactcttaacaaaacatacctatgaccccgcaaaaaaaaacatacctatgaaagaggaggtgaagagacggagatagaaggtagggtgaggatgatcccacgaacccgatgcgacgtgattgtcgtcgtgaaggcagatggtggacctagaatgcgtgaggatcatggtgacaataacgctacaccggatttgcatgatcaccttattctcccgatcgtgtcatctatttcaattcgtctccctagaccttcaattgccgatgatcacaactatcctaatcgttgtttcttcccctcgtctcccatgggcatggtgagagtcggtttggaagtggtaggagtcaattttagggcatactctaattgaggatgtaaatgtaaaattctcacaactatggtctatggatggctacgtcagtgcccgagttgcatcatatgcactttggacctcggcgatacaccaaaccaatataagggatacaaatacatattttacaggtttataaaccaacatttagcctatttcaagttttaagtacaggctctgtattctactctttaaaaaatgaggacatgtagctagcatgctatatctaatctatgtcctatgctaataaactgacaaaggttatgttatacaagttacaaacgaccgttgttctctctttcagagaaggaaactcactttgtgtaatgcccttgtgaaatccacaattagcaattaaaatggtctccctactttttacaaaggtacccgatatatcggtgatcaccagtgtctttagctgaaaagaaactctgaaatgcaagatgtgtttagctgatgacatgacaaacacactgttgctgaactgaaatttatgtttgaaagcgagctccccagtatacttgcacagtgaaaatttatctttctgaaggatggcggcatggactctgaagcctgaaagtctgaaaaagcacgagaataattatagatcgacacacatggccgtaggcactagttcatgttggtaacctggttgggattcgagagcacgaggacatcctattgatctactactactacgcatatacatgtacacacattggcattggcattggcattggcaatatatattggcatgcacgaacttgcaaatgctatagcatgatgattgcgataactgagagcaacccagagataaaagcagctctctacctttgcaaactttggcgagcatgttgcatagcatggagacctaaatgatgaaacaggcgaacgaggagggagaaaggtactgctcgaaacgatatgttcttgataacctcttattaataacaccttctttttgctatataaaatcaataaacgtacgacgacacaaagtcgcatgttaatatacggtagtctacttgttgatgatgatgcttagtgctaaccagccagagagagagaacaagatggcactcatcatcgaattaacacttcagaatatagtacagtttcttcagtcctgtttgcatgcatgcgtatgtatgaggaaaggaatgccagacacctatagtttatgacattttgtcattttccccttaaatttatatatgcaatgaatacactattttcatacaggagatcaaaacaaatactaccaaacaatctggccatgcgttctattaattttatatgacgttttctagcattgagatcaataacaaagatagaagaattcagtagggccagtcctctgttcgtcatgaaaatcagctgctactagtctactatactagcagctattgtgcaaagtacagtactagtatttgttagtttcaatcaaagtccaaaagtaattgccaaaattctgttcaaaagaagatggattgttcgccggcccatcgtttagtttcctccaaaaaaagatgccatctttttctcctcctcctcatcgaatctatgcgtactactgcatgcagcttcgccaaaaggacaacttctgaatattgtaaagatcgagtagcagtagccggatgatgcatggtagtattaaaaaagacatgtgtgtgcaacttacttctaaaattttgttaatgagctacacatgcggccatcttagcagaaagtcgaaagggaggaaaagccaagagacaaataaactttagttgtttgaggagagaaagatgtcaatgccatctcattgcgaggctagtttatttagcgagagagagaaaagggagatcctagataggatcaaggcaagggccgggggcacttgtgggagaaaaatgatcgcctgcatgtgtgaagaatcttctcccccatcaccacccccattgctgatcactaacagttggggcgttttttcagcaaagcaatcacttcggtgacaaggatgagctgttcgtctgcatagtttatcattggcaaaaacactagctttaatttcatctccggtcagctatctaccacggcatcaacaactatatatatatatatatatatatatatatatatatatatatatatatatatatatttgcattcgtatatacgtggcgttttggagtagattttttttagtgtgtatatatatgtatttctagataaataaagaagaatgcgtgaactgaatttccatctagctgccaaactcctgtcaggacaacagaaaagaaggcaaagaggggggtcgagaggaaattaaaacgtacgcagagactaatcaaagagggtcatcagcttgctaatcaagttatgatgaaggtaatggacagtgctccattaattgcgttggcgagatcgatttggcagagactagccccctcatgatcccatcttaataaacccccaaaacaaacaaacaaagccttgataaaagctgcccatccaatgagtatatgagacacattcccccttcaaaaaaagggggccaacacccacacaccgatgcaggcacaaaagcaaagagatattgacaaagccctttttttcatctcaccttgcacacacacacacacacacacacacacaacccctctctctccctggcttaagctatatatgatcccctcatgccccagccctttctacaacacaaacacatacacacacaatgcaccttcacctttccaccccataaagcctcccttggcacccctatcccactaaggagcaaaaagagaaccaaaccaaggcagctgctgcagaggcagtagtagtagtagtagaagtagctgctgtgatctagcctcttgtggtggtagctctagctctagaagtggtattgtggtgataagcttaagcttaagcttattagtgatcctctcccttaaaaagaagaaaagctccttgcagttatggcactggtcaagagccaccaccaaatgttggcctcttcttccacctcgtcctcctcaccctcctcccagcagcagcagcctccaccgccggcgtcgaactcctccagcctcgccgccgccgccgccgaccagccctcccccgccaagcgcaagaggcgccctcccggcacgccaggtacgtatatacgtatgtgttggagacattgataccatcatgcatgcatggtgttcgatcatggagcccgtgtgtacgtagacccagatgcggaggtggtggcgctgtcgccgaggacgctgctggagtcggacaggtacgtgtgcgagatctgcgggcaggggttccagcgggagcagaacctgcagatgcaccggcgccggcacaaggtgccgtggcggctggtcaagcgccccgcggcggcgacggcggcggaggacggcggcgccgcgggtggcggcggcggcgccggcggcggcgcgggcggcggaggggcgcggaagcgcgtgttcgtgtgcccggagccgagctgcctccaccacgacccggcacacgcgctgggcgacctcgtcggcatcaagaagcacttccggcgcaagcacggcggccggcggcagtgggtgtgtgcccgctgcgccaagggctacgccgtccagtccgactacaaggcccacctcaagacctgcggcacccgcggccactcctgcgactgcggccgcgtcttctcccggtacgtacaccaccccctctcctcctcctcaaacctacgtagcgttcatggcggccggcgacgcatgcactactactactacgtacgaacgctaaccatccatgattagcgattgatacgatgacgtttgggtggttggatatatatcatgattatgtgcatacgtaattagatcttggagtatttagatttaaagagatgaatttcgaattgtttttggtgggagacagggttgcatggagataagacaaaagctatggtacgtttcagggtttaaaacctgccactgggctgtagatatgatatcgccactcggagagagaaaaaagaaaaaaagaaaattaaaaggatgtgtgtttttgtagccgacaccaattgactagctatagtttgatctgatcgatccgttgtttaactggctagctagctgaccaaagaaagagcatatttatgtacggactaattggatcgggactattactactacttcaggttcttgctgttgatgcatgctgatcacttacatacatacatcctgctaggtagctagggtccagtagtacgcatatatccatcgagattaatcgaaaactattttctagctagactgaaaaagggagagaaaaaattaaatcagaggagatcgatgagatcatggaagagatgaaaaagcagggcagacgcctggcatatgatcgtttcggtggcgggttgcggtaggaccgaaaattcctacaggaaagcgaccgcatatcgaccaaaaactgtctctgcgcatttcacccaacagctaagctaagtgtagtagtagcagcgatagctccagcttccggccagttacgctgataagatggctggttgttgtagtcctaactcaaagtaagtaaaacatgagcgccactgtttgttcatgtgcaaacataatgcctgccagagctaatcagccattaatagcttgtaggagtagcattttagcatgcgagttactagcagctatttatggatcttaattctgtgaaaacttatcaggtggctgtagtaactgctatcgtcacgtaactttaaccacaaattacttttaaataattacttcctccaatccatattatcagttgttttgtcaaagtcaaacttcttcaaatctaaccaagtttataggaaaaagtagtaacattttcaacccaaaacaaatttgttacgaaaatatattcaattattgatttgatgaaactaatttggtgttgtaaatattactatatttatctataaacttagtcaaatttaaagcagtttgattttgatcaaagtcaaaacgatttataacctgaaacggagggagaacattataattaagaaaacttgtgtggttatattaatgatgatgtacacttcggtaatataacatatttttaagtagtatttatttttttccagaaaaattaccagaagtttaaacctgtatagtgacatagccaattatttaagaatgaagtatataatatctctatcaaatatagcaatcaagtacgtgataggataatcctgacctgcctagatttacagtaatagaattagaatgtgtgtttgatcccgtaatagaacggacactagtactacatgtagatgtcctagggagtgagatgatgtggacgaggcaaggtgcaaggtgacgaagcagaggtcgctaggtaggtaaagacaagctgctccattcctcggacccctggatccaccaccaaagtacaaccacgcgcggacggggcacatcaccagatcgcccggagctaagctatacacaggccaccatgtgcacccatccatcatccatgcacacacaacagcatcatctcctcctctgtttttttctctccaggacaagagcttcccactaggcgatcgctttaataattggcagtagctaagccacactctcttgtcactgaccagcccataaatataccggacgagcagcagcatcagcagcatatgcagcatgttttcccctgcagataccgatatgatcgttgcttcttccatatgtcgtcgtcgtcgtcgacgactggttttctagctcgatcaataatggcgtaagtgcaggcgccatcactagctagctgtgtgtgtagtatatgtgtacagtgctgctgttggttggtcccttggacggactggtcgcgcgtggccatttagtcagcaatggaacgtagctagcttccttgatgggtttaacgatggcatatggtggtccatcccatgggtttcatctggttgtctcatgctctcatcgatctgtcagtgtgtgtcttgttcgagatcgatgcgttgctttcgatcgatctacatgtacagatgatcaatcagtcgatcagatcgatcgccgtgtttttgttgtgtttggtgataagatggtggttaagtggtatgattagtgtgtgctaatggcggtggttgtgtgtgttggttgcagagtggagagcttcatagagcaccaggatgcgtgtaactctggacgtgtgcgcggtgaggtcgtgcccgtggccacgacgctgccggtcatccgtcccgcggcgctgcggcatcatcaccatcatccgccgccgccgccgcctgagctgcagctcctcccggcgtccaccacggcgccgttggccgccgcgttctcgtccaactccacgaccaccggctcctcctcccacgagcaacacgcgacgacgatgacaacgacgaagctgcagctctcaatcggccccgccgccgtcgtcgccgcggcgtccggcggcggcggcgcctgcgccgcggcggcaggaggggaggaggagcagcagcgggaagaggtgaggcgcgcgctggaggagaagaccgcggcggacgcggcgcgggagcgggcgcgcgaggaggccgcggcggcggagcgcgcgctggaggacgcccgccgcgcgcgccaccgggcgcgcggggagctcgagaaggcgctcgcgctgcgggaccacgcggcgcgcctgatcgcgcaggtgacctgccacgcgtgccggcagcgctcgctcgccgtgatgtccatggccgccatcgacggccacggcgcgtcggcggtggcgcgcgagcacctgaggggcggcggcgtcggcgccggcatctagctgatatgtacatgcatgcacatgtacaacttgtacgttcacgtgtgtacgtgcacgcgtatgtatgtaaagcaaggggggttgggtgacgacggtgtaattcatctttttttttagccgcaaattgatgaagtgtacgtagtttcgtaggtcgtttcgagcttcggtcgatcgatgtcattgttgggaaaattatcaaaggtggtatttgcaacttttgcatgaatgcaccctggcaccattatactccctccgtatcgaaatatttaacaccgttgactttttagcatatgtttgaccgttcgccttattcaaaaacttttgtgaaatatgtaaaattatatgcctacataaaaatatatttaacaatgaatcaaatgataggaaaagaattaataattatttaaattttttgaataagacgaatggtcaaacatgtgctaaaaagtcaacggcgtcaaacatttcgaaacaaagggagtagtttttagggtgctaaaaagttgctcttttttttttactggaaaagttgctcctttaatctggactggtaatggttctaggttactacttaatggtgtatcgctgcatcaatctgtaaatgatacttcaatcactataaaataaattaatggtgtatcgcggcatcaatctgtaaatgatacttcaatcactataaaataaattaatggtgtatcgcggcatcaatctgtaaatgatacttcaatcactataaaataaattaatggtgtatcgcggcatcaataaaccgctgttttgaaacggaaatgtctgacttacactgaacttttggcctagtccggtttaccccataaaccgcaaaattagacatttttaactctaaacttttcaatccgaatgaagtactctctcactcaatccaatgcggttttggtttcacgtaacatgtgtaggcaataatttaactgatgtgataatccaattaacaaaataaaataaaaaaaattggtgaggccgacctattagtgttgctgttgctgcttgtttacctctctagcatcctctcttcttgatctctccatcctgaagcatctctatggttgggttagcctgaagatgtcctcccattcctcctccctccgtactctctctctctctctctctcatagagctgtaggatgccatgatgccttggcttccctttccttcccctttcttccatcctctcccatggcgactggcagctaaaggcacgtggattgcaccccaaattcacagtgccacagagaatggagggggcgataggggcaaatctcaggaagggaagaagaggcgtagtttgccatcttggggcgagaaggaatatgccccctcatcaccgggaagaagtaattgtggaagggaatttaagcggccacaaggtggtggcgttgacaagttcctacctgttgccacgtctacctggttgccccttttgttaatttggtagcgtcagaccttgcctatgttggttcagttgtgtacatcacccccatcaccattgcgggtcagcctgcaaatggggcgggtcggcccgttggaccgctggcccgaccctcaaaattcggctccagaaggtttatgggtcgacccatataattttagggtcaaacgagtccaggaaccagtgcaccctgggtcgacccgtaatcggcttatcacagcactgcgtaggggcgacgcactcctcagctagatcgaggcggcggcggcggcttcaggttggggcgacgcgccccaggctggatcgagggctcgaggcggcagcggcggcggcggcaacggcgacgacgacttcaggttggggcgacgcgtcccggctggagcggcggcggcggcggcttcgggttcggggcgacgcagtcccgggctccggcccggctggatcgagacggtagcagcggctccaagcttacaagctaggcggcgatgcgctcccgctgtccattattgatttagcccaaccttgcttcaggctgcagcttcagcagcgacgacgccggcgatcatcaggattatgagcatggagtgtgagtgttctttgttattgcgtcttgggcagaagagcatgttgttagattgggtgtcatttgcttgatgaagtactactggttgctagtagtgatgtttgtgttttagaatgcgaagatttgtgcaaaggaatcacaaattctgaatggaacatctaggaaagttaatggagttatatctgtttctttaaaatttctagattgaattttctgaatccaattcaatttgtttttcttttgcttctattctgaattgtttaaccatgatttgtcaatttatattatcatcttgtccggctgcattttatttgatgcttatcaactactgaactctgctatctttgcatgtcgctgcttggacaagtgcactgttatgttgtctggagtaggaacctaacggggcgaccagtgccaccagagaggggcgggccaatgtttgtctctggtttcaactggtgcccaaaagcaaatgggtcagagggtatagggaacgggcctacctgccccgccccatttgcaggctgaattgcgggctccacctttagcttctccgtcaccggctttcatcctctctgctcccctccttcctccggcacctgtgcatactcctctcttccctccttggcacgggtggcgtagatatataggttgaccctagagaggagcgcaagtagaaaagaatatgaagcaaacgacatataggtatagatatttctttctttatatatatataagttgattatcccacctggatgattgagtgccacctgatacaacgttgccacgagagtcaggggggattaggggaagcatgctacaccaaacgtttaggggggcaagtcaaacattttcttttcttaaaatgattatgcattttttttatatctccatcccaaaatgtaccaattttttactattcgggaacatagccaacaattattttaagatagtgtgagcacactcaaatatgtatatatgggatccgttactcattgctgaaaacaaaatatattatagtattaccgtggataaaaaaatagtaggatatttctaatagtcacatgcggattgatttaatttcgttgtattttctctatactaaaatatattaatttctatttccctacctacgtacctttgcttcatgaattgagaaatcccaattgctagaagtgaacatatttattgacggacgaagtagcattgtatctcaaaataaaaggatttctggctacatatatatctggataaacacgaataaaaaatatttatatcatgggatgagggagtaatgtctcttggatttacttaagaaatatatagccatatttgtgttgcgattgtattagagctctaacacacacacacacacacacacacacaaaatatcaaattacagcgtttggacaaagccgctatcaaagacgtagtagtacaatattctaggtacgtagatgaaacgatctctttaaccatacctcaatgcatatacagtactcatcttagactcttattagtgagcaaacaaatacagtagttgtggcaacagggatgccattgcatgatgcacatcgttcgagtattcgactcgtttacatcgagctggactcagcctggagtaataatcaatctgagccagtagtttacagcatcagtgcgtcactgaaaagaggctgcagcggcgtcaggaggaggattcagaggatgccgttcctttcgcaaaaggaaccaaaaaacgcctttactcatcctgcttttaaccgcacgatccaggcgcagagcccccccttcccggtcggcgcagctgcgagcaactgcagcgcgcaatccatttcgtcacccagtgcgctctgaattccccgtgaactctgccgcagtaaaaacgctcgattaccttcgcttttttcctttcttttttttcgcccagtcctcctgcacagcgagatgagggaatatgccctgattttatacatggctgggccggtctgtggggacgtgtgttcttgggcttcaccacatggcctgttcggtagtaaaaactttgcctcatctgaaacaaacctggcgacgtcgcggtgacttttaccagaagggtactcgagtcgttttgccagttgcattcgatctcttcgatggcgttgtcagtcaaatgtgtcgtgccactgtgtgcctgtgacttggccacatcgtacgaccatccggcgaggtacagtgctagtacagtatacaagttttgcaaggattttgtttgtacggtcgaaatgttcagaattgttttgcaagggggcaatgccaatgtgtcagagcacgctcttgggtaaataatcatcgatggagtactacagactacagagtgctccaacgttggagctcccggtcgaatagattgtgacaatgtagtttgacctactctagccgcttgcaaagcatttgcaaagcaaatgctcctccgatgactactactggttccttagctagacaccgccctacctagtactcctagcttagctatggtggcaacttgacaagcttgcattggcgaccaacatgtgattccataaaagctgtgaggtgaggtgagatgccatgagatgatcgatatatgtaatacactcttgcaaagctttgcccctagtacgctttctttcttcttcctttttgtttgattcttctcttttctcaagacgtgatcgatgcgagccgctttttggtcgcacgtatcggcgtaagcacgctctgccaggggcccctgcaccggcacgacgctgtcacggcggctcgtgacgagacgaggcgcggttcggttggttgggcggttgattccgccgagatcgacgaggacgacgcgacgacgcaaaagctagcgacgttcggttcgtacgtgccggtggcagatggcacggccggcgttcacaatgcgtataactggcattcaaccttaggcagccccagccaagattccacgccacgtcggatgtttccgttaccaagtgaagaaaatggagcctaaatgagtcgcatgtttctcgtcagatttgtcagggattcgtctggatagcccacgacggccaagggaggagggctgccggacggagaagaggacggaaggcgccaccgaggagagggtataggccacgccgccgctcgtcgtcgtcgccttggacaacgggcgccgacgaggaggggagatgagatttggcactagcaagctgaggggagaggggagatccgacgagccgctgccatcgcccaaggccagatctagcgagcccagatcggatatggccgccccgcctagcgccatcactgctcggaccaccgcttctcctgacgctattgccgcttaggctgctgctccgcccggccgccccgccacagtggaaggagaagaggagagcgtgcaagtcgccgctcgagcgtgagagggaaagagagagagaaagagagagagagagagagtggaaggcatgatagaggggaaaaaagaggagagaagggacttctgtatttttgtagaccccacttaaggctacagtattgtgacacgagtgtctaatactggtcttgagccaactgacatgtgagacttggcatgcgagtaagaagcactgtaaatgctctaatggaagcttttccttggctcggctcggcctcgtctataacaattttgatcgatttgacacgctcgatgtacctatatctctctctctcgcacgtgctagcgtgtgcactccggaattatgcaatcagagccgatgaaatcgtcacactttgctttattcaacacgatcgtcaagagccgcagtttttgttgttacgttcctcagagcagcacgcacgtcggccggcgcctggaaacacgaagcggtcgccggcgagtgctcatatctcgccgtcccagaggtcgtcgagcgacttgtagggcccgtggtcggagacgaagcggagggcacggttgatcttccgctgcgggatgccggcgatcctctgcctctcctcctccgtcagctcccatccgacgatgtccaggttctcccgcatccgcgcctcgtcgaagctcttcacgatcaggcagtccccttgctcgtacacccacctcaggcacacctgccaaatcaacacacacacgtcagttgctgctgagacgacggcgcgacacgaacacacgcgtgcaaatgtagacgtgacgtgcctgggctacggtcttgcccttggattgggcgatgtcgcggagcacggcggaggccatgacggagtcgctgccccagtgcgtgccgctggcgcccagcggcgagtaggcgcagatctggacgcccttctccctgcacagctccctcagcttcctctgctgccacaccgggttcacctccacctgcacgtacgtacgtaccgtgacaaaccaaacgcaacgcaaacccaacacaataagcaaatcaaccattaaaaaaaggttataacatttttggttgttgcagcattgtgaattgtgcaaaccaacctggttgacggcgggagggatggtggcgaaggagagcagggtgtcgagctttttgcaggagaagttgcagacgccgatggccttggcgaggcccaggcggtggcactcctccatggcctcccagacggcccgcatgtcgaacggcacgaagtcgtcggcggtgaagggggccttgtaccggcccggcttcatggacacaggccagtgcaccaggtacaagtccacgtactccatctgaaggttcctgcatatatacgtgtgggatgagcatgtgctttctgttaattaaggtgagtcttaacctttcataatcagttgattagtcgcatggtgcctcagatagaaattaaatgcactgcagttaatgagggactaatatctgtttggaggtggcagccaagatggtaatgaaagaatttgtctcgtggctaatgcagtatcttccaaaattaaaagcactcaaacagtttggtttttcaactacattcaaaattcaaaaaataaactagaaattagaaattaggttttctagcttttttaaattattagaaactagttaccaactagatactcaaggcatccctatactcaaggcataggagtggtcggcacgtgatatactcaaggcattcctatactcaaagatgagcatcagcacgacaaccaaagagtaagactttttataatttgtcttgttaagattaaagaataatatcacatacaattttgctatatatttgtcgataaattttcccccaaaaatttgacagatgtaattacagtacaatcatagtgtaattacactgtaacatgcatgtaattacactgtaactataatgtaacttctatgtaacttttaaaaatctctccgtaacatgttattttggtaaaatagaggttgtgggaacaaactatttcacatgtgtgtgtgctgtgattttttttcttcctcatcaaaacaaatcttataatagatctaacaattcaaaattacgtgaaacttacgtacaagttacactatagttatatagttatatgcaagttacagtgtaattacactacaattgtattataattacatctatcaaatttttaggagaaaatttgtcgacaaatgtataggtggtccctatcacatatcctaattccacaataaattttcctttatttaagataatgcctttgtttttcttataggcctggcccaaccgattactccaaacaactcgtaataatccactactaaaatcacaattcttcacttgattccgccggaatcttatacgggggcaaagagaaggggggggggggggggggggcatacataccatagcgtctgcctgagcgcggggagcaccctgtcgcggtgcgcgtcgctgcaccaaagcttggacgtgataaaaaggtcagcgcgggaggcaatggccccggaccgcacggcctcggcggcggcctcgccgatgggcgcctcggtctcgtagtgcgccgcggtgtcaaagtggcggtacccggcctcgatggccttgagcacggcgcgccggatgggctccggcctcggcccctgcaccgccgtgcccatgccgacgcgcggcatgccgaagcccgcgcccttggcgcctgcgccgccgtcgctcatggctggaggcagagtgtccccctctcttggacggactgcggcaatggattggaggatttcgtgggggtttttatggcaaattggcaaagcatatataaacacgacgacttgggtgcggtgttgacggaattcgccgtgacaccggttggttatttggttgtcgtcggtgaccagtacaaaactattcgatgctttcgcagaattttctcaaaaaagaggaggaaaaggtggatattttgaggcgcgcatcgcgcctgatcgttctcgttttcctctcggatttgtttttggatcgtaacggaagttcatttgcgatttgacgggaaaaggagagccgttactcaagcctatgctgatctaaggagaaggggaggcggcccatatcacgccatcctggttttgtagcatagcgagaccggccaagctcatgcagtcataggcttggttctttgcgttacatcacagattaatcttaacggtcaccgctagtagtgacttctcggagtgtcgatgcgatgtggatcagagcaagtgataatccaagtggcgttctaatacatccatatcgatggctatcatgctagtcattttctacaattaagagagggttgaaacttcttcgtactatctaaattataccccgaagcttaattatagtacaattttaagaattattttatgtacttacatctgtcccaaaataacttcaggcataagggctcaaaataacttcagacataagggttcaaattagcacagaaaaaagtggcactaattaatagaaatgttatattaatggatgggtagataagagatactgaaatgataaaaacttaattttagactgaatgataggtaagagcatagaatttgttttgggacaaatgttagatgttaaaataaagttatcttagtacagatggaataggtttttctgtctcattagcaatagaaaagatgtaacttttcagaaaatgcagtccaaaagcagaacaagcttcgctggattatgaagaacgaatcacatcaacaaatataacgtgtcaagcctagttgcacattggaagctgcttcgcactatcaatcaaaatgatcatgattctcaaaagtgaaaaaaaaagaatggttcagtatttcaatatttgacaatacataaccagcggtgggtacacgtataaatagacaagccgctctagaggcatcatctctacacttcagttattctgctataggaaataagacatgacatgatcttccagagatgctcaggtaggtcatgcatcaacaacgtgaaaatgtctagacatcacagggagaattacatgaccaaagaaaagacgatttatcacagcagtcgcacaaaaggagaacaaatttataggttcattacctgttcctatgaataatggcctaacctgaaacatggcaatctctagctgctcctgttgtgcgagagctaaccttttctatactgggacttcttagtggcaccaaaaaggagtacaactccgctgctctccagcctttgacaacagtattactcacacttgatggatttgtatatgtgacggacaaagaacaatgcggcacggaaaccgatcatgcccagcatcaggaagaaagcatagcagatgcaagccatgtagccgaagaagaatgatgtctgcataaatccagacatatctgatcgtgcataatagtagtacagacaatacccatagacaaaaaatccagttgatcctccacataggaatgacctgtataagagaaagggcagaaaaaaaatcatattgttgttcagcatttagtacaaaagaacagcattaaactggagttcctagataataaatagatggatgagagaacataaggattggtagaatatccataaatgggtggtgctcactgctcagcattgtataccttgctcatgacaaaaaaatgtagagttgcaacagatttcaagaactagtccctctagaatccattgagatgatacataattggttattgcattgtactcaaaatttcactacgataatactttgctaatcagcaactccaattgtaactatgggaaaacaacagaagggtgcccaggaaatacatatgaataagatgtcaaacaaacgaaaaaataactgcagaaaattgacagccacctgattgatctcagagctcaataaataaaagcaaatacccaaaatatcagtttcagtgtataaaatgaaatatatgatgcattcccatgccagtacttgtttaaaaaacataaagggaaatgaatgtacctccaccaccattcatggtcttcagcagcaagctgaaagtacgtcagtgcaacagtaatgaaggcagtaacaataaggaggatgatgaagactatgaagagaatgctgtaaattgtgtaaatcctgtggccccaaacactagcaaagatgtagtagagctcaatatagatggcactgaaaggtaaaaacccagccatagccatctgcgggattgtttgccggtaccacggaagtggaggaatctccctaggatatttggtggtacggcagggagcttggaattcagtcttgctgtttttaccagcaatgcctcccaaaactagaaggggaaatgtaactaaggtccagatgagcacaatgacacagatagtgccgaagggcaaagctgctgttgcactataagcaatagcaacagtgtttaggaagcagaaagtcaggaataggggtccacagaacaggcatcctgtcaacagcaagttcctcacctgagaagtataaaacgatagcattagtaataaaagaattataatcgatgcttttaaatttgcagtcttagcattgtagaagtgtctagggatgtattatgtatacatgtaacacatacccagtttgttccctctagctgacagtagaaagaggttgcaatatacccagcaattcctgaagtgagagcatagatgacaaccaatgcagtaaaaagagcaccacgattgtacgggtagaatactccaacaagtgcaagaaggaatataaaggttgtgctgcaatgtgccaaataaagattgttagctatctgcatgtctaaaaaggaacaacaggaggaagaattccagttaagcaaaataaaaccataatatatgtggcaagaaaaggcccatcaaaacttacagggcaaacagttgagttccggtgccgagagcagccgaaaaaaaggacttgttcttggggaaccggaagacatccccatggatatacttccatccagactcttcttggtcatcagctgcttcctcatcatgggcataccttcaaatgaaaaagggttaaactaaaaactacgagatgaaatgtagtcaagtcatcaagctcataaatcaaagagaagatcaaccttcaagtaataaattcataagcattacactacaaaggacatataatctgaacaccgttgacatagtagatctgctttatgcgcttcctttagcaagttaataatttaatatccatttcagaccaaaatatttgctctatgcatcatgcattagtttactctcaactgaagaacatggcaagaggaagaatagatgctcgtttagtagaatagaaaccactgtttggagtgagtttcgacagtcatgtcaattgtcaaaatgcatctccataggaaataaaaataatttatatgctgcaattttccatgttctatgggctggcatctgtctttactgtcactgctcattacatttcttttcttttagtgcttaactagcacatgtgcatagtgggctcaggcaaatatcgtgacatgcatggagtatcttccaaaatatctttaatacttaatgtaaatacgtaatgtatagatccttacttgacaaaatcgttcttcagtactcgcatgaggatggtcgccaagaatccagtcaaaaggaggactgtaacacaagagtttatgatagagaaccaatggacctccaaatggtgtgggaggttggaggaactggaatacttctccatcctcttctcaaatggtgtgggtgtctccttccacttgactgagtaaaggaattgaacatcagcttccttgtcctcagtcaggtcaactagtgcactctggtcagtgtgcacattgatctcaataacccggtcattgttgtagaggatgtcaaagatgatgtgcctgtacaggtaatacttccactctttcggatctgtcttgcctcccttctccaccttaccaatgaatccccacagtgggaggtcatcgtagtacatctggaagtagtagtcctttgctaccgcattccgaaacttggccacctcctccttggtgagcttcttcgagcaaaccggcttggagtcataatccacacggaaatcaagcttgtaaggtgcatcaaccaaccggtccccattgaggacctcaccgagtgcctcgctcttctccttcactttctctgtaattaacaccatttattagcaaacaactaactgggattcttcagcaatgaagaggaagcatgaatctgtgactaactaacctggagagcagaaaggcaggtcaaagtaccgatacgtctcactgcaaggaaaaaggaaaatatcatgacaacggcattcgcgtgacattatcgcctttaagaataaaaaatctactttacaaatagatccgattcccagcaagtctagaatccgctctccgaacacctatacttgctaaaactgaaacgaaaacagagcccgacgcgaagatctgggcagtcaacagtgcagtgatcgatcgttatcccgtccaaatcactacgaacgtcatctctcggatctccgaaactagcctctctgcgtttgaccagacaaacctaaacccacgacgactcagcccacacacacctcgaggcgagatcggggggcgggaacaactaacccaacccacacccacgaatctaacggatccgacgatgggatctgagcgggggaggagagagagagagcctcacctggggttgtggaaggggccgaccttgttggcgtagagcgggacgagctcgttggccttgtagcggtggtcggagccgtcggcgacgacgccggtcgccgcgagggccgcggcgagaaggacgagcagcgccgcgggggccgccgctgccggcgaggccatcgctctcgtcggggcgggggcgggggcgcgcgcgttgacgaggagagagagcgcgcgcgcgagggtttgggggtggtgggatgcacgcgcggagatctgagccggagtggccgctttgcttgctccttaatagagagagagaccgagacgagacgagacgaggcggaggggagatctggagagggtggcgttttcagggttgggtgggggggaggaaggtggaggcgtactgtggccctaatattgtagtactagtataatggggtcagctaagctaaaggctagtagtagcccacattttggtgcgtcggtcggtttgacacgatccaaatcagagcgctctctcgctccccgggggtcggggttgagtccagcgcaagttttctttccactttttggcctagtcacattctgatttttttttgtcaaatattatcggttagctccagtagtgaatagtgaaagtagtacggaaaactaataagatgaagattaagtaatggtacggaaaacgggaaagtcattagcgtatgattgattaggttttaacttattataaagttgaaaatggatttatttgatagtttatagtaacttttatgtataaatttttcacatgaaacatattgtttaacggtttaaaaagcgtgataatgaaaactgaagtagactacatacattttaatccaaaaagaacgggcagtagggcttccctgctctcaagaaaatcaaagtttagtgtatagcatatgtccatgtaacaatgttgtagaaacttgaacaagggaggaatgagggcaggaatttggtacaacattgctggatggacatatgcttcagccaaactttgttcaagtttggtacaacattgctggatggacatatgcttcagccaaacttgaactcagaaacgaatcgggctggatggagtacattgctggaagagaagcattactgcataagctcactggccatccctggaaggatggaagcgaagcacatgcttgattttttttaaggtagaaaaaattgctaggtcattcaaagaatctacaatagtgactactgcaggagtgtaatattcagttttatgctgctaagaaggtcactgcctatagagatgaaaatcacaaacatcatgagagttgacagtaccgcaagaatggcaacgggccatgtactaccaaagtgagcttatgcagtaataccatctgcagcagttaccaacttagcagggctatgcaaatgctgaaagaaaagaataccacaacgcaacctttgcttttcacctgccctcactagcgccatgcaaatgccaccaattcagtgagcttcacttcccctagtttcataatcctttcctgcagttacgctgtcatcaggtttcctctacatacgcatgctgacttcaagtgctggtaggaactaactctgtcggtcgacaatgacacctcttagctctctgcatgtgatgtatggagtatgcagctcatttccctgacaatttctcatgaataaatgggaaccgttgagagaactgataagtttcagtcaaaaaagaaccatccgcaggcggcagccacagcgaggtggttctcatttctactccctccatcaaaagaaaaaaaaaacaaacctaatattagatataatatttcctaatacaataaaattggacaggagtatgttcggatttgttgtataaaaatatatcatttaataatagatttttttcgattttgctatatctcactcgaaagatttttttcttatctctcactcgattttctcactcaaatttacagtgcattttcttgtaagttacagtgtaatttatgaaacttacacggtaacttttgtaagttacactgtaatttttgaatcttcgcatgtaaattttaaattttgtattggatttggtctttttcttgaggatatggtaatttagtgtccattatggtgtttcttaattactttttgctttttattatatctatcggattttaatccaaagattaaaaatctgtgcgataccatcataaaaatctttcgaaagatgtataggtacttccgatttttttttgaacagacggagcaacacactagttatcgggaaaaaaaaaaacccttccaagacactgcaataagctaattgctagcgttattttcttccctaaaaatcttaccttttccgaaggcatcggcttaatgctttacttatttggaggggccatgcctctttccagatgattgctgaagaattcttaatgtttactccatgaatgattgtatccccggcgtgattttctgcgtgatggaaattttgcacaaactttggaatcactacggttttgtactcatgtatctaagtaaaataatctctcattcaacaaacttaaattagcttaaaacacaagttagcattaaattcaactgaggcaacctttgcttcctccatacagtcaagtcaattcggcagttgaatttggtgaggccacgagaaatggatatgctccatcgatttgggggataaccgcgagaaatcgtgtggaaccaacagacgacagataacgagttctgggcaactaattgctcagataagaaagagagcgtacaacattgcacatattactttcatctatttaatagtatttaagaataataatcgaatgaaaccgctagaaaaaaaaaaagaaatccacaaatcttaggagtcaggcatagacacttcgtaagaaaaggatcaagattccattcaaatttacagcaaatacctcagttatcataagaatgtaataaaactacctcacaattgcggctgaccttaacctttctaaacatgcagaataatcttgggcatcattagtcgtgatgacaaggaatggacggtatttacatcagtacgaaggtaacaaaatcttgatgatacggcgaatgagcttgagcaattatatattaaacactaactttacaagactggctacagatgatccgaattgatacaacactcctaagatacaacatcacctgttgcagtttgcgaacagcgattgcacctatgctatcttgtccgagcagtgatttgacagctggactcgagggctaacgttagcatgtctgtggagaattgatcgtctggtttcaaccataaagcctgaccaaaatagcgagaaaatattagtaactaaccctgcgctacatgaaaacaacgaacaaactgaatagaaaggcattggtctccactgttatatctcttcagttttaaacttcaaaaacttaattgcatatatacacggtgaagatacattacgcacaagaaagtccctatgctgaactattggcagctccaagcggcttgtttggtaactggagggaagaggattgggagtttacacgagggaattgatgatgagattaagatggaaatttgatttttaatcccaatatcttgtttggtagaggtgatggaaattgatagggagtttagttggagattaggtcattaataaaaacggatggctgagatttgcttagacaaagtaaaggaggaattccctcccaattacctgcccctacccaggtattgaaaaggagggagttccttcctcaattccccatccccatcccaccaaaattcccatatctcccaaccaaacaaaacacttaatagcctcatccctctaaactcccaatcccttctaaaaactccctccaaccaaacaggccgaaggtgtttgattagaaagatgtattctaaacatgacagctaagtacaaatgatcatagagcgtcaccttgtggtagtaagttatcgcagcctcgaatttatcctgtgttatgaaaagatgatattagtaaaattcagatatactcagaaagtaactgtggaagtgtcaaactgaaacaatgaatcaagcatatcaggtctcattcttaaaactaaaaaatattgcttctacaaatgcaacttaagcttaaaggtcaattgtccttcgtgattttcatgtaaattagcaaggaatctctgaccgaaattttttttcctgaaaacactactactagaacttaaatcaccctctcattactctgttctcgattcttccaatggcatctctatgccttgtctagttgtttctcacttatgcctatgggaactaacaaataccaagtatcccgatgtttcaacggtaaacgctcagcacacatatatgaattgatgttgtaattgaagtagcaggttacataaaacttagttttgaacttctgatcatatagatatccaatagataattaaatataagtctatgtggaaagaccatgatctaacacgtatcatcttccaggttcttttgtcagaatttgcagaacttctgccctatgcacatgatacatcgcctttacagcatgccagtgcagcataacagagatagtaccattcaaagcagtggataagaaaggaacagaagagtaccataaggtggtaagtataagcaagaccagcaaacgcgctcaaacttttggtttgaaaggtgagtgccttttcataatatgatattgccttttgatatttcctgttgcaacaaaaaaaaaaggttagctcaagaatgatattttaacaactgatgacaacaaccaaaaagaaagagaaccagtataattcggttaattattattccatcagtcaaaactaacagcaaagctgctgttcatcgcaaagaaatgctattcaggtcaggatatgctaggcacaaaatctaaggcatattttcttattaaagtttcatgcaatttaggcttgactggctctggatacaaagaaatccacaagttcgaacttaccctcacacacactggcccaaataataacactggcatattgctgatttattttgttctagtctgtaataaaaggtcttcaaacaaagcaaccacagctgcacaactgagatgactgaactaaatcaacacttcctttcccattctctcatgtataacaaaaatcataaattgagcatataaatgggattggaacttgacaaatctattgctaaactaacataaaaaagtcatatgccaacagacttatgaaattaaatgtaacaatgtgatgcgatggttcccttacttgagtttccgcaatgcatgcccaagattcaccaatgttggttcccacatttcattcaaggaggatgaagtatgctccagtgttagctcaaaccactgaactgctttttgatacctaaacattttttttaaaaaaaacagaatatcaaattctcaactactttaatagcagcacaaacagttctttttactgaaaccactagaactggatgtgtcaaacatttttttcagcagagaaccaaatctaatgggatgaaattttataagttgaagagaatttgaaaagcaaataaaaaccaaacttgtatatggatcatggacatcaatcacacgtttcaaactctaatgatcatactataaatgcataaaacacacttgttatcgtgattgcgttaatgcagggcccagctggtgcagcattagttggaaactaaggggaaaaaaattagttgctctcttacttgggtttacttcactgaatactatgtgaagatcttgtcgatacaaagggaacagcaaagcatccgttacaaatcaatcaagaaagatgaaacattttttctccccaaagttcatcataatagcctatcctttcttatttatcctggagccattccccttcttttattcttcttttatcccaaagttcctccggtgtagccagtttctacatgctaaccttaacatgaactagggttcacatcattcccacttcaaaaagctttccatacaatactatgcatactacatccatattctattcaaaatttcagaaccaccaaatcaaccttgtatatcatggacatctttcaaaacatccatgttagcataacatttttcctataggaatatcagatatagaacttataggaatgctttccctttcatgagagcaaagcatcttacaagggaaagtggagcatcactggttccaataataataggataagcagacaaaagaaacctttagaacagagaaactcttactctttcatattataagctacaacccccatctcgttatatataagcggatcagatgggcagatagattttgcttgcgtgaagaactgcatcacagcagaaagaaaagggggtttaaaaaaatgatgacaaaactattatgccttgccaaataaaactttgcaaataacatactctccatgataggctctcattgtgagctacaacaaacagtattcactaagtaaaaggaagttgtgcatgataatatctcattttctataacccatccaatattacaaatacaggatgtattttcagcatctgaccaactactattaccacattaaacctccttttttgccaaaaacaaaatatggaatgagaaaatatagggaaaaaagtcagctctaagtatagtttctttatcagagtggaagcctcataagaaaattagtctcggtaggatttctcaagttattacctgctctgcaagtttgaaattgtgcattcgcaaatattgcatgcccatgtataaagttggcagatgacatctgaaatagaaaacaatttcaacaaatagtgagccgaaggacagacaacaacagaggtgaagtaattgaagtgcaacaagaatctacactccaaaacaaagagaggaactcaatccacaatgctcataatcagtaatgtgtagtagatacaaaagcttgccagtgtcccaaaaaacacgaatagcagtttccagaacagaaggccaaaaaatgaaagaaagtagaaaggatccacaatgctcataatcggtaatgcatagcagatacaaaagcttgtcacacccaaaaaaaatacgaatatcaatttccagaataaaaggccaaaacaattgaaagatagtacaaaggaaaattaatgcaactaattgtgttaagataattgctccttagacaaacaagtacaagtatgctctggtgttaatattgagttgacttaagtgtaaaaagaatcaaattaatttaattaatattttgctaaactgtacacagcataataacataacaaataaagaagtttttttacacaaacaattacttcgaaaggaattactgacccaggaaatagccgagctgctgtccgaaatgcagccattgcttgatcaccctcctcctgtgcagcataagcaataccagtaccaatccaagcaggaggaaatgtcccatctaaccctgtagctttgctgataggaaatatattagtgcaaaacatattacagctacttaaaattgaacaagaatacaaggtataagaagttgtaagagggttaaacccatccatgattaaattcaatgaacaatgagcattgaacaaataagaaacaaaataacctgcaacctttggactggtataactgagacacatgtcttaagaaaatatatattgtttatttgaacttggactctggagaattattggacagatatgtttcaccttacaaaccatctgacagactgatactacatgagtagaacctactcatttctgtctttttatcacattgttctatcattccagacaactaaaaatatttaacaaagaaatatattgtttgttataagaaatcaatcagtcagttggatatgcgtagatttcaggaggcaatggcacctatggacactgttctctccatcagatggtaacactattgtagcacacatgttataccatgtctgccatgttttcatgacaaaagtgttgccttacgcaggaacatggttgtgatttgcagtgcagaggatattcactaatcacaccctattttattttacatcccaacatcgaaggcacagcaggattatcttctaagctatcctaaggcaaaaatgcatagtgaaggttcaaataaaaataatacagtagaaattaagagaagaatatgcttacccaaagtatctgcgtgcttgatcatacttcttaatacagtagtaataacacccaacagcaaaccaggaaagagctctacagatggaaccacagctgacattaaaataatatactttgtttgctcatgtctgactacaaacaatcaagtgtactttagtattatgtccctccaactattggagtctatataaccaacatgaagggggggggggggggtcaatctcttcttgttcatcacataaataaaggtcagttaacatattttaccccaatcccgatgctattaaaggctagattttacaagttgcattaaagtttgcagaaagatgaataatgtgcacaacactgtcattatatctaagattgttacatgcaaatgaaagggggaaaagcccatctagcaggataacaaatattatgtgggtctgaatgtgggcaggccagtgggaatactcacttctgaggatagtccttcactagattgcaggccaaaatataaaggtcatttgaatggccaagctccattgcagctgccaaatgaactaacgtgcatttcaaatgaaaagggtccctttcaagtaacctgaggcacatatagcatcacaagaatgataaaccaatattgatcaaggaaacatatgtaccgacaatgaatcatttaccaacttacgcagatgtgagttcgaaacatttttggtactctccactctgatgatagtattcagctttgcaagccaacacgtcaatattatttttcagtgtcagtcctgaactcaaagatgaaatactacaagattctcgttcaaattccttgaactttgcttccactatatattctttttcatgctaaagccataaaacaaaacaaaccatgatcaaaagaaatataagtgaatgcagatacacatattgtttattaaattgcaaagcaatgcagttaataagtcgtgtaccttccttatcaaacaagagtagaatgctgagagccacccatcttcttttccaaattttagagaggacaatagctcagattctgatatcattgcataacaataagtaccaagaacaaagagaggattgaaggtccaacattaagcatatcttcttaaaactagtccagtaataacaataaacattgtattatttaaaagaaatatcctaagaggatggacatgacagatgggaagattgattttgtaaaacttaccttcctcgcatgtcaacatgtagttatcaacaaggcattcaagggcctgccatgtacagacataagaagttaggaatgaactaactggggttaccacagaggcccaattccatgttagcatctggatgccaaattccatatttagtagaaccaaaaatacaaaataatggtggttcatgtaattgaaaaggtattgtactaaagagtcacatgattcttctcacctcatagcacaaaggatcagccttcactgcagctttgtacctgagataacagcagaacaaagccataaaaccatcttaaccaagctatttggccagatatgcccaaaaaaaaacactgattagacaatcctgcttaaatcttaatttcaaacaaagaaaattagcagtacttccaggtagcaacagttatttcaactattagcagtgtgtcctcgttttacaagaaaaactcattttctttatatcttctaaagagtatcgaataacccaacattctcagtgaagatattgagtaaaaggtgtaagagaagaaagacttcaaaataactgcatcgtcattcaccagaaccactgaatacactcaattagacaaaaaatgaaatgatgctttaccattgtcgagcaaggtcacagttgtccagtgcttcgtatgccttgccacgtaaaaaacatattgccgctttgatctggcaagcaaatattactatcaatcaccatactaagagagagagagagaggcatggggaagagaaagaagagtcaacacacattgatctcatggtcttcagcatccttatcaaagtaaatgtcactgccatcatcctgatcaacaacgtttccatgctcatctatttttgcatctccaagtatgatcaaacactgatgccattctttcaactcctcctaacaaaccaaaacaaaacgatgaaacagtagctaagataaaaggaaagacggtagataaaataaaggactacacaggactgtacaccagagcacaaatcagaaaaatctatactgaatcataatattttctggtatggttcaattttctaaagtaaaatcttagaagtacattaaaaaaatcactaatcctatacagttcttttgatctttcctataagaaaccagatttttgtttcgagtgtcatggatattgattgaataagcagtcaaaatcatatgtgcagtttatatatctgacatatatagaacttaaacaaaattctcatttatctaaaagtccgaagcaggaagcacatattataatcaaccaaactcccagatcagaccagctattaagaaccaagctaagcacccgttcattgatggaatgcccaagtaaaaatattctggtcgagaaaatgcaggtgtatcatgttaattattttgaagcatcagcagagcattggacttgaagccaaaaaaatgaaatcccccagtgcaagccattgggcgcaccttgtgtgaagtaaacgaccctatctcaactcatacagctaaagctaaaagctgatcaagcaaaattttatcgagtgcttgcaaacacacagaatcaaatcgtcaaaaaaactgccaaacaatgcccagagtgaaagaacattgaggccaccatacaaccacaagctgttcataaggaagctcaagcgcagccacgcactggaacattaacaggggcagtgaaactaaaccttctatctacacacagcatgcacccaacatgttcgacaaaatggcagactaaacaagggcgtgggtggggaagctcacgaggcacttggctgcgaggaagcggaagcggaggtcgcggaggagcttggaggagttgaggatgtggagcgcgcggcggaagtggcggcccaggaagagcgcctgcgcgagcatgtagacgtcggcggggtcccccgtggccgcggccaccttgtcggcgaggaagatggcggacgcgtacaggtgcttcccgacgctgtcccgcaccaccccgcgcagccgctccaccgcctcctccctcatctccgccgccacctccccctccgcctccgcctctctcctccgcttgggatttttctgcgctgcggcggcggtggtgggcggcgctgctggagggaaaccgaattttgtatcccacattcgccactagggttcgcggcggagagtggtggtttttggaaatttctcacggggaaaaaaaaatggagtcccgacgcgccgcggatcgcagcaagtgatcgatggatggaacgtgcaagcagtatggcttatgggccacgggcccacggcccacaacatatgcaaacgaaccagaaagcctgtataggagaggacacacgggccaggcccatcatctggccggattcggaatctacctctgtgaaattgcgatcaaaacctacggaaatgtatagatttcgtggtatacaaatgttgattttgccagcttacattgacgttcttcaccttagtcgtccctgtttgaatttacttttctattattattaacacgggagaaacgataatttgaaatgattcctttggaattcctgcaaattcttatgtctatcttacaattgctgcactgttctttttttttttatcatgtgaagacgaattaatgtgcacgaacgtcgtccatcggagccgaaagcggtcgctacacgccgccggtgatggccctcgttgccggagtagcggtcatcgcctgtgagccgcaccgctggaaatcggcgacgcggggcggcggcatgccgcggggagccgtcgctctcaccggcggcgagacgccgacggcgccggccgggtgcgccgccgccagggcttcttcgccgtcggctgcgaggtcgccgccgccgcaggagaggaggcacgaggcggtctgggagcagcccagcgtggtcacgatgacgtagctgccgttctcgtacagcttcatgacgtagcactcctcgtcctcgagggtctcgcgcgggacgccgcccacccgtcgcgcaggcgccgccggcgaggccacgggaacggcggcgacgtcgtcggcggcggcggcggtggagggcgcgtcgtcaaagcagttgaggtggcagtagtcccagtagatggggcacctcctgatcaggatcgggttgcgcccggtgcagaggtagcagatgtacatctccgtgtcgtcgccgccagtcgtcgccgtggcggtggcattgccgggcgccgtgttgccgtcgccgcccgtggtggacacggcggcggcggcgaggaggaggagaacttggtaggatgcacggttgatggaagctgctgagagaggcatatcacaaattgatgagagatgatgcgtgcagcctgtctcatttataagggttttttttatggcggggatatttataggtcattttggctgcagctgcattttgacgtcaggagcgtagtagtatgaaattatgattatgttgggagaccaacaaaatctcagtcaatgaatggatactacaatttgactatacgagaataagtgcttacctgtttctgcgtaagagtgctatctgaattctgaagggtggtatcaaatttcaatcgagcaatctgctaattatctcttcccatgtagaggttacatgtttttcttcatcaagataaaccagaaaaatcggttgcatacatatgttattttgtaattaagattcggattgtatctctgtttcgttagcacgcttttaaactattaaacggtatatttcatgcaaaaactttctatatataggttgctttaaaatattaaagatacccatttataaaggctgtaataattatattttaattaatcatgcactaatagttttctcgtttcacgcgcatcaacttaatatttcatcctcatctgaaaaatagctttctagctgtactcattttccagatcaaacgtctagggtatacatttcctattttcctctgtacaaattttctaacaaggttcatactcatgaatacccggtacatatccctttcaaaaaaaaaacatagtacatgcacgtagactacgcatatcgctatgaacagcaaacaaatgtagtgcaaatcagtagtggaatagtgatttactaattcagctgttcagcaactacgcgctccggcggtggatggtactatttgtcagcggtggacacggttaattagcaagcccaggaagcaatggattctgtttgaaagtggtgagcaacaagcaaagtgtgttgtgctgccgcagccatttaccaaaaaacaaaccaccgaaacggcaggttgggacgtttttagccatagaacgaggagacttctcgtgttgctgccgcaagccgcaagatcgatccgatcagtaagaaattaaacggctgtgaatttatcccaagaacacacactcgtaatttggttaacagagacagatcgtagtttgcaaatatgagctggttgattcttccacattaactactacttcctgaaaaaaaattgtgaaacctaaagtgttactcgtattattatttttatttgttttgcttgcttgaatttcttttggttttctctctaccatactgcctatatatttatgcacagattgacacgaggtttagtgctatgtccaacgttacattcgtcggatcggatcatcaaacggcacgtacgcgttgtcgacatgggctcgcggacggcggcacccgggcacggctagcgctggtcgccgcaccgctcgaactcggtcaggccgcgcggcagcgggctaccgatggcggccggggtgatctcgccggaagcggcgcccgacgacgacgacgacggcagcgcgtcgccgtagctgcacacgaggtagcatcccgcggacgcctggcagctgaccacgtcgacgacgacccagctgccgtcagggtacaccttcatgacgtagcagtcgtcgtggcccccgccccggccgttgtcgccgccatcgtcgtcggcggcggaaaaaggcagcgcgcgcggcggagacgaggaggaggagcgcgacgccgacgacggcgacgagaggcaggcgatgtggcactcgtccttgtcgagggggcaccagctgatcatcagcgtgttgcgcccgcggcagaggtagcagatgtactgctgctcctcctccgtcgtcgccgtcgatagcggcgaggagcggccgcggcgcgccatcacggttgcgttggcggcggccgccgtggcattggtgccacgagccacgacggcggacgtggctggcctggcggccgccgtgcctaccaagaggacggcggcgacggcgaaggagtaaaaggagaagatggaagccgagaaagccattggcaaataataattgaaggcgtgtgcgcggtgacactgacacacgcagcgcgtggcttatataggatggtatttaggtggagagattagtactatggtcatgtttggaaaataggtttgggatatgatttcccacacctcaaaggataagtcttaatcttagctatccatcattctcaccatatttcatcctatcgcttcattcatttccgtttcctaattccacctctcctaacctattttccaaacaccctatagtactaaattagcgagaagattggatgtccttgagctttactgcagaggagtatatgcaaagaagttatcatgggttttaaaatttaatcatttcctcccaataaaactttgtcagtgatatgggcccggggttatcatgtttagagggaggaggctgccccccccccaaaatgccacatggccctcccccaaggggagtcaggcccgaggtggggtggcggccactccttcccaaatactagtcggaggaggccgccccccaatgccacgtggccctcccccaaggagagtcaggcccgaggtgggatggcggccactccctggccgagactagagggaaaaggctgccccaggcgccacgtggccctcccccgaggggggatcgagcccgaggtcgggcggcggcggccacctcccgtgactaggggtcgggctcccccgaccacctctctaggtcaccacgtacaggtgcccacctacccgcatttatggcgacccgagcggtcgcgccacgccggcgtgcagtgtactcaaccggtctgtgaccggtcgaataaccgatggaactggctagtgcacctgtgcgctgctcgtgtgttaggcggcgtgcagcctgacatgtcccatcaaataatgatggtgagaggttctcatcctcttatcccagccggagtcggtcctcccgctctggtcaaagctaggctcccgttccccgatgtaataggagcccagaagtcttcacccattaaatggtgaatgacatgggcgtccctcgtgtcaggcggcatggtgtggtaggccccacgaccgaggcgacgtggatgcggcttccaagttaaggaacaagacatgcatttaatgcaaagatggtaatacttctcgaggaagttagttgttgggcctatgtggtatccccttgaactataaaaggaggaccttgcccactgagaaaagggacgatgacgacgacgacgacactcagtaggcctgaactctaggagaagaagagcgagaatgctctccggagtttaggaacccttgtaacactcaaccataattccaaacacaggagtagggtattacgcttcttagcggagcgaacctgtataaatctcttttgtctcatcgtctttggggattgaacgccctcaagatcacacagcttcgctcaccaagccctcgaatctcacccgctgcccccggccgaactcacaaaggggggcctcacggttccctgatggaggagttcattctccgacatctggcgcgccaggtagggggcgcgttcgtgatttttgaggttctttcgagcgccggcgcgataagtgttgcgccgccaatgcgggggaaggcgcagcttcctcaggagtgccgcaccaccccaggcagggggccaggcccccctcatcttcaccggataaggctggcggccaggtctttatggcgagtcttcggaatgaccgatgacccccaaagtttcggcccagcctcaccgaaaggtaccacggtagcatcaacccctccgagtccctccagatccacacgacgatcatagaggcggcgtggggtgacgaccgggtcaaggcgagtttcttccccatggcccttcatggccaagcgcggggatcgctcatgaacctgccacctgcctcggtctactcctgagaggactcttgcagttgagctccgggtgtcgtcgaagcccgggaccccctgtgctggctcttccatagcggctagttttggtcccgccggctggctacggtgctcggcccggctcaactaatcgtcctttcaagcttcaagtattttcattttttcaattcatcagcttaatacagcttgaagtcttatatttattttcccccgttcttttctcatggccatatgacgctcgcgtgttgcgcatttgtttgctccctcggtggtaaaagcccaacctctctcccatctacatgaatgtttcctcgctaggtgtgggggctaagttttctagccctattctagccttaagttgagtgtcgggtgccgtcgaagcccgggaccccctgtgctggctcttccgtagcggctagctttggtcccaccggttggctacggtgcccggcctggctcaactgtggacggggatcgctggctctagagtttttcggctctcacacacgggcgaaagtagtcgtccgtgtagaaggaagagatattgaaaggaggccaccgaaaggaaagatcaaacagaatgtgtagcgtggggacacaggcttgtgggaacctaacctcgtttgctaagtggtcgcaggcttcccaaagtggttagggacccatggagggaggccctcttcaagctaaaggtttgaaaggtcgcgacatgcaagcaaggtttgtgtttgcttcattcatacaaacgattctttgctaaaagtatgggggctacgattcctagctctatcctagccctgcgtcgagctttgggcgccgtcgacgtctgggtccccctgtgctggctcttccgtagcggctggttttggccccgtcggctggctacagcgcccagcttggcttgatcgtgggtgaagattgttggctatggaaaatttagtcctcgcactcgcgcaaagatgatcatttgcatagaattattattgcttatgtttatctctcgcccatctcttcctcgcggtcccgcggtacccacgtgtcgcgcgctggcttgcctcccttggtaacaaaaagtttgtattcacctcatccattcaaacgattctttgctagaagtgtgggagctatgattcctagctctatcctagccctgcgtcgagctctggtcgccgtcgacgcctggggtcccctgtgctggctcttccatagcagctagttttggccccaccagctggctacggcgcccagcctggcttgatcgcgggtaaagattgttgactatggaaagttcagtccccacgctcacgcaaaaataatcgttttgaatagatgaagtataacacgaacagaggttaacaagaggcaggggcaagcaaggtacgcggcgtaaggtcacgggcccgagagagtctaacaacatttgctgagtatatacaggaaataagttcacgacctaaggtatgggctaaactcccgagcccgcagtgcctcggagaccgggaggaaagtgggaagttaaggcgacgtatgaacgtgactaaactcccaccgcccaactcccagaatgataggacagaagatcgggcccgcatgtcaactgactagcagattggtgtcaaccctgatcacctgggaaaggttttggccagggctaacgccgggggctactgtcggtgatatgagcccgggggtatcatgtttagagggaggaggctggggtggcggccactccttcccaaagactagtcggaggaggctgcccccaatgccatgtggccctcccccaaggggagtcaggcccgaggtggggtggcggccactccttcccaaagactagtcggaggaggccgccccccaatgccacatggccctcccccaaggggagtcaggcctgaggtggggtggcggccactccctggccaagactagagggagaaggctgccccaggcgccatgtggccctcccccgaggggggatcgagcccgaggtcgggcggcggcggccccttcccgtgactagggatcgggctcccccgaccccctctctaggtcaccacgtacaggtgcccacctactcgcatttatggtgacccgagcggtcgtgcggcgtgcagtgtactcaaccggtctgtgaccggtcgaataaccgatgggactggctagtgcgcctgtgcgctgcttttgtgtcaggcggcgtgcagcctgacatgtcccatcaaataatgatggtgagaagttctcaccctcttatcccagtgtcatgaccggcaatggtgacactgaaaaagttgtaatcaataaagctgtgagagctgccagaatccaccaaaagtaacaagactttactgtgaaccaatgctctcaaacgaatagcagtaggaaggtgagctcctgtcaactgcagaccttatcgctattctccgttacaaaaagacgagattgagaaacaggtgaaagaaatgattgatgctggtttaattacacctagtatgagtccctatgcatcacctgttttacttgtcaagaaaaaggatggtagttggcgtttttgtgtggattacagaagattaaatgctctcaccattaaaagtaagtttcctatgccggttgttgatgaattattggatgagctctcaggcactaaattcttctctaaactggacttgaaagctgggtatcatcaaattcgaatggtggaaactgatgaagccaagacagcctttaagacacatcatgggcaatttcagtttagggttatgccatttggtctcacgaatgcaccctccacctttcagtgccttatgaactcagtccttgcaccatttatcaggaagtttgtgttggtgtttatggatgatatcttagtttatagccctgaccttgatagtcatttgcatcatcttcagcaagtttttgttattttgaggcagcaccagttgtttgctaggaggtctaaatgctcttttgcttgcactcaactggaatacttaggacatatcatttctgacaaaggagttagtactgatcctgagaagacagcagcaatgctggcttggcctgtgcctacttctgttactgaattgaggggatttttgggactgacaggctattacagaaaatttgttcagggttatagtatcatagcacgaccattgacactcttgttgaagaagaaggcctttctttggactgatgctgctcagcttgcttttgatcagttgaagacagctatgagtaacactccaatgttagctttgcccaattttcagcttccttttactttggagactgatgcatgtgcttatggtcttggtgctgttttaagtcagcagggtcaccctattgcttattatagcaaaactttgggccctgttaatcagaaattgtccatttacgaaaaagagtttctagctattatgatggctgtggataagtggagatgttatctgcagagaggtccatttatcattaaaacatatcacaaaatcttgtgtcatttggatgatcaaatattggggactgaattacagcaaaaggcaatgactaaattgatgggtttgcaatattcttttcaatacaagagaggggttaataatattgttgctgatgctttatctagaatgccttcctcctctcaattttgtgctttttctgtggtccaaccgatctggattcaggagatgatcaattcttatacagtggatcctcaagctcagcagctactagctgagttggctgtgcattctcctaattctcaagggtattcattgacacaagggattattagattccagaataagatttggattggatccaatgcaggactgcatactaag

SEQ ID NO: 6222 - DNA, 758 bp, Oryza sativa
aaaaaatatctacattttaggatagaggaagtaatacattatcaacaactgcaaaattaacaccatacgaatgtgctttcgaatgcgaatacgatgatatcatatgcatgccactagatatatatatatatatatatatatatatatatatatatatatatatatatatatatatatatatatatatatagttagttagttagttagtttaattattataaaaatgatgcaaatgttgctttttttcctaatattataggcgccttagaatagagggaatagacactacttttattattaaaatgaccaaaacgtcgaaggagggattttatattagacaaattttgcgacagcacactgctattgtgtggttttagccgtaggacaccgcccgaatatacttttgggagaagacactccataaacgtggtaatttatcaatggacaccgcgccgattagaataataattcctggttgaagagtagacagaaatcacgtgaaagttctaaaatacccttgagtccacatgtcatatatttctaacatctctcttctctctatcccctcccacgcttccatagccgatgcctcaccgatgacgccatgcctcaccaaggacgggggagtcgagcagctcggtggggctgagccccagtgggatggcgaagtaggacgacggcgacactggtggcggcgagagcggcaggcttggtggctgtgcggacttgaacttgggcaccgaccaccagagccaccg

SEQ ID NO: 6223 - DNA, 14599 bp, Oryza sativa
gttcccctctagctgacgtatccagccaagggtgggcgtgacggagtttggatgggccctgtgacggcctatgcggcttccggattcacctaggcacgagagggggctgccctctgcatgttgaggagtgggggcgaaacctgaggtgtggtgcacttggttagaggtggttatgcgaagggtcctgtcacaatctctttccagggtaccatggtggtatgtcggcgcacagaaacgtgttgtggggctgtgtcttgtgggtacagtcgtacacctctgatcagagtaaaactatttgaatagccctacctgcggttattggcgatcaaccaaattcaccgtgattagtcacatgcttaataatttgacttaatggaactggtatagttcaggtgcttgatttgggactgtcgcaacatggtgtagcattggatagtgattatttaatattgattaattacttcaacagttttactgatttcaactactgtcttaaagtgcctgctttatgcaaataaacccctagctcccttgtatatctcatgcatcataccctctcgtccggtatgtcttgctaagtacaatgggtagtatttagtcttgctctgtctcccacccccaagagttggagtacgcgtcagatggaggttacttggaggagtaggtttcatccgtgccgtcaaggatgcctatggattggagccgtcatgctgcaagcgccaagttatctagtttagcttgtttttaatttccgctgcatatgtaagactttttatatatttgtaagacgtggatctgtatgttaacattgtcgtttgtgcaccctggccggtcctggacaggggtttaatgcatattctgcttggaatcctatttggaaatttcttagcgtgacaacaaaggatcccttgtggctcctggagctagtatcaataatgttttccttaactcaagaggcattttgatgaaatattagcctgggggaagaccaatataatgttatattttgcatgtcactaatgtatacgaaggttatcatccgtatgtattagggattattttgagcttgacaatgtaaagccatatctagcaaatgttgagacgagctcttatagtttgtcaagaccaatgctaagtaaaattttagtgcatatgcatatttgtcaccataatcagaaagtttgcaataagaaataacttatatggcgttcaaacttagtgggatggacatcgtatatttctatgcgctacttgtccatttcatagtatttttctcccattaaactactatggacatttttcatattaattagtaatattcaataagacaaagtggaccatggttgacttgatttatcagttggtaaatcaataagaaatatagaagactaagaggcaaactaagtaagatcttgttaatcttgccatttattggcaaagatgaagctttactaaggggagtgttgcaactccaaatttagtaataacaaagctcatattcctcatcaagggaaataaaattgtctctatatcttacgtatactactcctaaaattttcttgtgtaagtttttgcgagaaatagggatatgcttaatgtcctggtttgagagagtagatgagtaaagattaatggcattaattttgggttgaatcattatgagacatcgtcaaaattatggccttattatttggccacatttctaggggagaataaatgtctcgttaaggtagagacacttcacccgtagaaaatactaacatcgatcattacttagatgataattctctaagaaagtcctcctcatttatgactcatagctcattgaaaaattaaattaaatttgtgtgatcaaagttcattgaaaatcagaaattatgcttccattacataaataataaaatcagtggaaactcatcaagagctccaacaagaaatattattctacctaatttatgtctcctagctccattatgtggatgctaaaataattttgcatctcttactatgtgacttgcagaaataaatatacatacgatagccggatggttttgttgtggaaagacaagtcacatattgggtgcagacttaagaaatccatttgtggacttaatcaagcatcaacaatgctttaaattccactacgtcactagtgaactaagcttaaataagaatgaggtggaaaattatacctgtaatgatggaagcaagatgtcgttaaaactgtgtcattctagttgatgccgcatttacaggggagattggaacatctcatgatatcgagatattctttcctttagattttaatgacgttgtttagccttaagggaaaattcactaagatcagaaattagccaacaagtgattttttttgctatgtttacccataagcgatctttgatttactttaaaagatttaagatactaattgttggcggctgttaagtgccaattttataccgctaacatttgcataaagtctagataataaaacatcatagtgataggtctaaatctcacatatttcacaagtcgtatatttgtatgcaggtgataaacacataagttgggaggagatccagactaaaagtgaaggagaaatctatccatgcaagaatgggcttttaaattaccaaagaaacggcccaaaattgcaagaattggataaggcaggatgaggaggaggcctagaccaggtttggaggccatctggcccagccctggttcggccgaaccctggtgaacggcgttggatctaggttttggtgtggacgctctagatgctctcctaatgacggttgaggggcagttcagacaattcgcatcattccaaccgtcatacctatcctataaatagacttcactttcttcactttcacacacacttccaagcttgagctgaattataagaggctctattgtactatttgtatactagaattaggaagagagtagagtagaagaagtcgaaagaattccggagctgtcagtaatcctctcttatttgttttattctgtttattactctgatatcaatagaattatcttcctgagtaatttagatttatcttgtgagaattatctcttagttcctaaatagcatacgggattattgttcactataatcaactaaaatatagtgattgctttggtgagttataaacactaaagtagatattaattgcttagacgtagtgtttaggtaattgttatccagtaattgccgcgtatcccacagtacgtttgaggtaggtgtagaggtggtgacagcctcaagagcacttaagtcccccctgtccggatacgtagtagagcaacatctgggaacaccggtgtcgagggaagatcctcaatagcggggagtcatgagaccccccatttgtgagttcggccggggcggaggctcgtctctcggaaatcactcgctcctccataagattaccggtaagcttgcacgcagtcggattatacaggttcgggccgctatggagcataacaccctactcctgtgtttgggattatggatgagttttacaaaggtttcttcactccagagagcgcacttgcttcctcacttctggagttcaggttttctgggcgtcgtccctttatctcagtgggtagggtcctccttttatagctcaaggggataccacatgtgccgcctctacctaccctccataggagggggatcccactccactttgggcttccaaccgtaccttctcccggaagctaagcaacaaccggttctcgagtggaacccggcgccgccccccgcctgacacgggggacagccctgtcattccctcataaatgaacgatgacttgcgacagcccttccttgagtgacactcggatgtgacgggtcatacccacccccactccgccgggtacaagggcgacatgaggacatggttgccctatccatcggatgtgacggtgacaggccggtcacagaccgatcacatccgttggacagaggttagctaggcgcgccgcacgtctgcccttaccgcattaaatgcggtgagggacagttggggcatcgcacatttatggctgttcagcctgtgctcccctctcgctctctccctccgccgcgtggcagccgggtgagggcctcggggcgaagccgcgggagagcccgagggggtgacgtcatgccccgaggccccccccccccccccgcgccgggccggatccacgactcgcgtgacgcttgagtagggcagcctgtagagtcacgtggccggagggaaagtaattcccctctacttcacatacccccgggcccatatcttcgacagtagcccccggcgctatatcagatatcgatttcctgggatcattctgacatggcgcctcacgactcctcgagctggggttgtgggcccggcagcgaacccaaaaggatatcaccgcgtggctaggttggcgtgctaaccacaacagcggtttgaccgcctctgacagcgctcatgatgaagatgcttgaggcgcgataaccgggggggtcagtcaaaccacgccttgattctcttgctcgctactccagcggcggtagcggtgacggtttgttcaacttgcgctcatggccgttgcgcactccacctcgagtgtgccactgacaggcgcactaaaggcgggagcggatacaacgagcgacgtgatgagcgggcgcgggatgcgaagagacaaatacgggcgcgaggatcgtgggggcagttatgggggcgtgaaacgaggaggcgagcgcgaatgaggcgaggataaaagggggcggaggcggagactctgccttcttactttcgccaaccgcccactcgtcctttcgcttctcgaaccctaacattctcgccacttcacactgtctcgtgctccacgctctccgccacttctccgccggttgccatggcccaagacaccggcgacgcagtgctcccttcctcccgcatcacggcagacaggcaccttagcctacctcgcaagatcatgccgaacggtgccgtcgtgcgggcgggagagtcatggccgcggccgtgatatccggagcgatccatgcacctcttgtccttcaccatggcgggcttgattccgccgttctccagattcttccatgaggttctggatttctacgaaattcacgccttgcatctcgcacctaatgccgtgatgacgctggccatcttcgcgcatttgtgcgagatgttcattggggtgcgaccgacgatgcggttgttccaggccttcttcatcccgcagctgctgcaaggcgcggtggtggggggatgctacttccagccccgaccaggcacagcgggtcagtacatcgagagccatctccgcaagaaatgggaggactggaagaaggactggttctacaccgcgttgccggaccatccgcgacttcgagttcccgctggccctcccgaaaggtctaccgcatggctagcgacgtcggagctaggcgaggaatacgacgcggtgtgggatcgcctcaggggcctgcggagcctgggcctcacgggggcgatgatctttggtgattacttccgccgccgcatcgcacctctccaggaacgatcccgtggagcgtgggaatacactggtcccaacgaccccatgcggacgcatgtgggcgatcgctgggactggggtgaggaggacacgaagagggtgattcggcgggtgctgggcctagactccgccgagccaacactaatcccagatgggattcttcccctctgctgcaaccgcgaccgggagagcatcctagccgtgatgtcaaccgtcggcgctggcaggagccggtccagctgaggcggcgccagcggtagcgccgtcggcacgggtggcggtggtgcgaccgcgggcgggagccgggccggcggtctaggcggcggtggctcaagggcgcccggatcgagccgcggacccggagacgattccgctggcgaccctattcccggccgccctctcccccgcgtggaggggatgccgagcgcgcaacggaccgttcgccagcgggccacaagcgacctgccgagcccgaggctggacggaaaaagaagcgactccggaagatgcgcgcgagcatttcagcttctacgcgatcctcaggatgagtattgccttcgagatacgcccggatgtcggtcatccacacgaactgacgaggggggttggggttgaccctctcgggccccgaggggcgcgggttgcctagagtcgggtcggagggcgtgtcattggcgtccctcaaagggctcagtcacgccgatggttgtgcgagcctttcctcgaaggtccctgggggagtggggctcgtgccgacgcaacacgcgacaactcgtcagcaattgtgttgtcgcgtcggggcacgtgccggagttaaagtccgtcgaagtggcgttccatgcgccgtacctcgcggacgtacgcttccatttgcgggtcggtgcactgatactctttggatacttgatttacgaccagctgggagtcacccaagaccaggagacggcatgtcacgaccggaaataacccaacgggcgttccttacgtgcgtgcattattccttgtcccaggaggcaaggtacaccaaaagttgatacaattcagagtttaacaagcggaagcgtaattaattaatttattacatgggcggcgaagtcctagcacacaagaagacaaacgaaaaaaagcggaagactagggcgacgaccacaggaacttgacggcaggcacgagctagacaccaaagccttcatcatccaggggctcctcttctgggtttgggaaaaattgagcaagactgagtacaaccaccgtactcaacaagacacacccacaagtgcagaataaatgcaagggagtacaagggagccataatatagggggttagggtttgcagtaaacagcattaaaagtcactcagttgctcaaagctactttgtaaacacggtcctagagctatacaatattattaaccaaggccgtgaacccacacgaacatgtcttaacccaaggcctacgatgattcagaccgaactggcaacccgaccctgggtcccagctagtcccaagccaacccaggccaaccattccacattttagctgttaggcaggttttaagaattaaaacactaacttgggtacattgctcggcttgcccataaccgagggcgcggctattcgaataggttatactctgatcagaggtgtacatctttacacacaagacacatcttcctcacgtgtaaccacgtgccacataccaccacggtatacggacggaagacatgacatagtttccaacccatcctagccataaacaagagtaccgacccaaccccacctacggccggaacccccgggacaggtaggcaggactgagcccctagcagcaggacaccggccctatgccatgacatctcgactaccgggccgcagctcgagtagccttcatttgccctagagatgtccatcgacccccgacttcgtccatctccatccgtgtacttttgtttataaccagactgagccacaaactaagccttacccactagacatgtggaagtacggtagtgctttgcaacagaggcccgaagaccggtccttatatggccgaggtgctactatcaaaaccatgcaccccgagcccagcctaaaaccattttgagggttttgaatagagggggaggtgtgaatccaattacacaataatccaaccattccatagtgttcaggtgatatgaatatttccaaagtctagagttgtaaaaccacctaatgttgcctaattaaccagtgaagcatctacctaaattcatactagtggtaccatgagtagagtgtccactagttggggttttgtttaatctagggtgaacaaggtaataatatcaataacaataataaggtcataacaaaggtaaataggcatggctagataaaacagtgataacgcgggatatttaaataaagcgataatgcaataatttaaatcaaaataattttataaactgggattcaatatgttcaaggatgatgtgacttgccttgctcactttcccaaacgtcggcttcaacctccacgaagagcggatcttccgaagctgcagcgtctacacgaccaacggaaaagaaaaggcttttactctaataaactccatataacaagcaggaacaaagcacaaaaatgggttcttgacttcttaaggaaaaaaaagacttgaacggtccaattccgagttcaaatggccaagttatggccatttgaagtttatatgctttttaaatgaatatttgcgaatttcttcatttaaactttaatttaaaaagggtttattgcgtcagccgaggggacgggcgcgcggaccgggtccacgggagtggggcccacgcggcagcctcacagtccatggtggaccgggtgcacccgggctcacaccggccggcgccgtgggccccacacgtcagccgcacccgagggcgcgggcggctgacagccgggccccacgcggcagccactcggcgcgcccgagggcggccacgccggggcggtcggcgagaggcggcgcggcggagcggcggccaagagaggggagggaagggggaaaggaggcgacggtccacggctcaccccggggcgacggcggcgactgaggaggcggctggagcggagggaggcgatggcgcggctcgggtcgacggggacggcggcactccggcggtcggcgaccgaaacggagaggcggacgaggtcggcgaggatgcggcgaagccgaaggaggcggcgccgaggtgggaggcggtccggggcgacgacggcggcagaccggagctcggcggcgacggcgaagagagagagcgacggcgcgagctcgattccggcggggagacggtgcggcaaggggcggaaacgggcgagggaggcgcggggagggtttaaataaggttggaagggggagagagcggccggaggggaaggaaaccggcgcaggaggtccggccgccatcaatggcgccggcgagatttgcgggggcaaatccgcccgtttgaacgcgagagagagagagggaaaaatggggggaaagggaaagggaatcacggggagtatttccccccactttattgcacgcggggatggcgggagacggcgggattcacggcggcggcggcgctagggcgcgggggaggcggcgggagcggctggaggaaggggatgacgggtgggccccacccgtcagcgaggatggcgggcgggcctgcccgacagcggcgcgcgcgcggggagaggccgagtgggccgcggggagaggagagagagagaggggggaggagagatgggccgggccggcccaagggagggaagggggacttttagggttttttttataaaatcattttaactttgtttatttcttaataattattatttgtgctctgaaaattccactaaaatttatttatgcattttaggcttttaggaaatttacaaaaatcctctaagccttatttggcttttaactttgcacattttaattgttggaggctttcacacggattttaattattctaggcatcatttaagggatatattttagagtcgttttgggacgtgacacggcaaatgcccattccggctgccgccctcaatcccgcgaggagcccttcatattatgccatgttgttcatggctcggaagtcgagacgaacgatgtatttgagaacatccccgtttggcgaggtcagcgtgactccggcacctgcaccttgaaggttgagggagccatcaaaatgcataacccagtgcccgccgcgaatgtcggcgtttggatcctcttcttctccgggggggaaggggacattggacgaaacaggttcgtccaccggggtccattccgcgatgaagtcagccaggatttgtttcttgatcgcatgccgcggttcaaagtgcagatcgaactcagccagctcgatggcccattttaccacccgtccagtaccctcccggttgtgcaaaatttggccaagagggtatgacgtcactacggaaacccgatgcgcttggaagtaatgacgcaacttccttgaagccatcaagacggcataaagcattttctgggcctgcagataccgggttttcgcatctcaaagtgcctcgctgacaaagtagacgggccgctgcacctttcagcggggccggttcatgttgtcaggggctgatgactcggagcgcgcctgttcggaggtcccggggggatcccggactgcctcgggatcataaggctcggggccacctgccaaagcctccgctcctcccttgggggcctcggggttctcccgggggctggaagctttgggcgctaggccttcgggggacgaggggccatcgcaagccgaaggggcctcccgttcgccttcctcacgctcaactacaagggcggcactcaccacatggggggtcgcggccaagtagagtagcaatggttcctccggtcccggagccaccaagatgggggggaagtgaggtaagctttcagttgattgagagcttgctcagcttcctccgtccatacaaatggcccggagtgcttgaggagcttgaataggggcagcgccctctcacccagcctcgatataaatcgactcagggcggccatgcatccagtgatgcactgtacatccctaagcttgctgggggggcgcatcctctctatcgcgcgtattttctcaggatttgcttctatgcctcgggaagagattagaaaaccgagaagtttgcccgtcggcacgccgaacacacacttatcggggttcagctttacgcgcatggacctaagactatcgaaagtttcggccaggtcctgtagcaacgtgtcctggtggtgcgtctttaccaccagatcatcgacatatgcctctacattgcaccctatctgattacttaaggtaatacgagtcatgcactgaaaagtagggcctgcattcttcaatccaaaaggcatagttgtataacaaaaggtgcccacaggagtaataaaggtggttttttcctcatcttccctagccatacgaatctgatggtaccccgagtatgcatctagaaaacacaaaaggtcgcaccccgcagtggagtcgactatttgatctatgcatggtagagggaagggatctttagggcatgcctagttgaggtcggtgtagtcgatgcacatccgtagcttgccattggccttcgggacgaccaccgggtttgccagccactccggatggatcccctcgcgaatgaaatcagcctccaggagccgtgccacttcctccctgatgaaggcctgccgctccgaggtttgacgccgcactttctgccggacaggtcgcgcatccggccgcacgacaaggtggtgctcaatcacctccctggggaccccgggcatatctgacggcttccatgcgaaaatgtcagaattcgcccgcaggaaggagacgagcgcgccttcctatttggcgtctaaggttccgccaatcttggcggtcttggacggatcgtcgccaagggggatttccttgacgggcaccttgtcagctgaggtgaggcgcttcttggaagcgcgggacgcaaaggcttctggggcctgcggctccgtggccaccaccaggttgtctgcgcgctgctccgcgcatgcgagggcgaccttgacatcaccaaagatggtgatgggactagcaggacccggcatcttcatctggaggtaggcgtagtgggtggcgaccatgaacttcaccaacgcgggtctgcctagaaccgcgttgtagggcagattgaggtccgccacatcgaagtcgatccgcttggtgcggaagttggtggagtcaccgaaggtcaccggaagctctacgtggccaagcggccacgtgtgccctggagtaacgccaatgattgggagcgacggctggagcttcatccccggggccttgagcgcgtcaaaggcagccggggagatgatgctcagactggcccccccatccacctgcacactcttcatcttgacgttgtggatggtcggggagaccaccagggccaacttcccccccccccccccccgagcgagcaccgtcggatggtcgctctggtcgaacgtgagcttcacctccgaccagcgcgccttccggaccgcctcatgcgtgggaacaacggccagaagctctcgcctcatggccttgaagcttcggcgagaggtgtgagcgcaagccccccccccccccccggtcgagcgtggcgacggtcccctgaggtatctggaaatccagatcctcaccatctccgccatcatcggcgggggccttgtccttggcctcctctcgccggtcacctgttgaggtcgcgggggctttgccctcccgtcgaccctgccgcttctcctcatcagcctttcggaaccgctcggccaaattcttgaccgagcagcagtcgacgagactgtggcggtaagtgttgtgtaccgagcaccacttgtccgccgaccggccctcgccggagggaacggtggggctcggcttatcgccggtggcctttcctttccgcggggcccgcgtgggctcgtctgctgcaaggacatggccctcgtcatcggagcgggctggtttccttttgcctctcctatctcgccgcttagagtggggggcagattcgggagtagccgcagctgccgcaccggtgccgggagagttccaggcccacgcctcctccttccgggccaccttgtccgccagctcgaagagctcgatagtagtcttgggctccttggaggcgatcttctccagcatgcgattatgccgcacgccgttccggaatgcatatacaaccgcgtgggcttggatgcacggaatggtgttgcggacctgacagaagcgctgtatgtatgagcggagggactcatcatcctcccgccgtacagcgtgtaggtccgcctcttcccccgggcagggatatgtgccctggaagttcgtaatgaactgctggcacagatcctcccaggagtgaatggagccggggggctgggtcatcaaccagcgacgcgcctgacccttgagtgccatgggaatgtaattcgccatgacccggtcgtcaccccctgccgccacgataaccgtggtgtagatctggaggaactcggagggattgatgctaccatcatacttctccgtaaggttggggcgaaacttcgggggccaccggacattccggagactcgccacaaaggccctacaacccgtcctcccaggggtgagtgtgggaggagggccgcctcgtgaagaagagcatggcgctccagatgaggaggcgccttcccccatacgggcagctcggcgctcgtctcggcgtcgctcgatgttgattcgagcgtcctgcgtcccgtagaggccgtcatgacgcctccggcttcccgaggcccccgacgatgttggaaccgtggaccgtctcgagatcatggccgatcgacgagctcttctcctcgccgacgaggagagggtgaccgaggtacgcgatgtaccagcggcagtggatcgaccacccgtggccaactgtcgctgggcagtagtgaccaagttggccacgtcgtccaaccagcgctgaataggagtctccggccccgggtttaccgggggatgccgcagaagggtgcctactacctgaagcgcgccttggggcgaaccgccgtctccatagtcaagacggcggcgtgccccgacgcgtcgcggcctccctccgccagggggcggagagagagccgaatcacccgaacgagtgggatcctccctccgcgaaggttcgcgacagggaggagttgcagaaccatggcgacggtgacgaggacctcggctctcgccagaaaattaggatggaagaaagcgacttcctctcggaatgcgcaaccgcccctacctggcgcgccagctgtcgagggaagatcctcaatagcggggagtcgtgagaccccccatttgtgagttcggccgggggcggaggctcgtctctcggaaatcactcgctcgtccctaagattaccggcaagcttgcacgcagtcggattatacaggttcgggccgctatggagcgtaacaccctactcctgtgtttgggattatggatgagttttacaaaggtttcttcactccagagagcgcacttgcttcctcacttctggaattcaggttttctgggcgtcgtccctttatctcagtgggcagggtcctccttttatagctcaaggggataccacatgtactgcctctacctaccctccataggagggggatcccactccactttgggcttccaaccgtgctttctcccggaagctaagcaacaaccggttctcgagtgcaacccggcgccgccccccgcctgacacgggggacagccctgtcattccctcataaatgaacgatgacttgcgacagcccttcctcgagtgacgctcggatgtgacgggtcatacccacccccactccgccgggtacaagggcgacatgaggacatggttgccctatccatcggatgtgacggtgacaggccggtcacagacc

SEQ ID NO: 6224 - DNA, 29428 bp, Oryza sativa
gattttccaattgaaatcatttaatatttacaaatgttgtttagatttgtcatatattaaaattcaatttcaaactatttggaaaaaagttatatagaagaatgactaaaataaaagttgtagatcttgatgagaggatcaactttgttgttgaccatatttccatttgaaatcatttagtatttacaaatgttgtttaaatttgtcatatattcaaattcaatttcaaactgtcaggaaaaaagttatatagaaaaatgtccaaaataaaagttgtagatcttgaaaggctctacaagtttgttgttgaccatatttacatttgaaatcatttactattggaaatgtattatgactaataaaatgaattattacacaacagctatattttttgcactcacaaatacaaatacttgaaatggaaaaatagtcatcagtgatgggcgtcagttatagcccgatagagattaatctatctcaatcgggcattaccctatggccggtcagagatgagtcatcggtgacaggtctgattgtcatctcaatcgggcattagtatggagcccgtcaccgatgagtcatctgtgacgggccctacggcaatacccgatagagatagattaatctctatcgggcttaaactaaggcccgtcaccgatgactatttttccatttttccatttcaagtatttgtatttgtgagtgcaaaatatatagctgctgtgtaataattcattttattagtcgtaatatattttcggatagtaaatgatttcaaatgtaaatatggtcaacaaaaaacttgtagagcctttcaagatctacaacttttattttggttatttttctatataactttttcccaacagtttgaaattgaatttgaatatatgaaaaatttaaacaacatttgtaaatactaaatgatttcaaatggaaaagccataaatagcaaagttgtagagcctttcaagatctacaacttttattttggtcacttttatgtataactatattcccaatagtttgaaattcaatttgaatgtttgacatatttaaacaacatttgtaataaaacaaaattagccatataaatgactacacatattaagtctttgtaataaaacaaaatacttcattcattacaatagatacgtacaaatgcatcggtcacaaggttatgccttccgtatgatctgaatgagcatatgccacacgctcttcgggatcatcgtcaaggtcaatatgaggtcttacatgaagattctggttgtattctttttcatcgacgaggttgtcaactcatacaattcggcgcttgccatacctcacgatgtgtatcttcttgtttgaagggtcttttatgtagaatatctgctcgaactgtttcgcatgtacaaatggttcatcggcgtatcccacccttgatagatctactaaagtgaaaccttccttgtcggctttgacaccagtgcgtagattcacccaatgacagcggaacaaaggaaccttgaacttgatgtagtttagctcccagatctcctcaatgcggctgtagtatgtgtttgacccaacttgatcctggaatgcatctatacggacgccgttgttttgcactgtgcttttgtcatcttgtttgacggtgtaaaatgtgtatccatttatatcgtatccttgccatgtgtctacagtccaagacggtcccatccccaacaactgtactgtttcatttgggacatccgtggacattgtcacacgattcttgaaccattcgttgaaccgagaattatgttctctgttaatccatgtatcagatcgccccaagttctcatcttagattttcactaagtgctcctcaaagtatgggccaacttctaccatatgttggagcacagtgtaatgagcctgcgcgtaggacgcttgatcgggcctaattcttttccttccgattgtgccaacacctgacaaccttccttcgtgacgagatgctggaactccgataggatcggcatcggacatgaaattgacgcagaactcaatagccttctcggtcgtgtaaccttcaatgatgctcccctcgggtttagctctgctacgaacgtaggacttcagaactcccatgtacctttcaagtggccacatttcccttagaaaagctgggccacatagttttgtttgcttcaccagatgaacagggagatgaaccatgatatcaaagaaagacagtgggaaaaacatctccaggtgacagagggtattcacaatatcggtctgcaacccatcaagatcttctggatctataaccttctgtccgattgcattgaagatggcgcacatgcgttggatcgtgtgacgcactttcggtggtagaatgcctctgatagcaactggcaagatttgtgtgattagcacgtggcaatcgtgagacttcattccaaccagttttagctcgtccaatttaacatacttggttatcctcgctgaatagcccgatggaactttaatatctttcaagcatgataacattgcgattttctcatccttcgacaatgtgtggcaggctagagggaggtacactctttttgtctctacatctcgtatgggctggagttcactgcgaatattcatgtcctgtagatcaaggcgcgcgtttaacccgtccattgtcttcccgtgaatattcaacatcaggccaaccaaactctcacacacattcttttctacatgcatgagatcaatgcaatgacggacatcaaaatctttccagtaaggtagccgccaaaatatggattttttcttccacatacccttctcctttgtcttgctacgttttcttttcttcccaaactcattacttatgtccttgaccatattgtggacctcatctccggacaaatcctttggagcaggttgaagttatctcttaccgttaagaaaattcttctttcttctaaatgcgcgacgtagcgggagccacctccgatgacccatgtataccatctttcgtgatttcttcagccaccggcttcgtgtatgttccttgcaatcggagcatgccttctttccttttatagtttgtccggaaagattaccgagtgcagggtagtcattaatggtgcagaacaatagaactcttagcttgaagttctcctgaccatatgcatcccaagtttccacaccttttttccaaagaatctcaagatcatcgataacaggttccaggaatacatcgatatcattgccgggttgcctcggaccttggattaacaagcacaacataatatatttccgtttaaagcataaccatggcgggaggttatagttcgcagtaagaaccggccaagtgttgtgagtactactcatgtcactgaaaggattcatgccatccgtacacagacatatccttatgtttctagggtcggcagcaaattctttgtatttttgatcgatattcctccattcaatcgaatccgctgggtgtttaagcataccgtcattccttctctccgtggcgtgccaacgtactaacttcgcttcgtttgggttggcgaagattctcttgaaacgatcaattataggtagataccacacaatctttgccggaccacccctctttgacttctttccttcgtcaacacttttctttcgcttgtatcgagaagccttgcagacaggacaagcatccaagtccgcatattgcttgtggtacaatatgcagttgtttggacaagcgtgaattctacagacctctatataaccccagtggacacagaacctgctttgcttcgtatgtcgtctcgggcaatgtgttctcagtaggaagcatagccttccaaattcctaaaagatctatgaaactcttgtctgtccatctactacttgccttcaacttcattaggtccaaggtaactgacaacttagtgtgctttgctttgcatccagcgtacagaggcgtctcagaatcactgaccaacctgctgaacttcatggaatctctctcattctgggctgggtcctcaacgtcacgtaacatgtcttgcagcagatcgtgatccacatcaaccatttcaccgcccaatggagaaggtataaacatgtcatgctcatcttcatcttcctgattatgtgcaccacttctgtctgctgctgctccacttcctgattcttactctccatgcttcacccaacatgtatagcccttcatgaatcctcgttttatcagatgatcgtgaacatcctctgcgctatcaaacatattctcattcttgcaatctgcacatggagaacacatgtaattgctgtttcttcttttcctatcctcctccgcggcgttcataaaatttattacgccatttctgtattccagaaaatgacgtttcatatttttcgcatacatccaacttcgattaattgctacaaaataaaaaaaacaaattagaggtacatcttataagatcagtattgctaaagtaagacgtgatgaaattgctcaattaatgattaatattactcacttgattgctccattttaatcacttttgggaattttctgttttccttgcaaaaaagacaaagaaccaccccctataccctcccaccaaaatagtgaacaatgggatatagttacactaggttgtggggggtatttatactatgcaacaaatatctgtaacggccctaaaacaatcaaccatgacgggcatacaagtaatctctaccgggccttaattaaagcccataaaaaaagagtgtcatctgtgacgggcattaaacttatctcaatcaggcctctagttggagcccgtcacagatgaccctcatctgtgacgggcttcttttagggcccgattgagatatggcacccttatctcaatcgggcctcaactatggcccgtcacagataagtgtcatctgtgacgggctctagttttatgccgatctaccatggctatgcgaccatatctcaattgggcgaaactttgacccgattgagattacttccttgtgacggcccacaaattctagtcttgctaggggccgtcacagatggaaggatcggtactagtgtctctctctaaaatccatccaaattcatttgttgttttccttagagccatccaaacacattattttttgaattcgcgtgtttagatttgcatgggattcgtacctacctttcgtccaataaaaaatgaatgtaggactagatgtgacatatcctagtacaatgaatccggacagaggtatgtccaaatttgttgcactaggatgtgtcccattaagtactaggttggttttttatgggacgaagggagtatatgatatcctaatccaacgtttttcctgtttccatatttctaaaatcctgtgttccaaaggtgtccttaacttagcaactgcacaaaagtcgaattccaaatttagtcttgtttgggaaaacagatgaagaaaaacattggaaaaaaatctatttaataggaaagtatggcaactcatgggctgagcctcttcttatttttcatttgagaattccaatgcaactactctatttgtctttcttctctcgttcaaaaatctatccgaatttgtttgttatttttccatgagcaatccaaacacatcatctttcgaattcccatgttggattcgtacttacgtgacagtctaatgatgtttttttttcactattcctatatttctaaaatctgtgttctaaagaagccatacaactcaatattagccatcagtttcattggagaacttctattaggcctcctttgaaacaaaggaaaaatgtaggaattccaaagaatttatactctacaggatataatcctatgaaatcttttgaaacaaaggattgattcttaccaattcctttgaaattcatatggaatggactattgtaaagtaatttttgaggaaaataagcatgaggtcttacctcatgttttgttcttcttgtgtgttgaaatcttacgtttttttttcctgtcactatcaaatagtagttttaaaactttcatctgttttcgaatcccttaggtatccaataaatatgatattctatttctacttttttcctattcctgtgtcagtgaatatgatattctatttttatgatttttttttctattatcatgttttgacaattctgcatttcaaagggcacttagccttcacctcgtttctattttgctttgaaccacaagaaagtggaaattttggttgagcaacttgctttcctccattccgaagtccaaacacctccatatgaggagtgaaaaataaaatcttttatagatcgttgcagtaactatgtcccaattaatgtctcgtgtagccagccgtgaaaacttttgtcaccaaagtaaagtggcaatatttatctttgcaaatgattatacatctgtaggtaacatatatgtttaccaagtaaaaaaaacataaatattagggaagtgcctaatatcaaataaataaaaggggtgaggctttgaatctaggccgactaggccatcatattgtggagctcctaagcgtttctcatatggtcgctaaggaaaattttgataatttgacacttttttcgttgcccaattgttttaattgatatttgtgaggatgacatgtgaaaccatctaagtaaatgaaagtgggtcatgatgtcgaataatcgaaacacatttaaaagagtgttaaactatcaaatctcttgccaaccatgcttaaccaattatagacacacccaaatccctaattacctatgcaattgattaccactcgtataaacatatatctaccgtgcttgtctcggttgagtagaaaaagaaatatatatctacagtgcagtgctatgtacagttcctcaattcaatgtactatcgaatccaagtcttcaagcgctcgcggcgatccggcgcctccgccgaccatggtcgagacagcagaaagtttcaacccaaacaagagacggcgcggcgcagggctcgccagggtggtggccgttcgcccgtggtcttgcccatgcgtcggcgagcgtgaagcagtcggtcggagtcgggagagccttgccgaagaggggatcgcggatcacggggttctccgggcgctcaggaggagggccagtgaacagaggagcattcttcttggacattggttcgaccatctgcagaaagtccaaatgcttcatgggtcagctccgtttatcagcattgagattcgttaatcagacaaaatcatatcaatattgtagagatcctgccacaatattcatctatagataaaaagggaaatttaaaaagtcatttgaattttgaaaattacaccccataaatcattttgttgtaaatataaatgcgcaccctctagccagttcgattgcaaaaatcatctcaatacgcgcgtgcttaactgaatcaatatatttatcaatgtaatatttaacaaaactaaataccttaggagtatagtcttaacacttttctttgagatttcacaaataaaaatgctgatgagaatttaaacattatcgcactgagattcgcgttaattagaattcaatgaaacatgaagaataaatctaatgtaagcacttggataagattgacttagctatcttagtggtcatgcacatgtatattgggatgattttttgcataaaatgaggggatgtgtatttgcaacaatatactccctgcatctatttttgatagttatatttctaaatctgaaaaatttatttttgttaggcatatttcaattcaacaacatatactcttaatgactttctcggatttaatgcatggctctctattctttcacacaagattgactacatgggcatcgagaaaggtaaatattaatgaatcggttgtttacgaggaatgactagcagtatgtttaaatgaatgataagtagaattacttatctttgatctgtgtaccaagatgaaatatgagtatcaaaaggactcatagggtgaagcaatttcagtacttccgagacaaaagatcatgaatgtgcaggcaacaacaaataggtccccaactaaacattatacccatgactcaaatatattggttgtagctctgttgagtcaaggccgggatatagattccattatctaaaaaaaataactcaaatatatactaacgtgttttggaaaagcctatacagcaccaaagaggagctagcgttaattagttttagatttgacaaaacctatcgtacgttccaaaattttattctgaagataaatcgtacgtttcatcatagtgctgcagttcctcctgtcccaagagttaatggccaaatgtaccgatttctgaagccatattatgtactgtgcacgcgacgaatgcatgaaaacagagaacagaagaatgaatagtagcaaatgcgtagcagaactgcagtatggcgaggcgaatccagaaggatcagaaactggaacagcggcagcacgtacctcgtgtaccaggtcgccctgttcagcgtcagataccacgcccccatccccgcgagagacggccaaggacggcggctggtggggtgtgggccggagtagcagcaccggcggcggctgggacgacgatccttctgcttccatcgaaaagcttctcgcaatgcaacgcgaactgcagcgtgcgtcgtcgccggccgggtcggtttgcggtggccggcggtgatggcgtgtagggaggaggagtactcgcatatggcgcggggtgggggaattctggaaacccgcggtgaatttatggttatgacgagagagatagaggcaagtaacggttggtttggaaagtcgaaaccgaggggtagggaatccgccattgaaggagtctccacgtcggtgtgtacatggccagttgtccgtccacgcccgagattccctctgcctcttcgactgcgaggatgtgtacggcgtcgtccgtgtgttgcgctgcggagggaatcagatcgggggcttcattagattgcgctctaattatagcagtggagcatgcgggaagatgccccctgccgcagaaaatctgcatgcgggtaggtcaacacgttggatgcttggagtccaaataattactcggtatgtctcaaaatataagtattttttggctgtgaatctgaacaactgtgtattcaaatttataactaaaagttattatattttagaatagaagtagtaattagcaactatttgcacgctcctccccacgcagcgcgcggcggatcgagccatgtgactcgcgcggagagggccgtcttcggaacggtgcgtgtgcctccgtttttttcctgtttatttttctggtttcttttctttttttatgtacgtttgtacacgtacttatacataaaaatatatacacatctcttctctatctctactattactagccatctaatttggtaaaaaaaatatttgtttttagagaaataatctgctatatatttgtggaatatacatgatgtttagtttggatgatttgtagcatgggaggaaatgaatggacgaacaatgcatgtgcataaaaaatagattatttatttatatctaatatatggattgacaagatcatcttgtgatatatttgccaaaaccttttagtacctgatgtgacaacaattttttgggtgagcctgtatataaataatagaaatttaatacaaattattcctattttttaattttttgttgaatacaaaaaaattaaacaataaaaataaaaaatgaaagattatatttagagttcatatagaaatgaaatttagaaataatataaattataaattatattggatgaagtctagaatattctccaaaagaggctagagtgcatataggaatacaatttagaaaaagaattgaaatttgaaataaaaaataatatttttttgaaagaaaaataaaaatggatattgaaaggagagtttacagtccatataaaaatacaattaaataataaaaataaatccatatcaagagatacatttaacaaaatttctcactacttcaatttagatagaaataaattaataaacagtcataaacaatttaaatgatattaatgctatttgtgaaaattaaaaaaaacttaaaatcaataagagagaaaaaactgatttaagcccgacccaatagagcggccttatgtgcttcacacatgcggtcggcccatgggatggcccaatagcgcagcagcctaaaacgtcgctcggcccgacgtgggagaagcatggactgtccgatctgatggacagtctcgattggtcctgacctagataaatacccgcaaccctaaccctaaccttaaaatatctctctcgataccctaacgcgctctctctccctttctctcttgtaaagtgacggtggcggcagcgactattccaacgggtggtgacggcagcggccttccccaccgagcagcggcgacgacgctcttttgccccgcaagcaggaagtggtgccctaccctcttgcaagtggcggcggtggtgacaccgctccctctccccaccactggctccttctctcctcatcgggcaatggccgccgccccgctcctcgccagatccggcgggtcgacggctctccaacagcacggcggctcgggatctagctccttcctctccttctcagcatccagcggaacgacgggttggtagctcctcggcggcgcgattgcacagcggatcccccgagttcgcgacctccactacagcgaggtggcgaggagcagcacacgacggcctcatctcatgttaatattttgaatgttctttgatttgtattgtgatgatttgagcatcattataggtgcccctttttttataaaaaatagcacctataaaaccgacacctataaaatcgagccgagctagccagggagatatttttttctcccgtggggcccacacccacaccggcaggaggggataaggccgtgctccattcctctctcggctcctcccctcatttctcccccactctctctctcccccacttctccctctctctctctcctctgtgcggcggtggcgggaggagcggcggtggcgacggacgacatggaggtggttgcggcccggctggggcgggaggggcggcggcccggatggcgtgggggcaaccggccggacctcgccttcgctagatctggtggtgtggaggtggctgtggcccggcgggggtaggaggggcggcggcccggacggcgtgggggcggcctggtggacctctgctccgccagatctggcggtgtggaggcggttgcggcccggcgggggcgggaggggcggcagctaggacggcgtggaggcggccggccggacctcgcctccaccagatccagctgtcgacgggggatacccgtagaccggatatagagggtattgtggtacgttggaacgaggatctacgtaatacgacatcaagcaaacaaaagataaggattatactggttcagaccccttggtaagtaatagccttaatctagttggtatgggattatatgatggaaaccacagattacaaagggaataatggaacttggcgataacgacgagatcgtagtcgagttggttcgactagatcacccggcgacttggctcctgtaggctccggcttcgtaggctgtggtggatgtgttggcggtgagattcgatgccctaggtcctgcccgggggatcccttttataccacgggtcagttgatctccaagtaggactcggagatattagacccctcacgatatggtaacgacccagtcttgtccaagtaggactccttccatctgtggactccgcttctgtcagatgatagatttccttaacgtatacaggaagtatctgtatatgcgtgggtataccgtatcagcatacaacgtatatatatccaaggatagagggtatacctgttgatgaaaaacatgaggcatgggagatctgcttaactccagtgcaggtccaaaactcgccttcgggtatgctagcgtgccagttgatttgatcctacaatcaacaagaaacaaagacaaggaaccacttcatctgatttgatcctacaatcaacaagaaacaaagacaaggaaccacttcatctgatttgccttcgggtatgctagcgtgccgacttaatagatcaaactcaactgatacagcattaagtatgaaaagaagaacaatatctagacaatcaagccgctggaagtttcagagtggtaaatatcttgcataatctaaatcaacgtcagaatctaacctaatcggctgccctctactaacagatgttaaccgattgtagattagatagcgatattgccaaagattatgtgagatatatgataactcgacgaattacataaacaagattagagtgtcataaagatggaagcactaatcccgagaacgcaagccgtcataacaagctttacctcttgttgaagatcgaaaccgatgcagctcaacccgaacgcaagaactcgtccaaataaaactaaagcaaaagagtggcgatgcactgaaattgtattgtacgtgtgttaaaaattacatagggctcggggtcttatttatagccgagaattacaagatatgtctataccggacacgactattatctctaacaaactctaatataccataagtctttgcggcagacttttgcccaagcatatctctaaggaaattacataaaatatcctaattaatagatacaattgccttctcaggactttatccatgcgcggcaatcatcttgaagcaccacaattcaacccgatatcgcacaccaagttgtattgtcggaatcggctgcatcaggctacctagtccgactcagactcatccgatcctaatcgtagccgatctagactctagccgattcctgctctgttcctgaatcgatctccgcctccgactccacttcgatctaattttcttttccgatgccgatgttaccaaatttggttgttaacaataccttatttgtaaccctgacagtagcctctgacttctgcttaaatgaactcatgcaaccgatggcgacttctgatgtcggaatcgttgtcattctcatctggtcgatctcgatatgagaaccgtagagacaaagagttattgacaacatcgtatgaagttcaacggtcatgagtgaatttaaattgaagtctgaaaactgccgcgcgtaacgtacccagaattttttggcggcaatctctctcctttccttggaatacgcaccgtcggtagtgcgcttatttaaagggattttggggatccattccgaagtccgtttgccagaaagctctcctgccttctagcgcttttcgtcttctccgtccccgcaaaaaaccctagctcacttcctccatcctgttctccgtcaatcctccagcggcgatggatcttgagaagtcttcctcgaacaccgcgttcatgaagaagctgcagtatgatggtgccctccctggtcgcgggaccatgcagagggaggctggaggtatagaacctgaacccatcttgggctgcatggttgtagttgacgattacgtttcttgcggtttttagcctccgccttccgaatttcttctcctcgtcttgaacttctatggtctttctttgcttcacctgaatcccaactccatcgccttccttagcattttctcctatctttgcgaggcctatattggggtagagcatttccttgatcttttcccttttttactatgagttgcgttggatggaacccaaaaaggtatccgactgtgtcagattccgacttcgggatggcctgaaatcaagatacatccccttccaatgccctcttctcgcagcaaatggcgggcgggatggttctatcttcagatagagaactcggatcctgttcttgtagtccctgaagaacaaccagacaaaatcccagagtggaccgctaagcccgccctgactccctcccttcaatcattcatcggcatcatcgatgaccttcgaactcgagggttgtcggggtatgaagtcgctgccgacttcatatgtagatggatccaaccgctccaggcccgcgcccatttggcctttgattactcggggccagaggacacgacccgggtctctcgtcggggtatttttttcttatatttcagattttattccggatgtgcatgtttctcctgacttatcgagttcctgttctcgatctacaggtttggacagcaacaccgtggagcgccgcgtcggccaagtgatgatcagctcccccctcagcgacggataatgtcccggtccccctttgcgagaaggggccagccgaatgcaccgccgcaattaatgtaagtgtactcgatgactcctttacatccttctcctcgagaccgtattgtgacttcatgttacacaggctctccctctgacggatatcatcgggccactcgcggaccatcaggcggcggcgtcgttgaaggagggcgtcaccaaggaggcgtccgacgtcgcggttactgccactacaagcggccgcaacgttctgaagaaggggagaaagttctcctccatactcgggacccgtcggaaagcatcaaccccggcggtaagcctctcctatcttttaatgcgttgtcggaatgttttgacctcacaccatcttatcttgcttaggcctcggacgcatctcctccacctcagcgaaggcagaggttggtgacgatcggcatgaagtaagtatatgtttttgaagtcttttcattcacgagaccttggtggcctaattttacgaaagggctgaaattcttcgcagggcggcgcgcgcgaaggcgacgcaggacggggccggcgcgacttccagcgcgtcccctgcagcgacctcaacagatgttgtggtcatcacaagggaccgggaggcgacaccaagcagccccgccgtcggcctggtgcctattcggagcccggctgctgatgcccttacctggggggagctccaaaccgagatggagcgtatcatccaggtagatgcccgcggcgtaggccgcgagatcaaggaggccagggcagcggcatcttcggcgactcagcgtgccgacaagctggcgtgcgacctggcggaggcccgcgaggacctcctcaagatgagggagctggtggctggcaacgagagacagcgacaagggctcgagcaccggatgtcgtagctcgagaacaacttgtcagagttccgcggctcgctgcgggtgtcttacaccggcctacactagctcgctggggaatacggtgtcatgaccaccatccccgttaacccggacaagttctcgctgacgtcgtcactcgcggagctggcgacggcgatgggggcgatcccctccaaacatgcagccaggatcggcgaggagacgtccaacgggatctacaccggggcgtgccacgtcctcgcgtgcatgaggttggcgcaccctgatcttgaccttaagaaggttttcgatcagggggccgccgatgacgcgcgtcggggcgtgatggaggaggtcggtgacctgggggaatccgtgctcccccttttttgaagagtagggctttatttcccttgtaccccttaaccaatcatgctgtaaaaactttcgtgggttcaaactgcccttatgtatgtagttgttcctttgttttcttagcatgtgattccgagtactttgttgtcgttgtagagatgtcgttatcgaggatgtccagcagcgcgggcagcctaagacgccagtgatcgtcccggcacttgcgcttgagtcgtacgtgccgcaggaggatgtcagtcaatgcctgtccgcggagacgaacatggcgacgacgtccctaggtttgcaccttggtttctacttccttcactcttctgtccggattgacttaatttgctatgttctcgggggagaagaacaacttgacttagtccttttcgtgttgggcagacctcgagagtgcattggccgactgagatcgtcgaatccaaaactggaagacgaagctcgaggtggccgaactcgagaagaccatggtggaggtgaagaaagaccaggccgtggaagccctcagaggtcgcgaggtgtggttcaactcgtacctcaagagctgctgcacggcaatggctggagtctgcagggagcttcgagttcctcgcgggaatcctgaggagttgacggccggatacatctcgtggttgaatggggcctgcacacagctcgaaggggtcggcaagcgcaaagacgaggccctgaagcaggagttccgtcgatcgagccgctatgccggagggcatgtgctggcatttatccgagatcatcgccgcaactgcacctcgagttcctccacgaagggttcttatgttctcgtaggactcccgcagagattgatgatctggcgaaatcgatggcgccgctcgccgagaaggtttttcagtccatggattggcgttggccgtcctagtagttgttgtatcctatagaaaatatctcaaggaaacatgtaatatattttggaatgtttatgaatttcaagaggtacttgtgaaatagaatagaaatctatctaagtaagttttcttactctggatgtgctgtgtatgagtgttttctcatttcgcgacttcgatcagtcgcttgagtacactctccctagcccccagccttgtcgtcggagagttgttctcggaggataaggctcttggacccttgacttgccttagttgaaaaggcactgaccctagcccccagccgtgaagttggaaaactcaatttccgattacacgacttggttaatacgtacggcgagaactcttacatgaccagatcttacatggtcgtttgtctcttcatgatctgacaaggtcttatttgctctgggcgtccccagccgaagttcccttaggtttcacagaggccttgtcgagacggcgtaaagggacatgaggataggtttcagcgctaggtgtcgtcgtggtaagggatcgttgggaaggaacactttgaccgtaatctttacctgaaatcaactttattgaaattgtaagacgtcttacaaaaaatggatactattgatttatacataaaatttacgtaattgatcaatgttccaggaatttgctaactctcgaccctcgccgtctgcaatcttgaatgcacctggccgtaagacttgcgtgatcgtgtatggtccttcccacttgggtgagagcttgttgcaccctgcttggctttgaacccgtcggaggacgtaatcgccgatcgaaagtgtgcgtgctctgatgggcttctcctggtatcggtgaagggcctagtggtagctgactggtctaacggcaactctttctcgatgttcctcgagtaggttcacatcgtcgcttcattgttcctcctatgcctcgtcggagtacttctgtactcgtgtgctctaatgttgtagctccgtggggagcatagcctctgaaccatacacgaggaagaagggtgtctccttgttggacgttgtcggtgtggtacgcacgacccataggacagaggggagttcttcgacccacttcttgtcgtgtgacatgagtctgtcatagacacgggtcttgatcccttgtagtactatgtcgtttgccctctcgacctatccattgctctgagggtgagaaaccgaggcaaagcagatcttgactcccaatccgatgcagtaatcctggaaatcggcactgatgaactaggagccgttgtctgttatgatgcggtgaggcaatccatatctgcaaaatatccctttgataaatttgatggcgttgtcggccttgatttcccccatgggcgtcgcttcaatccacttggtgaacttgtcgatcgccacgaataggaacctgtagccgccctgtcctcgtgggaatggtccgagtatgtcgagcccccagcatgagaacggccaagtaagagggatagtctggagcgcttgcgctggtagccttgtgtgtttgctgtgtaattgacagacttcacaccgctgaaccatgtcgcaagcgtctttgagcgcggtccgccagaaaaacccttgtcggaaagcttttctgactaatgtctggccggcggcgtgtgacccgtagatcccttcgtgtatgccgtcgttggacgaaatgcgtttgagaagtaccccgattggcgcctttttgtatagatcattgccgatcatacaatagatcttggcttgtcgggttattttcttggcttctgcatcatcctcgggcaactcgtcgctactcaggaacttgacgagtggtgtccactagtcgtttgtggtctcgatgtcggcaacggtgcgttctgcctctgtagcccccgagctgatgtcggggatgactgtgctatcttcgtcgttcacctctttcaccgaaggctttgttaggacatccagaaaggtgttaggttcgagtggctctcgtctggacgcacgccgtgctaggtcgtctggttcgatgttgtccttgcggtatacgtgtcggacctcgatcccatcaaatcttttctccagcttcctgacttttgcgagatacttggataactcagggctagagcacttgtagtctttgtgcacctggttcgcgacttattcggagtcccctttcatgattagtagcttgactcctagtgcggctgctgctcttatctcaacgagtagtccttcgtactcggctgtgttgttggttgccctgaagttgaggtgaattgcatgcttgaactgatctcccgaaggtgatgtcaagatgaaccctgtccctgctccttggctattgagtgtgctgtcaaacaccattgtccatgtgtcgttgtcggcctgactgtctgccctattgtcaggcatagtccagtcagctacgaaatcagcgaggacttgggacttaatggctgttcgtgacacaaagtgaacatcaaactggcttagctcgactacccatttcgcgatgcggccgacaacgtctttatttctcacgacttctccgagggggaaggaggaaacaactgtgactctgtgggcttggaagtagtggcatagctttcttgatgtcatgattactgcatagagcagcttttggatctgtggatatcttgtctttgcgtcatggagagcttcgctgacgtagtaaactgctctttgcaccttgtctctctcgacaacaatgacggtactcactgagtatggtgtggcggcaatatagaggaataattcttcgtttggttgggggccaacaagtacagggggatttgacaggtagtttgagtgcgataaacacatctttggcttcctgtatccacacaaatttgtcttttttttcaggagagcgaagaagggttgtccttgttcacccatcctagcgaagaatttgctcaatgccgccatgcatccagttagcttctggacttccttgagtcttgtgggcgacttcatgttctcgattgccttgatcttcttgggattcgcttcgatccctcttcctgagacgagaaaaccgagtagcttgcccgatggtactctgaacgtgcacttatctggattgagcatgatgcaatatcgtcggaggttgtcgaacgtttcccggagatcatcgattaatgagttgtttgtcttggtcttgataacaatgtcatcgatgtaggcctcgacattgttcccaagctgatcgttaagtgccccttggaccgtgcgttggaaagtatttcctgcggttataagtccatgttgacgaaaaaatcgaacacaccggcctgggagatctgcttagctccagtgtaggtccaaatattgatgagatgcgggcatgccagtcagtttgatcctgcaacagacaagatatgtaaacagcagacaaaacagctgatcggctaggcagccgatggagcagttccagccggtagccaataatagccgataccgataccagccgatagcgatagggtttaggcaatcagctatatgtccaatgtagataatgatataaaggcaatcggctgatgataatataatatagcaatataatccagtataaaccaatcggctagcaatgatatgataaataagcatcgatccgaaggttaaagcacacatcggctggaggtctgatgttttgaaatccacaagattagattaaacagtgaaaactttgttgtcatcggctagatgcaactcatatgtatatgcaatccttatgagccgatgcaacgtccaaataacttatcggctgaaaccccgatgaaacccttattggcagtcaaaaagcaggctagagattatggttctaagcacgacttaatagatcaagctcaactgattcagcactaagtgtgaaaagaagcacaatatctagacaatcaagccgttgactgattttcagggtggtagatgtctaggctaatctaatctagcaacacgatttagccgataccggcagaaaccctaaaacgagaagcagctgatagagctaaattgatatgctaagactagattaacagagacatatgataagtaggtaggcaaatatatcatccaaaccagagcaatccaagaggtcgaatgtactgatgcagccttgaatgacaccgacgtagacgatacaattgcctggactgacggaacattggacttatcccttcgccggagatcgaacaccgatgcagccccacgtcaggtgccaagtcccgccggacgataaaataaagcagaaaaggtaaaaggtggcgatgcgccaaattgtattgatcatgaagatagattacatagaccccgggtgtacatatttatacccatgtgttgatacaagttcttgtcgaataagaaagaaactttcctaaagataaaaggaaaagataaagcctttataggacactaaacacactttcctaaagataaaaggaaactaacaaactattcctaattaatagataacttgccatgccgcattctctttgaactcggtctcttctggataagcttcctttagtagatcaatttccttaaccgaatatagcaagaatccgacactgacgacttgacaactctcattggctaatctcaggccttcgaagccgatgctgactctaagccgatgactactccgggcttgccaaatttcactgttaatagaccaaacagcatcttaacgtagcagaatacaccgaacggcgtgatgaatgatgtcttctcctcgtcatcttttgccatgctgatctggtggtagccggggtaagcgtcaagaaaacttaacaactcacaaccagctgttgagtccaccaattggtctattcgaggaagagggaagtgatccttgggacacgccatgttgaggtcggtgatgtcaacacacatcgtcctccacttcccattggccttgcgcaccatgactgaattggctagccactctggatggagtatctctctgatgaagccagctttgagaagcttgtcgagctcttctcgtatggcttgcttctgatctagtgctaatctccgcagtttttgctttactggcttggcatcgggtcgcaccatgagtttgtgctcaatcacctccctagggacccctggcatgtcagacggctgccaagcgaacacgtctgcattgtcgcggaggaaggtgatgagcgtgagttcctatttctcatccagtgacgccctgatcttgatggtcttgtcggggttggcgctggagagtggaacgatgttgattgcgccgtctggcttcggagtcttgttggttttgctcactatcttgggcggttcaactgtggtgggcgggttgggagtatgctcgaccatgtcgaggctccgcttgccgcactgcaccgctagcttcggcccaggcatcttgagcacttgatatgcgtagtgggatgcggccatgaacttcgcgagtgcagttctcccgatgatgacattatatgctgtatcaaactcggccacatcaaaggtgatctgctttgttcggaagttgtttgcctggccgaaggtcacgggtagcgtaatcttgcccaatggtttggacgatgactgaggactaattccatggaagggttgatcagtgggcgtcaaatcgcttcgtgagatccccattgcgtccaatgcgctggcgaagagtaggttaatggagctgccgctgtcgacgagaacccgtgcgaccttaatgttccaaattgtgggctcgaccacgatcggatatcgccctggagtaacggcagccttggggtggtctgcttctgaaaactcgatcttctgctctaaccacttcatcttgggtgcagccccctgccatgtcgaacaaactttgtgctacactttcttgtactctcgctttgaggagtacgccgtggaacctccaaagatgtgtgagacatggaggtcggagtctgggtaggctgagtctgagtcctgagtggctgcttctgtggccttctcgactacacatactcgcttgcccttttctaacgctagtttgtttcgcaagtgcctttttgaaaacgaaacaagtctctagggagtgcttgtctgacttgtgtaaagggcaccatattttcttcgtatcgttgccttgtgggtctgggtgtttgggcgggtccgcatactctgctgtgaggacttctgtttgagctttccttttcctactcctgtgactcttcttcttgcttgactcaggtgcatccttggctggcttcttctctccccctatcttcggcttgtcgttcttgcgtctcagggcgtcgtccgcataggcgcatcgatcaacaatctcgaataacttacgagcagttgtgatccttctagttgccaattctcgggtagtgtagcgatctcttacaccagtcttgaaagcacggattacggaagcatcggtgatctcggggatcgtatttttgcacttattaaagcgctgaacgtagtccctcaatgattcacccggattctgtgtcaacgtgtgtaggtcgtcctcgatcgcgtggcgcttgtatgttccttggaagttggcgatgaactgctgccacagatctgcccatgaagaaatcgagtagggcgggaggtgaaccagccatgaacgtgcaaatcccttcaacgccactggcaaataatttgctagtgtgttgttgtctgctccggcagcgtagagtactgtggaatagacctgaagaaattcctctgggtcggtgcttccgtcgtatttctctattgctcccgatcgaaacctctcaggccatcggacatcacgcagggcacgactgaaagccctacactcgccgccgggggcagtgggttgtcggcgatcatatgttctccgcggatgtctatccgttgacgaagacgatgatgatgatgacgacgatgacgatgaatcactcagttccggtgtgcgttcgggttcttgagaaccttgtcgccacccaccgttgttgttccggcgctgatctctgtcgttgtcttcattgcgtcggtgtcctcgaccagtatcgcccggcacccgttgttcgcgattatcgtatttgcggcggttgtggcgattatcacggtcttggttcccgctcggatgtcctccttgctcttcattctcacgatgtcgtgaagagacgcgacgtcgggaacgattctcgttgtcttggccacgtcgcgtttctcggcagccatttagatggtcacggagatcactggcgccgcgaagcggagggcttgacgaggtggcgttcactgcgcaggctgttccccattggcgccgccggtcggcgattgctctggttgtaacctggcagcggcctcctcgaacgcgttacagagattagccactgattcccgttgtcgttctgtccagtgatcgagatcagcgttcaggacaggatcataaggtgtttccctcagtattgcgttgatggtcctgatgtgttgggccggcgtttccacttgattctccgcttctgtgttaccgcccctagacgtgctggtcccatcgatagcgtacacatcgcgtggtgtacttgtcgacgatgaggcctggtcttcgagcaaatgtagaacagacggctcgtggggattgatatcgattaccccaacgaatcgatctgagatagctgtcgctcctcgttccttgtccgtatctctagaagagatttgtgactgctggaccttaggaggtggcgtcctcatggcgctgagaagaaccttgcagcttgagaagtcgtgattctttgtcttatgaataggacaatagacatcatgggttggagaagtatgttgaattccacgctctttgcaggcacggatctcggcttgtacgtcaagaaaaacccagcaggcttgcaaggtgtgttttctggtttagtgaataggacaccaggaccttgttgcctcggaagctgtcattgtcggctcgtgattctcgtcggaaggaccaaatttggccgcattaggatccttctcgggctcagatgtcgtcgatgttccgttctccacttttgcgggaggatccttcgacatggagccgtccggggtcgtaaccacatcgttcttgcttccggtcgttgatggaccagtcgagatcgacaccgtcgtgtagaccgggaagacgatttcaccgacttgagtccacaccagcattgttgaagctaaaactccttggttgatgccggggttgacgctgtcgtcgacgaggcttgatggcatagtagtagaaccttgagcaccaagtccccctaccaggcgcgccactgtcgacgggggataccggtagaccggatatagagggtattggggtacgttggaacgaggatctatgtaatacgacatcaagcaaacaaaagacaaggattatactggttcaggcgcattggtaggtaatagccctaatacagttggtatgggattatatgatggaaaccacagattacaaagggaataatggaactcggcgataccgacgagatcgtagtcgagttggttcgactagatcactcggcgacttggctcctgtaggctccggcttcgtaggctatggtggatgtgttggcggtgagattcgatgcccttggtcctgcccgagggtcccttttataccgcgggacagttgatctccaagtaggactcggagatatcggacccctcacgatatagtaacgacccagccttgtccgagtaggactccttccatctatggactccgcttctgtcacatgatagatttccttaacgtatacatgaagtatctgtatacgcgcgggtataccgtatcagcatacaacgtatatatccaaggatagagggtatatcttaaccgtaaccctgacaccagcggcatggagacggcggaaggattcatgttggaggcgactgcggtccggcgggggcaggagaggtggcgacgttgtctatttctctctctctctctctctatgtgcggcggatggcatggtggcggcggagcttttgaaagttttgtgtgttcttgttggaatattccatgtgttcttgatgaaaacagtgtgttccatgtgtgtccttttttttggatttttttttgttggaggggattctgactgggatttttctggggtgggggacggaccaaaaatcccctgacgaacgaggtgacgaaaggaaaaatatgaatcttttaattagttaagtaagataaaaattaaagatgtttttaccagtactttggtatgtcatctgtgtttgaatcagttttgattttatgtttcggttttaatctctatctctaataatataaaaaagaacgagaaatcaccgccgtctgtaggaaaaaaatgtccgactcaaaaagcgataaaaaaggctgggaacaagaaaacatctctgtcacagcctgaatttccgttttaggatttataaattatttaataaattattaatagaatttatattaaatgctcattaatttacaagtgaagttaaatgtgggaaataaaattttataaatataaagcatggatggatttaagttgtattaaattctccatgattaattatactctctgaaattttctcggaatttttcggagctcaattcctaatgttaataatacaaagaacagtttagcaattatttaattaataaattaatcattaaatggtatggttttaatatttttaaatactttgagtgtccaagtatgttcaatatttttcttggaattatttgagcattgaaagtatttttaacaattgaaagatcatctcattggttaatttatttggaaaagtaataaaaatcctcctcctcagcctgggccgaattcagcccattctctcccttcctcacagcccagccaaagtctgatctacctccctggcgctacagtactccatcttcctcctccagacagaggcgagccagccgtgctcgtgcacagtgccgccgcctcctcccaccaatccaacctcccgttgctcctctttccaaattagttgcgggaatggaatcccctcaatctcctcttccttttccccaaaaaatcaccaaaattttctatggaaattctttccaatttcgcggatcaaatccttcctttttccggcgagaaccctagactttcccgagtttttcccgtcgttgtcggcttgatccggagctcccgtgcctatataaaggaccctctagtcgtcctctccctatcccctcaagtcccgtccgccgccgtcgccggaaacgctctccccgcgctctccctctctctccacctccggccgccgctccgccgccattcgccgtcgccccggccgtcgccctcctgtgccgccacctccctcggcttcgcagtgaagagctctaccccggccacccgttcttttgcgccgaaccctgccggaagtcgccgtcaccgtgaaggccgaaccgttgccatgttttgatctccggcaaggccttgctgctccttccgtcatcgccaagcttcgccgtcgcctccattggattcgcagctgcgaagtgaaccccgtccacccctctgttgcctccgttcgtcaccggaaaatcgtcgccgccgtggagagtacctcgccgcccttcgaagctcgtcgccggccatcttccgtcgccgtctgtcgtcgcgtaagtgttggtaaggaccgtcgccttgcgctcttcctcctggtacactccatttgcattattgtaccgtggttcgctggtaactgccgttctcgtgcttgcggtcgtcgatcctgcgtggcagccatgtcatcgctgacatcagcgccatcttggccatccaaaattaatttaaatttgtcatctcttttcaatgacatattattcctttttaatatatgtcatctaccaaatatgatctaatctttttccggtggatgttttaatcttctgtctcagctataaatcatttgtaaattgtttaatcaatttagaatagtcttttctttaataggtttaattggaattaaatcttgtaaaattcgtaactaattcatacgaaatcggaatgagaccgttcaagtctctaaatttatctaaaatcatgatctacatgtttgtttacttttatgtactgtttatttggtttttattagtctttttcctcgttttgcgtgttagcttgtcgtttccgtcgtttcgaaggttcgtgagtgcgccggaagtattcaagaagactgattgaagaccgaatattgcaaggcaagtcacacagatcacaaacaaccctttgagcatgttgatgaattaacatattgtttgttatagcccttttgttcttgattactttattacttgataccttgggttattataacttgactagttgagctttatatattggttcaactagatattagatatgattgcttagccatgcttagaaacattagcacactattgggataactaatgtttcactattacttaatgatggatatttaattgtagctcacgatggtcaatcgtgattggttaattaattaatgtgcctactaaaacttgataatggtgggttgtgagcacatggttttgatggtcgtgctcatgacaattaaggactggttcacgatttttggttgtaaaacattaaccgtgccaaccacaagccagcgtgggcaacggctttaccttttgtatatcatggttcattgcagggcaccagacggagataagcccacgggggtcgctggggagtccatgccttgtttataagggggtgattatgatccaggaacggtgcgctgtggtggattgtgttgtgcgaggggtactgtcacagctcctttccgaggtaccgtggtggtatcgaggcgcatggtgacatgtcgtggggctgtgtcttgtgggtacagtggtacacctctggccagagtaaaactattcgaatagccgtgtccgcggttatgggcgggtgtaacaatgtctttcgtgattagtctcacacttctcaccataataaatgatgctataaatggtaataatttgattagctcctggtttggaatggtacattcctggtttggagatagatctgtgcagccgggtatggttgttcaggatggttgggcctgtgcagcatgggtgtgctgttcagtgttgattaatattgatgattaattactctactgttttaaaattctcaaatatttgctaaatgctgcttttgcaaatgagccatcctttggtatattgataaatctgtatattaaattccgctgcagttttcttttcttttgcaaattccgctgcagttttcttttcttttgtaagtatgtaacgttattatattgataaatctgtatattaaattgtcagtttgtgtacctcggctgattcctggacgaggatttaatgcacaaattagttcggaaattactagtgaatttccgggcgttacaagttggtatcagagccatctcgactgtaggataagccaaatggtcaaaccttaaggacgaattttccgaaaacatgatttgtgaaaatttctcctttcttccttatctagaattctttgcaaattgtttcattgtaaattaatgaactatcgcggtcgtccgaataaccctcctgaatcacaaaaccggacattcttcacccccaactatgcaaaccagacgaattacccccctcgacctaatcagcggtggttttggtctacgtggcagtccagtcagtaatttatttattaaaaaataggtgggccccacctgtcagtttctatctctctcctatctcttctatctctcactgtctcactctctgcccttcttctccttcggacggcgacggccgaggcagcaagcgcggcggaggaggcagcggcaaggcggtggcgttggagagtggcgggggcgaaggagagacaagcgcggcggggccggaggagaggcgagcgtggtgggggcggcggagaagcgagcgcggcggcgagg

SEQ ID NO: 6225 - DNA, 27870 bp, Oryza sativa
gttggagagagagggaggcggcggcggctctcaccctagagatgcggcggcggcggaggtggcagaggcggcggaggcggcgacgacgacgcccgcgagacaacggcgagatacgacggcggcgtcggcgcggggatgccctaggcagtggcggcgaaggagaagccgagagagatcgatcggggaaaaaacttctaagtgttggtggagaagacgagggcgcgcatcgggaatatatatatacccctaaatctttagtcccggttgatgagaacaagaacaactgggagtaaagatcttatcaatcgggactaaagataagatctttactcccggttgttctcaacaaccgggagtaaagatatcattactcccggttgttctcatcaaccgggactaaagataatttccctctattttcaaattctttttaaacccggttagggttaagaaccaggactactgataaacgcactgaatattgatttccattacatatgtgtttctaaaatagaaaataatgcactaaaattatttaaagtcgaaaaattaatgacaattacttcgaaaaattattgttgtctgtagtaaattaagtggataaaacgtaataagcaaatatatgatttaaaattaataaaaattctaataatcatatataattagcatatgaatgatattaaattaattgttaaaaactctaattaacatatgtaaatgccacatgtatgatttaaaacttttaaaaatcctaattatcgcatataactagcatatgcatgatttaaaattgttaaaaactctaagtaacatatgtaaatgccacatgcatgatttaaaacttttaaaaattctaattatcgcatataactagcatatgcatgatttaaaattgttaaaaactctaagtaacatatgtaaatgccacatgcatcatttaaaacttttaaaaattctaattattgcatataactagcatatacatgatttaaaactgttaaaacctctaataatcgtacgtaattaacatatgccatacaacaattgatttatatggataatcaatacatccaaaatagtttacatcgtgtatacaataattacggcaatacatcggcggtgacggttgaccgcacgtactatctcctcactattgttccctccttgtgatcgctacgtgagtaaggggtgtcttcatttgataggaggatgctagggtcaatcatcaccgtggaagggggttgcccatccaactaatcgtaatcctcgtcagtcttgtcctcaactccgacgatttttcttttgcctgggtgaaccacgtgacgcttcggctcgtcatgccctctacccttctttcctttgctagacatgtccttcacgtaaaagacttgcgttacatcattggcaaggacaaaaggttcgtccgagtatccaaccttgttaaggtcaaccgttgtcatcccactgtcatcaatcattacgcctccaccagtcaacctaacccattggcaccggaacagagggaccttgagaggaccatagtcaagttcccatatgtcctcgatggcaccgtaatacgtgccggttgttccatcgtgtcccatggcatcgatacgaactgcgctgttttggttcatgctcttcatgtcttgggctctcgtgtagaatgtgtacccattgatctcatatccctggaatgtcgcgatcgacccagatggtcccctcgccaggaaggccagttgttggttgatcgtctcgttacccatgagatgttgtcgtagccacgcggggaaagtatcaatgtgatgccgtgtaatccatgcatcggacttaccgatgtttctagcgtgaactagagccaagtgctcctcgatgtaaggagctaccaatgaagattgttgcagaaccgtgaaatgggctttacggaataaattgttgtctaccgtcattattgctttccttccgagagttccctttccccgtagtctcccttcatggcgtgattcaggtaccctgattgggcgaaggttttcaataaattttacgcaaaattcgatgacctcctctgttccataccccttggcgatgcttgcctctggacgagcacggttacgaacatacttcttcagaacacgccatgtacctctcgaaagaaaacatgttgtgtaggtacacatgcccgagaatactgttctctttgacaaggtgacaaagcatatgcttcattatattgaaaaatgaaggtggaaatatcaactcaaaactgacaagacattgcaccacatcattctgaagggcttctaatctatccgggtcgataaccttctgcaaaattgcgttcatgaaagcacatagctttgttattgttgcccggacattgtctggaaggataccccttattacaactggtagcagttgtgtcatcaacacgtgacagtcatgagactttaggtttatgaacttcttctccttcgtgcttattattcggttgatattcgtggagtatccagacagtacctttatgctctccaagcattcaaacatactttccttctctgccttgctaagagtgtagctggctggactcaagtaatggcttcctttctcctttggttccgggtgaaggtcgccgagttgttccatatgctttagatcattacatgcttccaatgtatctttcaactttccatatacacctaggaagccaagaaggtttacgcaaaggttcttagtgaggtgcatcacgtcaattgcgtggcagacgtccaagaattcccaatagggtaactcccaaaatatagagttctttttccacatcgctgcgtgaccaccttcgctctctataggctggcttccaggcccctttcagaacactactttaaggtctttaaccatagcaaacactgttttcccgctgcgatatttaggcttcgtacggtggtccgccttatgttcaaagtgcttgcctttcttccgtaccgggtggtttgcagcaaggaatcgacgatgacccatgtacacaaccttcctacagtgcttacgatacgtactttctgtttcatccatacagtgagtgcaagccttgtaccccttgttggactgaccggaaaggttgctaagtgcaggccaatcgttaatggttacgaacagcagcgctcgtaggttaaactcctcctgtttgttctcgtcccacacggggacaccttcctttttccataacagtttaagatcttcgaccagtggtcctaggtacacatcgatgtcgttaccaagttgcttggggccttgaataataattggtatcattatgtacttcctcttcatacatagccaggagggaggttgtagatacacatcgtaacgggccaagtgtgtcacgaccggaaataacccaacgggcgttccttacgtgcgtgtattattccttgtcctaggaggcaaggtacaccaaaagttgatacaattcagagtttaacaagcggaagcgtaaataattaatttattacatgggcggcgaaggcccagcacacaagaagacaaacgaaaaacagcggaagactagggcgacgaccataggcgcttgacggcaggcacgagctagacaccaaagccttcatcatccaggaactcctcttctgggtttgggaaaaattgagcaagactgagtacaaccaccatactcaacaagacacacccacaagtgcagaataaatgcaagggagtacaagggggttataatatgaggggttagggtttgcagtaaacagcattaaaagacacttagttgctcaaagcttattttgtaaatacgatcctagagctatacaagattattaatcaaggccatgaacccacacgaacctgccttaacccaaggcctacgatgattcagaccgaactggcaacccgaccctgggtcccagctcgtcccaagccaacccaggccaaccattccatattttagttgttaagcaggttttaagaattaaaacactaacttgggtacattgctaggcttgcccataaccgagggcgcggctattcgaataggttatactctgatcagaggtgtacatctttacccacaagacacatcttcctcacgtgtaaccacatgccacataccaccacggtatacggacggaagatgtgacatagtttccaacccatcctagccatagacaagagtaccgacccaaccccacctacggccggaacctccgggacaggtaggcaggactgagcccctagcagcaggacaccagccctgtgccatgacatctcgactaccaggccgcagctcgtgtagccttcatttgccctagagatgtccatcgacccccgacttcgtccatctccatccgtgtacttttgtttataaccagactgagccacaaactaagccttacccactagacatgtggaagtacggtagtgctttgcaacagaagcccgaagaccggtccttatatggccgaggcgctactatcaaaaccatgcaccccgagcccagcctaaaaccattttgaggattttgaatagagggggaggtgtgaatccaattccacaataatccaaccattccatagtgtccaggtgatatgaatactcccaaagtctagagttgtaaaaccacctaatgttgcctaattaaccagcgaagcatctacctaaattcatactagtggtaccacgcatagggtacccactagttggaggttttgtttagtctagggtgaacaaggtaataataataatagcaataataataaggtcataacaaaggtaaataggcatggctaaataaaacagtgataacgcgggaatttaaataaagcgataatgcattaatttaaatcaaaataattttataaactgggattcaatatgttcaaggatgatgtgacttgccttgctcgctttcccaaacgtcggcttcaacctccacgaagagcggatcttccgaagctgcagcgtctacacgaccaatggaaaataaaaaggcttttactctaataaacttcatataacaagtaggaacaaagcacaaaaatgggttcttgacttcttaaggaaaaattagagacttgaacggtccaattccgagttcaaatggccaagttatggccatttgaggtttatatgctctttaaatgaatatttacgaatttcttcatttaaattttaatttaaaaatggattattgcgtcagccgagggggaggggggcgcggaccgggtccacgggagtggggcccacgtggcagcctcacggtccacggtggaccgggcgcacccgggctcgcaccggccggcgccgtgggccccacgcgtcagccgcacccgagggcgcgggcggctgacggccgggccccacgcggcagccgctcggcgcgcccgaaggcggccacgtcggcgtggccggcgggaggcggcgcgcctgcgcccctatggtcgccggcggcagccataggcgcggcggagcggcgtccgagagaggggagggaaagggggaaacgaggcggcggtccacggctcactctaggtcgacggcgacgacgaaaaaggcgaccggagcggaggaaggcagcggcgcggctcgggcggacggggacggcggcgctctggcggtcggcgagctcgacaagggggtggacggtgacggcggcggtgcggcgaagccggagaaggcgacgctgggcgggaaacggtcccggcgagcggagagagccggccgaaggtcgtcggcgacggaggagagagagggcgacggcgcgagctcgattccggcgaggagaaggtgcggcaaaagggtggaaacgggcgaaggaggtgcggggagggtttaaatggggttggaagggggagagggcggccggggaaggaaggaaaccggccgggaggtccgaccgccatcaatggcgccggcgagatttgcgggagcaaatccagccgtttgaatgcgagagagagagagaggggaaaatggggggaaacggggaggggatcacggggagtaattcccccctattgatttcacgcggggacgacgggaggcggcgggattcacggcggcggcggcgctaggcgcgggcgaggcggcgggagcggcgggaggaaggagatgacgggtgggccccacccgtcagcgagggtggcgggcgggcccacccgtcagcggcgcgcgcgtggggagaggccggatgggccgcggggagagaagggagagggggagggaaatgggccgagccgacccaagagagggaagggggatttttagggtttttctttttataaaacatttttaactttgtttatttcttaacaattattatttgtgctctgaaaattccactaaaatttatttacacattttaggcttttaggaaatatacaaaaaatcctccaagcctttattgacttttaactttgcacattttaatttttaaaggctttcacaaggattttaattattctaggcataatttagaggatgtattttagggttgttttggggcgcgacaaagtgctatggctgctgctcatctctccaaaaggattcatgccatccgtacttaaaccaaaccgtatgtttcatgcgtccttttcaaagtctttaaattttttgccgatgtttcgccactgcgaaccatcggcggggtgtctcagcatcccgtcctgttgacgctcttcagcgtgccatcgcatcgttctagcattccccttattcctgaacaaatgccttagccgtggtattatagggaaataccacatcaccttatcaggaattctcttctttgttagctgcccgtcaacttctcctggatcgtctcgtctaatcttgtatcgtagtgctttgcaaacagggcatgcttctaggttctcgtactcctcaccgcgatataggatacaatcattcggacatgcatggatcttctaaacttccagtcctagagggcagactatcttcttagcctcgtacgttgtctcaggcaatttgtttccctccggaagaatgttcttgacgagtttcaataaatcaccaaatgccttgtcactaacaccattttttgccttccattgcaagaactccagagtggtatccaactttttgtgcccctgctcgcaacctgggtacaacgacgttctgtagtcctctaacatcttgtccaatttatgggcccccttttcactttcgcagtcctccttggcgtcctgcaacatctgaccaagatcatccgcaacgtcgttaccatcagcatccctttcctcctcgcccatttgatttccttcaaatccagcgtcctgactaaagtccggaatattatcgtcttccacttcatcttcttccatttcaaccccttcctctccgtgggatgtccaacagttatagcttggcatgaaccccgactcaaacaaatggaaatgaatagtcctggatgcagaatactccttctgattcttacacttattgcatggacaacaaataaaacccttatgcctgttagcttcggccactctcaaaaaataatgcacgccgtcaataaactctttggaccgccggtcagcgtacatccattgccgatccatctacatgaaaagaaaaaaaatcatacataaataattattcgtacaataatgacagtcatacaataattataaaataattacaaactctttcaacagtcatacaataatgacatatcattattcatacaaaaattataaaatattacaccaaataattcttatttactatttctaaagttttaaactaatattaatgtgttgtacttcttttaattttcattttagtttgttttctattatttaagattaactttcactatattttccttctcaactattttataaaaccttctttagcaaataaactaaatttctatatattctttcttcccccacacaaattttctctctcatcaacttacaactaaattttggagacaaaaaagtgtgcaaaacatagctccaaatgtaatatgacaaaaaaaaacattggaggatgaagttactaaccttttaggcacctccgatttgtatataatcaccaaaataaattcactagaaattttggcatgacctcccctcttttttgaagaaattttgaagcttgctcgggcagctggagcaggaagaagacatatatataggggtgggactttagtcccggttggtgttatgaaccggggctaaagatccccgtgatctttagtcccggttggtaacactaaccgggactaaagttacgatctttagtcccggttggtaatccgggggaggcctggcaggccctgacagcatttgaaccgagactaaagatcatctttagtccgggactaaaaattaaatatgtccgttaccctttttaaccgggactaaaatcatctttagccccggtttttattgcaaccgaaactattgtggaattcggccgaccgacgaaagatggtttctccaccagtgtagaacagcctcctgtatccatgcaccatctagaccatcagtacactgaatagaaaaaagttaaaaattagttaaaaaagacaaatctagacaggaaatccggtcccgttcacagggtccagatgaaatgaaaggtatggacttacaatttggcagaagatggagtgattaataaaaacacacacacacaattttgcaacggacgaagagaagacatgtcatgatctgacggtatctcgatgtagtaagaaaagatcagagcagccaggcagaaggaagaattcttagaatgaattaaccacatgagcttgcattttttagataaaggattatcaaacccggcctctacacctttgtggggtatacacagccaaaatccgaacacgagtacataagactctccctaataaaagggtacaaaatgcatcaactgacctctcccattacataagagatgacagcacaaacaaaggttttaagaacaacaaacgaagaaaagactaggcttccaatcttcttctaaggttccagccatacacggagaagaattccaccacatgcttctccaacactttgcaatagttcttaactatttcttcatcggttcccttaagaagcaaagaccaagtccttgcccaatgtgttcccatgaaaatgatctgcaagaaagatgtaggattggagccattaaagaccacatcattcctatataatcaaattgcccaaagaaatacagctatgcccacacacaatattctcttgagcctaggttcaacacaattcagccaattcccaaacatttgagacatgctacacggttgcctaatcccaaatgtaaaaaggagcgcactccaaatatatctagccattgagcaatcaaagaaaaggtgttgtattgtttccttagagttacaaaaacagcaacttaggctacccttccaccttctctttgctagattatccttagtgagaattaccccttccttgaggtaccacaataaaattttgattttaagtggaattttgagcttccaaatgaaattcttcctaggaaccagcccttcatacatgaggaacttgtacatagattttactgtgaaaatgccttctttattgtttttccaaaagaagcgatctttctgatctgtcaatacagtgttaacaactttcgacactagctcataccaggcttccaagtttcttcccactattgatcttctgaaagacagatttaacggtattccactcattaccttggccaccaccttatttttatttctaactagattgtagaggttaggatactccttctcaaaggattgaactcctatccaacaatcctcccaaaatcttacttgtgagccatcttgtaataagaaggaaccgaacctttgaaaagactctttggctaatatgagactagcccaaaaatgtaagtcccctggtcttttttggacttgcaaaatggttttctttgtcaaatattttttcctaagcaaaatttggtcttgcatagaccagatataatataaatatggctgtatgagaaaacatcaaacaccacttcccatatttcctaattcctgtcattaacaaacgaatcacattacaacataacatgtataatttctaggtacatcaataatattagtaatataatcatctaaaaatattgatacaatgcaagcagtagaaatctgaagtgccgaatcagcgtggaaataattttgttgaataaccatccttgatttttatttgtgacgaacaaccaccttactgtattatagctctcttcctagtactatttcaattagtgtatatgaaaaaaaaaacaaatattcaattagtattcatacattgacagtagatcatgcccacattgttgtttgtgatgacattcttccttttgaagagaactgctcagtcaatgtacaggatgcaagtaaataattaaggagttagttaatgtcagcgttgattaaaaaaagatgtgaaggtgaacttttatcaatcatggaaaaaattgacctataaacagtggcaaaattatgaatagtgtatctggcatgtactaacatttagttttgtatggggcctatgggctagtagattaaatgagaagagtgcaaataccgtgttgtggcatgtacagaagtgaccatgatccctagccttcacacattacaataaccatccttcacatatgcgctgcaaactcaattcgtcaaacaaatacacgctgctaacatactgcatctggcaggcggtgttgttttccatcacctcgttgtcttcccctgttaaaaaaccctgacaaattaggaagaaaaaacaaaatagatgatggactgatagtctgatacagggagatcagactcatagtccctcataaatcaggaatcacaattttagatcatggactaagacgtacaggcagatcaggcttataggccaagtttgtagagctcatcgataaggtcgtgctggcgttgacattgaagtcagccaggctattgcaactgcaagccctcgacaacatcaccgatcctgtcctgtgaccgagatcctctccatcggcagcggccgaggctgcgtgtcagcctatgcagccaacccgatgggtgatggccggcgtacctcgttaaaaccttctgatcctgcagcaggaggttgagtgtaacgccccgattttcgttggggattaaaaatcaattagtaatgcattttctaggaattatattaaaatttaaagtaatttaatcaagggaaattataaaggaaattaaaattttctttaaaaatcattggccggaaatattttgaaatattctctgtgcctaaatatactctccggatttttctgtaaattttctaagaaataattttaatagcacaaagttcatttaaccaattaaataaaaagaaaaacaattaaaatccccctctttcctttcgggcctcctttcggcccaagttctcccttcttttgggccggcccagctcctccccctccctctcccgcaagtcctctttgcatccctccatcggcctcctcccccttctctcgccgacaagtgggaccgcgggcccactcgtcagcttctccccttacctccatccggccggctgcaaccgccatggctgccggtttcgccccacgatgccgcgcttcccgcgctccacctcacctcgcgagcacgtggactcgatccccacctcctcctcccccatttcccccactcctccccgcaaaatcagcgccgaaccgccgccaaccttcccacgtcggcgccccacatcgccggtcggttcccgcctttctcggtcccgatttccacctcccggacctataaaaagcatccccggggccccctctcccattttccccaaatccccgggctcgccgcgccccctatcgctctccccacgccgagccatgcgcagccgcccgccggagctctctagccgcacctcgccgccgccctagtcaccgtcgcgccacgccacttgcgccgtcggcaacgccgtgccaagctctacctcggcatcccctccgtttccccaaaataccacctaaagcacctctccaccgtgctccctctctccaccgcctcccatcgcattcagccgtgcaccatcgtcgctcccgtccaccccgcactgcgccgtcgcttttcccgccaccgcagccatcgtgagcaccccgtccaccgctccatttccccaatccactgccgaaaccctaccgccaccacatacaaataaatcataatattaaacatataactatataagctaacattatcacctcacataaatattgcctagatatgtatacgacaatactagacatgaatatatcaaatatacgaaacatagttaaaacataccgacgattttgttctagacgaggcgcggcactcactgcccatacgacgtgcggtacaaaatattgatgacaacacacatcgatggaacataggaaaatgagccacagtggatgaacaatgagcagtcgtgcggagcacttccaaatcttatccgccctctctggctaggtgcaggatgttaaaggcaactgttgcatatagctgctctcccggatgcccgtgcatggtggcgggcgtgatggagtaaacaatgagcaatggggcaatacaaaagagaaggcaattgttttcatgtaagttgcatatagacggcggtttggtatttatagagatactgcaacgtgtgatcaagaggcttgtatgatatccacgccacgcagcagaccatgcagtgagtttaacaaacaaacatcggataattcgttaaatacaataaagcagagctatagaaaaaagcggcgtatgcgcgaccatttggagccccatgcctgagcccggcctgacgaggggtacgagcatgcacatttctctaattcttaccacattgttcaagtgactagacgtctactatactagaactaataaggtggtactataaattataaataataagatggcactataaatattttctatcaggtaggcttttaagatatttctacagattattctttctgtagactatctaataatctactaatttaggtcttccagcagggaagacattatgtttgttttccttcaataccagcatagaatggctccagcatagaatggctccttccataggatcttcgaaagaaatttaagcatcaatattttgttttaattgtaccctaaagatctagatcctctagaaatccttcactttttcttttttttttccaaacgagccctaaagcataacattacctggggccattagaactatagaggtctctacagtattatttcaagtaataatataaaggcaaattttgttacatgacactgctattgtgttgttttagccgtaggacaccgcccgaacttacttttgggggaaagaaactaaataaaagtggtaatttgccaatgtacaccgcaccgattagaataataatttccgattgaagaggagagagaaatcgcgtgaaagttctaaaatgcccttgggcccacatgtcatatctctctcccatccctctctatcccgtccatggcctacggttgcccacggccacacttccatggcgcgtgccgcgtgccgcgctgccacaccaccaccgctctctcatctctctctatctgtcggaaagctcgcggactcgcggtgtccgccgttgccatcgcggcgtcggcgtcgtcctctgccgccacgacgatttgacggcgctgcacacgctcagcctccacctcaatgcgctcactggtgcgctcctgggagaccttgcctccgccacggcgctctgcaacgtgttcctcaacgggaacaggctctccagcgagttcctgcagcgcgcgcgacagctgcgggttgaacagctccgccgcgcgcatcacgtgcggcgcgcaccccagcggccccgtccccatcaccagcacccgcctcgcccccatgtcgtacagcctcttccaatgccatgccatgccaacggacgaacacatcagagacgaattgatcgagaggaagaagacgaagtgtatacggaccttgttgtggcaaaaccctcacacacgcgatcacttggataaacacaggaaaaacaaaagtgtagacgcgcgtgaaagcaaaacgaacagagatgaacacaagaacacaggtttttggtgccgcgcaacgtcttgcagcttttctggtttttttatctcatttattctccaacgattacatgcataacaaactaacagcttcacctattcagccgctatgaccacttcctccgcgccatcccacgaagtgctgatcaacgctgcattcttggcgagtcacgcacacacgcactctcggccatgacgcgaactctgcgcgcctctggctcatgcaacatgtaaaagagaaactaactcgtgacagaatccaatgacctgccacggatgcacaaacaaatgaataactaaccagctaaatgtgacaggcttagtctaacaaatcacccccctaagccttgtcaccttcacgttctcgacacccagcttccgccttaactccaggaatttgacacgcccaagtggcttggtgggtaaatcagctagctgaccatctgtgccaatgtgatcaatctgaaccttttcttcctcaacacactgacgaataaaatggaatttggtgtcaatatgtttgcttctgtcatgatgaacaggatttttcgtaagcgctatggccgacttgttgtccaccaacaacttgaacttcttcgctgcacctccaatcaagtcattaagcaagcgagatagccacagaccttgacacgcagctgacgcggctgcgatgtactcagcctcacacgatgagagcgccacgactttctgcttctgtgacgtccaagtaaccaagcttgctccaaggaagaaagctgcacctgacatgcttctccgatcatcgagatcactagcgatatcgctgtcactgtagcccatcaagccattatcagactggtcttgtttgcgatagcagcaaccaaatccaatagttccactcagatatcttaaaatatgcttcacggcagccatatgctgtgatgttggagcttccatatatctgctgactatgccaactgagtaagcaagatcaggcctagtatttaccaagtaacggagacttcccactatgcttctgtactcggttggattcacagctgcactgccatctttcttgctcaacttcagtcggttctccataggtgttgcacaagcattgcagccgatcatcccagacatctctaggatcttctttgcatagctactttgacacatggtgattattcctctagactgttgtacctcgatccccaagtaataactcaggagaccaagatcactcatactgaacaatttccccatttgagccttgaactcctcaatatcagtatctttggaccctgtaacgattaaatcatccacatatactccaactagcagtagatcatcaccagtctttcgcttgtacacaccatgctccatgggacatcgatcaaaaccaagtgacaccagggtggcgtccaacttggaatgctaggctcgcggtgcttgccgcagcccatacaatgccttgcgcagcctgagtactgcaccgccctgcttgtcgtcaataaatccgggaggctactgcacatagacttcttcctcaagatcaccattcaagaacgctgatttgacgtccatgtgatgaactgaccaaccgtcatgtgcagccaaagcaagtagcagccgcaccatctccaagcgtgccaccggagcaaacacttcatcaaagtccaccccctggcgctgcgcataccctttcgccactagtcgtgccttgtacttgacgatgttaccagcagggtctcgttttactttaaaaacccacttaagcccaatggctcgatgcccttctggaagccttgcaaactcccaggtttcatttccacggatggagctcatctcgtcctccattgcacgccgccaattgggttcggccagcgcacgttccacgctgtctggctcctcggcagccacgaggcaaaacccgctgaagtcgttgacgtccgacatcaccgtgtcatcgaccggcagcgtcgtctgttgaagattttccagcgaacggtaacggagtggcatcccttccgagtcacacgaacctcccatcggcggactgacaaactccacaccagtcgaggtggtcggcatggatggcgtggccggcggcggccgctccggtgtagccggcgactgctgccccggtgcgtcggacacctcttgggtgcctccgttggatcccaagctgtctcccatgtccctgggagtatacacaacagtgaacgtgccagaccagtcaggatcttgtctgccagtattggtttcccagttccacttcttctcctcctcaaacaccacatcacgtgacacatacaacttctttgcaaccggatcataaacccgatatgccttggcattgtcttcatagccgatgaacacgcctgggatggagcgatcggatagcttcgacaccccaggcccaacctttttcacaagagcagcacatccaaaagtacgcagataatgtaccttgggtttccgacgatacaacgcctcatagggcgtcatgccgtcgagagcgcgcgtgggcgcacggttcaggacgtgcaccgccgtcttgacagcctccgcccagaaatgtgccggcacgcccttgctcttcaacatgcttcgagccatctccaccaccgtcctattccgccgctcaaccaccccgttttgctggggtgtatacggcgccgtggtgtcccgacgaatgcccagctcgacacaatagctggtaaactcattggagttgaattctcctccacgatcagtgcggaaagctttgagcttcacgtcaagctcgttctcagctgctgccttgattttcttgaaacacttgaacgcttcatctttgctcctgagcatctcgacccacatgtaccgagaataatcatcaacgatcaaaagaaaatagcgtttaccagtagttgttgtcggcgtgattggtccacacaagtcgccgtgaactaattcgaaccctcgctccgcgcggaatgcagacgcgcgcgggaacggagccctgtggtgcttgccaagggagcacccctgacagaactgctcgacgtggttcaccagtggcatgccttcaaccatatgcttcagactcatatcacgcaatgagcggaaattgagatgtccaaaccgctcgtgccaccgccatgcttcatcatctgccttcgtcagcaggcacacaggcgtggccagtttcagggacagggtatacatcctgtttttgcgtggcacccacgcaagcagctgacgctctgcgtcgaacagcgttagtgcggcgttttcaaggacacctctgcatcctccttcctcaagctgcccgaggctgattatgttgctacgcaggcgagggatgtagtacacctccgtcagggcacggtgctcaccatttttgcactggaacgtgacggcgcccatgccctggatctcgaccacggagttgtcgccgaagcggacagtcccagtcaccttctcgtcaagcgatgcaaacatcgctcggttcccaatcatgtggttgctagcgccagtatcaaaataccagacatcatcaggcatctccttcggaatcacgcgttcctcgttgaggaacaccgtctggtgcacttcggtgaaaagcagcgccggctgttcattctcaacctgcaccaggtttgcctcctcccgccactcgcggcgaggcttgcgacattccttggaatagtgcccaagtttatcacaattgaagcactttaccttggacctatcccacgttctggtcgacgatgatccaccgccgcttttgttgtcgtggccgcggtcaccacgcccaccgctgcacggcttgtcatgacggcttttctcaccgccgccaccgctcttcgacccgctcgaggacccatcgtggtccttcagtttcatgcgggccaagcactcctcctcggtgagatagagacgatttccgcgtggcgcatcatcgtcgtcgtccacgttatcatccctttcggcggtcgacaacctcccgacaagctcctcgattggcattgtcttcagatcaaggaattgttcaagtgcgactgccacctgcttgtacctttttggaacaacacgtaggaattttttgatcatatgctcatcatcaagcacgccacccatgtcacggatgtccgtgaccaccgatgttagcctcaagctgaactcctccgcagtttctcctaccttgaagcgcattgcttcgtattgctgacggaacgcctgttccttcgcctcacgaacacgatcaacacccactcgcatgagtttgatggcatcccaagcggcctttgcggagtccttctttgctaacggtcgtagcatctcctttgagacagcttgcaaaatggctgctagtgcgacccgatcttccttgaactcagcatagcccggatcaactgctccccaaacaccttgtgccaggaggctgaccctcatcaacattgcccattcggcatagttggttctcgtcagcaccggatagcgcacggctacgctaggatccctcggtgctggttgttggacgatggggacttcagcaccatcagtgccagtgcctgaaccaccgccctgcttgctgccactgccgctgccgccgccgccgccggcgccacgccgccccggaggagtgtagcggccactgtcgctgtcggaagacatgttaaactcaggctctgataccacttgttgtggcaaaaccctcacacacgcgatcacttggataaacacaggaaaaacaaaagtgtagacgcgcgtgaaagcaaaacgaacagagatgaacacaagaacacaggtttttggtgccgcgcaacgtcttgcagcttttctggtttttttatctcatttattctccaacgattacatgcataacaaactaacagcttcacctattcagccgctatgaccacttcctccgcgccatcccacgaagtgctgatcaacgctgcattctcggcgagtcacacacacacgcactctcggccatgacgcgaactctgcgcgcctctggctcatgcaacatgtaaaagagaaactaactcgtgacagaatccaatgacctgccacggatgcacaaacaaatgaataactaaccagctaaatgtgacaggcttagtctaacagacctggaggattttcttgtactcggagatgaggaagcggacgtagtcggggagggcgaactgctgggagcgaagggagaaagggacgaggtagtagttggtcatgaagtcgttgccgccgagggtgatgagcacgagcacgccgttcacgatccgccgtgccctcgccgtgccgaccagcgcgcgtagcctctcctgtggtactccgcaaagaactgcagctgcctgctcatcctcacgatgttcacctgcaagaacaccgccatgaacgccatgaacgcatctcaccgaccgcgatcgatcagtgatcagtcagtggcactcacgaactggatgccggtgtcgttgaggatgccgacgctagcggaggcgaagttggcgccgacgaggagcttggcgccacgaaggtccgggctgaggtaagggagggtcggctcggcgccgaggtgctcgttgatgatgtccgggatgttgaggccattggagaacacctcctcgtggcgcggtggctctggtggtcggtgcccaagttcaagtccgcacagccaccaagcctgccgctctcgccgccaccagtgtcgccgtcgtcctacttcgccatcccactggggctcagccccaccgagctgctcgactcccccgtccttggtgaggcatggcgtcatcggtgaggcatcggctatggaagcgtgggaggggatagagagaagagagatgttagaaatatatgacatgtggactcaagggtattttagaactttcacgtgatttctgtctactcttcaaccaggaattattattctaatcggcgcggtgtccattgataaattaccacgtttatggagtgtcttctcccaaaagtatattcgggcggtgtcctacggctaaaaccacacaatagcagtgtgctgtcgcaaaatttgtctaatataaaatccctccttcgacgttttggtcattttaataataaaagtagtgtctattccctctattctaaggcgcctataatattaggaaaaaaagcaacatttgcatcatttttataataattaaactaactaactaactaactatatatatatatatatatatatatatatatatatatatatatatatatatctagtggcatgcatatgatatcatcgtattcgcattcgaaagcacattcgtatggtgttaattttgcagttgttgataatgtattacttcctctatcctaaaatgtagatattttttaggttgacacggatattaaaaaagtatgtgagaatgattggaggaagtgtattattgattaatgtgtcatgggtaggtgaaggagaatggttgtgattggttgagaggaggaggtaggtgaaaaaatagttttattttgggataaggtattgtgctagaaatacgctatattttaagacggaggtaatagggaaaattttgggactatctaaaaatattatagcaagttatttaattgaaaactttcaaacatatactctctatatatatagtatatttaaggagctcgacagtgtcattcctaatcaagcaaatacaagatccaatctcctcatctcctcctgacgttgttccttgtcgtgaactcgtgatcaccacggacgcttggtgtccaagccacccaaaccatgcccagctatctcacccatcaaaaggcctggacgaaaagctcgtggcttgttagctcgcttgactcgcgccaagctcagctcggctcgtttcatttttctaacgagccgagctggccttttaactcgttagagataacgagccagctcgaactggctcgcgagctgctcgcgagccttaatgagctgaggtagctagcccatgctgttgtggacttgtggcccatatgtgcttgaagggccatatatgcatcaaaaccctagctctactcctcatccccaatcccacacgagtcgccgccagccctcaacaccggtcgctcgcgcggctctcccccaggccccagcgcccgacgccgccgcccgcgccgctcttctcaagatggccatattggcggttttgcacggggaagagcggctccatccttatcaattgccctctccctctccatacaatagcatggataaatttaagtgcattttggttgacgtactgacgtgtttttatctatttgtccctcaacagtgagcaatgtgttgtaggaatgcaacatgacgtattgttttttccttttattataaccttccaagctattataatcatttttctactactcccctatcccaaaatataagacataaccattatttttttaatgtttatactaaaatataagacaactatttttcttatgtttcataataaaaaaaacacgcatgtatgcatgcaatgcaattaagtagcacacccgtctcccttaaattttgtttgtttaatcctcaactgtaatatctctagtatcattggctgctttcattgtatttattgaggtaatctagataataattttttcttgtttttttttacatttgtggagtaatttatttctgttattaatatggaacctcgcatcacgcggttcgttaaaaaaaaaaaggaaaggcgaccgaagacaaggactcgtgcgaagtgaaaagtgctcacctcactgctcaacggtccaatcccaccgttcctttgggggttcaccggcgggcggcggcgacctgcgtcgtgcgtcagtatgtgtcgcgggcctctgccttgctattcgccactccggtgaactccgcgcccctcccgtctgctccggcctcttccgtagcgcgccggccgccgcccccactccttcggatccggatggcattgcagccatttaccgacgacctcctcgccgagatccttctccgcctcccgtcggcggcctccctccaacgcgccgcgctagcctccaagtgctggctcgccgtcgcctccggccccgacttcctccggcgattccgcgcccgccacacctagtcgcctctcctcggcctgttcgtctcccacgggagctccggcctccccgtgttccaccccgccgcgaccgtccgctccgaccccgacctcggcgccgcggtactcgggggcgacttctcgctcatccgcgtcggggacggcgaggatccccgctggcaactccgggactgccgcaacggccgcctgctcctctgcggaggtagatccgtcgccgtctacgacccggtgtcccgccggcgcgtctccatccgccgcccacaggacgaccccttctcggacgcctacattgccgactgcttgctgcacgggcgcggcgacaacggcgcggcgtcgttccgcgtggtgtccgtgcagcgccatggccggaggatgcgcgccgcggagtacaactccggtactcgagagtggagcttccacccgtgggtggaaaacatgaggcggcctcgccggggccaggcgatgcatgcggcggggattatcttctggaaatgcgaggacaattttgtgatattgcttgacacgctcacgatggaattctccatgctcagtctccctgtaagcttgttccagccttccaagtacgccataggggagatggaggatggcgtgtgctgccttgtatgccttgatggcaccatggacaacgtccacatgcaagtgtggctgctcatggaggaggacggtggtggcaggaggtgggaattggagaaggaaatgccggttagtgaagtgcttgacaggcattccctggtgcgacaagtccgaacagtggctagtggattggttcttgtttcctgggatgaccgctatcctcaatttgccattgacctgaagaatatgaaggtcatggctgagtttaggtgcagcggcgagacttatcttttccaaacgccatggccacccgctttgttggtcgatagcggtaagtctttcacacatcacttaggtacttccaaatatatgagtggattgcttctttagactacgagttggaacttactgtggataacttgctatgagaagtgagttgatcttaattgattgctagtgtagttttggtcactgtgttggtagagggcgagcattccaatcacttcaacagcaacttttggatttaattcttaaagaattaaactgaattataactctttggtttcatgcttcctgaactgaactgacagaactacaaattggctaattttatctgtttaatccgaactattagttatgaagaacatgtacatgttttttgtaaagtcatgtttagactttagatggagacctgccaatggccgcatttcatggtaggcatactgggttcaattaggcatctattgttttggaaagtaatttagatgtctcataaaaatgctacccacacagctgtttagacatctcataagatttatgtggtcattttttagtggctaacaaaaagtaggcatcacactaacgaaaaattgacgttattgttttgttgcatttcagttggtttggcctaagtcaaggtcaaggttgattcattttcatcattttgctaaacaaaaaatatccactcgatgctgatccaatgcaccttaaaccacagtgaccttttcttgaggtgtcagacaagatgcagcttgcttgaatgtcctcctcccttgttcttatatactacctccgtcccatataaattgcaattctagtttgtttagtactccctccgtactcataaaggaagttgtttaggacaatgtttaagtcaaaccttgggaatataaatcatgaataactctcaagttgttgagtttgaaaatgtaaaaattatatgaatagatttgtcttgaaaaatacttttataaaagtatacatatatcacttttcaataaatatttttatagaaacaagaaatcaaagttgtgttttggagaccgtgtcgctgtcctaaatgacttcctttacgagtacggagggagtatatattaaggtttgagaagaaatactatgatgccccttattaaatggtgtataggtaagagtggaagggtagtggagggtaaaatagaaaaagattaaatgagaagtgattaatgagacctattagtactctattgtgacaattattttgggacaaattcaaatcctagaaatacaattattatgggacagatgtagtagttttcagcaatgttcttgtgattcccatggtgttaaagcactagagaaacttattacatggtagtaatgttagtgccaagttcagtacggtatacagtggcagtaggaggggaaggctggatgtatgactgagagtcaagtagttaagaatggaatagtatgctgttttcctgtattatattgatgctcaaccgtacaaaaatcattgtttagcttatttgtataccctacagaggttcaaccagcggatttggctattcctttacaatctgcagacctcaacaaaaatttctattcctgcccaagagcagaatatgtggagccgcttcagatgatcgctactcagaacatgatgaaacatgttaatcttgctgcagagagaactgatgttgtgaattcagaggtaaagatcagcttcagagtttcctttgtgaaatttgtgttgttctgataatctgtaactagtaactacatatgcatgcagggcccattggatttggtattggaaccacatggcccactggacgcacaacaagctatggctgctgaagcggagaccttggtggtaacagcagacctgaaattagtcaggtctactgaagcacaaaaccagtcagtagctgaaaaacctgaggtatttagcaattgctgcctgatttgtttctctgtcaaaattgttactcaaagcattacaactctgcatattttcacaatgatcgaatcagatcatgaaggggcctgaagtcccagtttcgaaaaggagcatgtcacgtttggaaaaaagaagaggggaaagatatgagagtgctctccacaaggcaatggagaggaaagctcgttacatgggtggtgtggaacagcttagtacttctcttggaagaaactacagaagatcagagaagccaattgttgtggactctagttacgagagatactaccagtgtcgtcaacgtcgagagaagccaattgttgtggactctcgttacggtaaatactaccagcgtcgtcaacgacgaccagccgcaggagttcagggaaggtgaggcagggcgcagctaaacaagtttggagggaagtagggttgaaggagatttgtattcagtggtaggaagtttatttgtattcagaaattactaaccattaacaccattcattcgcctgagcactggtatatgctttcgataactcataacagatacatttttgtaattcatatttacttgaaatttgttttttttaaacacaaatgactttattaagcaagaacagagttaagggataaaccccagtacacaaccaaagatagaaattgaaagcaaaagtgacaaccctgaaaagagagggtgaaccgaactatggaagcagccttccagatgaaaccgaacagcagaaaaaggagcaagccgacagggagctgcagtgagccatgactactgcaaagccacgacgtcttaaaattgtgtcgactgctgccatgggcctcatgagaagtgcacaccgcttgacaaaccgttaatccccttcagttacctccacgggaatggcaccagattgaggttgattgctgagccgaagatattggtgtaagcatcaccggactcaacaaagaatccccacgaggtttgtcattgaatctgaggaactttaacaacagccctgtcaatcgaaattgcgcagaaggtccgagctcaacccgaatgacaaaccaatcgtggtttctgctgctagggaacagtagagagggccaaatcgtaatttgttagacagtctaggagagtatgagtatcattttgttgaaccatgtcatgaacgcaaatcatgaatagcctgagaaaaagaaccttatcacggtttctactcggcgggtaatttgcaatcaaaaattatggattaaaaatgaaggacaacaagataccaccagtgattgtaatcgggtttccttaaaaaaatgattgtaatcgaattaagcaaagcaacaagtagctatgggcccagagcaatgtagcaactagcaaccatctcacaaatggcaatgtgttttcaggaaacaactaaacattatctaactcatccatgcctcttgcaaaatacatgtttgatggatccattggtttagggatctctaataattttagaacgttttcttagggtacttaaggaaccatagcactagagatggctcccctttacatcttcctagatgcaccatcgagcgtcaaaaataggagccttcaaataactgtttttctaggtaaaatgtttttcgtagggcaaacaaaaatcacttctcagactcaatggtgagcgaactcttttgttggattgatagtccgttccaatgagaacttttccgctagcgtcatcgtagcttcgaagtgcctgatagtttttggtgctcgaagcaagcaaaagggagtacaaagtagcttgaagcctgcattcattgtcacatgctgattttctttccgaactatgttacacccaatcctataccatgccagattaagaaagccactagtagccaattctttccaagacatgatctcttaatgatttttactactaattgaagggaccgtctgttggtcgccagaaaaaaattgaatccgtcagtcaatttgtgtgagcattcgatctgcatccaacgggcgtgtgacaaagaaacaaagggagttagtgggcccgtagcactccttttgcggtcccattttggggtctgattttttattctccgtattgggcttttgtctttttctaggcaatgtgcaatgggcctgtatgatgttttattagtggaaaaaaaaatcaactttaactcccttaaagtaggctgaatctaactcgtatcccttaaccagaaaaccgggtagaacgaccctgagaaactggtataatttgactccttcgatggttttggagggcggtttcgctgacgtggcgctttaacccgatccaactggttgactctgtatgtgggacccacatgtcagtgtcacattttcttctcccttttttttttctctttttctcctctttctagcccggcagtgtgaggcggccggcaagtcggcagcggggctgtcgctgacggcatggcgttcaagcacgatgttctacgcagtaacagtgatgcaggggtggtcgcgacgagcccaccaccaccgagtccaccgccgaagcacgtctccggcctagagtagcatggctatggccgctgccgtcatggagcttgacatcgaggcacccatggcgtctaagagcatggtgcaagaggcgggaggacggaggcaccagcgcgtggagttgggtggtctcctcgagttcgaactcgtcctcatgtccccgttgtcaccgagctggtgaagaggagagcatgccaccaccgccctccctcgaggcccaccgccggagctacgatagtgctgttgcatgccattgtcagcgagt

SEQ ID NO: 6226 - DNA, 75141 bp, Oryza sativa
  unsure (1)..(75141): unsure at all n locations
ttttacaattgtattcctgtcagaatcatgtgttttttctattcctctgttttttcattcctacaattcaaaaggggccctaagtattgggttgatatacttccccctctgaaatatgaaatcaggtcttttactcctgaagttaaccaactcaaataagctccttaagtgatattttatgtggttttgccatgttaatgataacgtggtagcggtattgtttacatgacatgaagatcagtccactaaaccaaagttgatccaacagttttcttttctctcgctgattggcaagattatgaaatagcagtatatattagcacaaatgtatatcattctcaaaccgtttcacatgtgaaaaaaaattaattgagtctatcaccatgtcattagccacctaatgacatgtggctaaaaccaccgtcacgtcatcatgttcatagttaaacctcctaaaaaaccactcaagagggttattttagacagttttcatactttatgggggtaaaataccagatttcatgtttcaggggttaaggagaccaaccccatactttaggggtgaagaaaaaaattccattagttattagctaaaaagttaaagtatggattaatgtgattctttaaagcaatcttcttataaaaactttttataaaaaatacaccgtttattatttcgagaaacatacgcacggaagagataatagaatttgggaaaggatagattagaactcatcctaaggctgtgttcgggagtagcacgtataacgaagcaacatttagcgcatgattaattaagtattagctaaaataaatttgaaaagtggattaatatgattttttaagtcacttttatatagagaatttttgtaaaaagcatactgtttagcagtttgaaaagtgtgtgcgcatgaaaaaagtgataggtgagttaagaaagtagagataagaactcagcctaagtctaccacgggctgaaatagtaatgattagttgagatacttctaaacatgattatatttttcttaaaatagcattatcaaattgttactatcggattgctaaaattatgacgtcacattttcacttaatttcaatcacttttctttcattttaattgctccctcttctatatataaaaacaataaattgtgttcaatcccaattctcttatatacattgtatattataaaaattacaatattgaaacttacaattattacatcataagttttgaaatttatagcataattataatgtaaggtacataatttacacgtataaacaatctactccctccgtttaaggttataagacgttttgactttggtcaaaatcaaactgtttcaaatttgactaagtttatagataaatatagcgatatttataatactaaattagtgttcatcaaataaatattcgaatatatttttgtaataaatttggctaaggttgaaaatgtgactattttgtttttacaaacttggtcaaacataaagcagtttgactttgatcaaagtcaaaacgtcttataacctgaaacagagagaagtaactatttttatttaaaaatatggcatcataaatatatctactcccatcaaccgaaattattaattatggttggcaaagagaagataatatctcataaaaaaggacaaaattgcttatcaccattctatcctccactacgttctcatctaccacatttaattttatctttaactacttaataaaaataaaacttgtgttgtttagtccaccgtcacgcatgacgcgtcatagaaaaatcatgatatgttttttttttgtagaaatggatccacatgaaagaacaaaaagcatacaactacttaaaaaaaggcctccggaaaggatccactatttctcttgctgttatccaaaatcagatggaaattttcattcaactttttagatggtgtctttaataaggagatgacacacaaatgacgatgttgtcgagtccagaagaatcggatggttttcaccacctctcccctcttcacactagtattccatgcctttacatgccccaataattgcatcccatgcaaaaacaagcagacatgagtcactttttttttttagataatagacatgagtcacttatggatgatctagattgctgaacctcatttagtcatctgtggtcggtcttctcgatcataataggagctacttctctaaaggcacccgcaatagttatttataggctctctacaagatatccatgtcagcatatttttctacatagaagagattaaatgaagagagagagcaaaactatctactaacctggagatagtctatagagaaaaacgaggcaatgcattagagagctatagatacccatgtagacatactattgaggtggtttactattaatctagtttattgctgagatgtacatgttttatagagagcaccttattttaccattgcgggtgctctaatcgtcgtccctcgatgattgtcgacaatcaaaggtcctagtaaaaccatctagtagtggttgttcgacaaatgaaaaactaagagccacacgcaatgagaatggtgagccatcgatggagggtgcgttcgaacgtaccaattcggctgggttgaattccagctagcccatgaagctgatccaaatattgtgtttatgggctgaaaagaggatggtccaggattgtggatgtataacgacgtcaaggtccattaggtttccatcgcctgccataccccgtgttgaccagcggttcctcgttattcccattccttcgccacacacccttgcgactgctggtagttgaggaggcagaaggtaatggcaacctcccctacagatttgtgtccccgtcctccttttcttgtgcggctacgatagagccaatatgtgggcgacattgaaggctcgagcaggggtcttcactagctgcatcgggtagaagaaaagggatcaaatctcttccccgataaggaggagaaagatggtctgcgtagctgctgcttgaactagcattgtttactactagaaaaatcatttttctcgatgtggcggtcataacccttagagccaaataaccgcctacaaaaatataaatcggggtgaaatttaccgtccgcctgcggaccactttcgcaggcgccgcttaagtggtccgcctgcgaaaatagacttgaatataaatagatttggataggagtagatttttttctaagtttcaaaacctcacctctcctctcacccacggctggcctctcctcacctcacctctccacggccggcctctcccacgtagggatggcaatttccccgacgagggcgggtacccgccggggacccgaccctacggggccggggtcggggctatatttggccccgcgggtgcagcgggggtggggccccgaaaatatgcggggacgggggcgggtctaggttttcacccgcgggtgactcatggggacccggaaatatggtacatgcgtagattgcaaattaaaaatgtggcccaaacaagcccatgttgtgaaataacttttcctatcccatcttatctaccccagccatacatacagtcacggagccatccatccagatcgagtcaatgacctttcaaatcaaaagaataaaaaaagaaagatacagtcaacgagtagcgactgcatcggcgctaccgcagtcgttgcaagctgctgcgcctcgtcagctccctgcgaggctgcgcctctgcccaggccggctgctgcgcctccgtctcggccgcgggtcgccggccgttgcactttcgctgcgtctccgactgctgcaactccgccgcgtgtcgccggctgcttcgcctttgtcttcgtcgcgcgtcgccggcttctgcacctccgccaaatctccgcgatgctagcctcctcgatgagccacttcatcttagctgctacaatcctggttttgtcctcttttctctatagcttgtggggcctcggtcggggtcggggacccgtaggggttgggggcgggggaagcttttcacccgaagatggtaccggggccgggggcggaggataaagtcgggggtcgggggcagggccgttcctgtccaacccggccccgccccgccccgttgccatccctactcccacggcgggtacgcgcgcggggcggcacggaaagcggcggggcggctcccctccctccctccctcccagatccggccggaggagggaggggggaggccggcagtggcgactacggcggctacgacgcaggcggcggcggcgacgacgatgcggcccggcggcggctcccctcccccctccctcccagatatggccggaggagggaggggggaggccggcggcgacgacgacgacgcagggcggcggcgacgacgatgcggcccggcggcggctcccctcccccctccctcccacatctggccggaggagggaggggggaggccggcggcggcgacgacggcgcggggcggcggtgacgacgatgcggcccggcggcggctcccctccccctccctcccagatctagccggaggagggaggggggaggccggcggcggcgactacggtggctacggcgcggggcggcggcgacgacgacgcccggcgcagctcccctcccgcccggcgcggcgacgccagaggagggcggcggcggcgagccgccgcccgtgatattttttgtttatttgaatggattttcgcaggcgggttgttgccccgacgcgaaaatcgatgattttcacggtcgttgagctactggcggtccaactctccgcctgcaaaaatctattttggccgtctgggaaaatattttttctagtagtcgtttccgagatatttaaccatttgccacatttagatgtggcaattaactttttgtcactggacccacatatcatagacacatgtagacccacatgtcattgagataggggtggcaaatacaccctccgtcctataaaaaaccaacttctagggatgaatctggacaaatgtttgtccaattttatccccagaagttgtcttttttttttactgagggagtagttatttgccaaatctaaaagtggcaaatagttaaaagccctgtggtttccagcgactggtggagcaacctttctcacgtgtggttgttgctctgatgcggtctcgtgcaccatgtgagcggagattatatgagcggagattgtcccacctctagctttcaagggggcaccattagaaattggaggtccagacctcgcctattttagggccctctccggagctcccatggcaaacaaagacgtgaagcagaagcttgtgctggagcagtttgtttgccacagacgccggtccatctagtttgccttcatcttctgcctcgccaaaacgatgcgtgctagtggcagatttagaatcaagtaaggccctgtttagttcccctaaaatttttctcaaaaacatcacatcgaatctttggacacatacatgaaacattagatgtagataaataaaaaaaactaattacacaattagggaggaaatcgcgagacgaatcttttgagtctaattagtccatgattagctataagtgctacagtaactcacatgtgctaatgacgggttaattaggctcaaaagattcgtctcgcggtttctaggcgagttatgaaattagtttttttcgttcgtgtccgaaaaccccttccgacatccggtcaaacgtccgatgtaacacccaaaaatgttcatttcctcaactaaacacactctaaggggtcgtgctagtcgttgcaatttgatggcatctctggcgccactgcagaggatgatgtaaaggtagtaagtagcacatgcactcaccgccaacagtttgccagcttttccaccacctcactccggcaaacggttgctcattcgctcaattgggaggccttcttgacttcaagcaactaatgctgggtttaatttctaaaaaaaagttaaaagtttaaggaaagttggaagtttagaaaaaaagttaaaagtttatatgtgtatgtaagttttagatgtgatgtgatagaaagttgaaagtttagggtagttgagggtgaactaaacatggcctaaggtataacatgcattagttgtatcagtttttctacaccaatttttttttgctcgacttgggttgttagaaaaaaatgcaaaggagggagagtagtaagctacaggtgttggaagcttcatggatgacggcaatttgtttgcttcttctgtgaggaagaatagatcgataggaggagctaggtgggtcccggtagcagcgaggtgaacgcaagggccagtgtggtggggtcgtgggtgagtggagaggtgagtgcaacgagagcttgttgttctcgttcctgctatcatcgcccggcgagcaaagtggccggatttgaaagagaagcactggaaggataactcgagggcaatttgcaaaccaggggtactcaccgtcattttggaagtttcctctcccctaaacagccaaaaacatttaaatagtagcaaatattcactttttaccgatgcattccacaaaagattcactactgcggtgttctacagctagtacgtcacggtgttttatagcaaaatttgccaaaaaattgtcataattttaaaagtttaggggttgattcggtccaaatttaaacttgagagaaagttataaaaggaagattttttccctatgttacttagaaatttaattagaagattcattttaagaacgggttaattttcaggatcaggcttgacaagtctagcatttcccatgccgggtcccaaaaccttaattcatcccagcgcacacattcaggcatttgtttatttggcaaaaaaaaaattttgccctctgcatgtcacgtcggatatacggacacacatttgaaatattaaacgtagtttaataacaaaacaaattacagattttatcagaatactgcgagacgaatttattaagcctaattaattcgtcattagcaaatatttattgtagcaccattatcaaatcatggcgtaattaggcttaaaatattcgtctcgtgatttcttggtgaactgtgtaattaattttttatttacatttaatattctatatatgtattaaatattcgatgtggtagcgcgaaaaattttgttgaagagctaaacaggtccgtcctcagtcttacaacggtcaaccactcaacccaagctccaatgatgcgacctcaacccaaagctctcgacggttgaggaacaacgtggttgtcgctcattttcctcccgtacgttccagctagctcaggtcaaagctgtcaaacctactataaataattctcgttgattagccttggcggccaagtagacgatcacaacgaacgagaccgtggctgccaagcaacctcaacctcccggccggcacgggcgcagactataaatgcgccgctggccgcgcctgcacctacaccaaacctacagcaaactgagcgaggagcagagccatgcgtcgcgaggggaggcagcgcgggtgggtgtgcgtgtacgaccgcgccctggtcgaccccgaggggaagcgccgcgtggtgggcgcggtggcggcgccggcgacggtggccaacggcgggttcatcagggcgccgcggaagccaaccaaccactccaagttcaccggcggccgcgccttcagggagctcgccagcggcaagggcgcctgcagcggcgggccggcagcgtcgacgacgggtggtaaagggaggcacaagttcaagcacgacgagatcaaggcgtactacctcgaactcgaagccggcgctgatgatgctgtcgatgagctaggatcgctatgagtgacatggattcgtggaggcagatggcatgcatcaccggaacggcggcacggcggcatgcagctgccaccgtcgataggagaattgcagcggcggcgctaattgacatggcagtttcctgttttggtgtgtatgtgtgtgagtgtgagtgaaactgtgttgtgaatgtggatctttttagtttggtgtttcgttgaataattgaactttctcgccacaaatgagtttgaattcaggtcctatcacatcggatgtttagacactaattagaagtattaaatatagactaataacaaaacccatttcataatcctaaactaattcacgagacgaatatattgagcctaattaattcatgattagcatatgtgatgctacattaaacatgtgttaattatagattaattagtcttaaaaatttgtctcgcgaattaactctcatttatgcaattagttttattattagtctacgtttaatacttctaattagtattcaaacatccgatatgacatagactaaaatttagtcactggatccaaacaccacctaaatgtttgtatgtgcatttcgtactccaaaatgttgttcattcaaaaaaaaaactccatgtttcttattataagtcatttttttaaaatttgactaaatttataaagcgactaatattaatatgaaatggaggcagtaatagacattttggcttcaagacgattgccatgagccacatgaaaataaaacagaattgctaaacacattcgagtgaacatcgagggcaaaatcttgcaaatttcttaccttaagatttgctttgcgattcatgatgtgatgagcttctccctttgtacgtcttcgtgaccctgaagaactccaatgacagcgacagctacgaccccaaaccagataggctttagggttgggggtgggttagaagggagcggaggaagatggggttttcctaggtttagtgggaaggttgtgggcagcgaaggaccgatggtgggtggtagacataagcgggtggtgccgaagcgtcgggagcgatggggatggatgggggtgtttggctgccattggaggtggggacaagggaaatgagagggcttaggaagcaggggagccctcacagatggttcaaaaatttggaatgaaaatttgagtctatcacccccccccctttccaaaaaaaaaaaaacctgaaatgattcacccggttttgtgtgttgtagcagggggcaaatgccatcccccccccccccctcctattcgaccgaaacatggcaacggttttcagcttgatgcattttgttccaaggtaaatgctttttgagtctttgtgattggtaaacagaagacgcccgagaggttcaacatggagaccttcagttccttttgttgtctcattgaataaagggtaaattgaaaccatgctattataattttgcaaagtttgaataaattgaactttgctgcctcttgtgcaaatggcatcgcctgtaattgtactccagatgtttttttgatctcaaagtaatgttgaaatttcaatcatgccagttcaaagggaaatttactagtgttttaacatttcgtcttttttttttcttttggaaagcgccaaagtgttttttattcctgctgcattaaaacacgttgtgttcttcaaacagcacgtaatatttcggtactgaatccaaaagtagagccgacaataagcaagaccacggatcaaaaggacattggggaccaattactcgcagcaagaactacgataagacaccatgcaatacgaaggtgaaatcatgattccctctattgtcatgctcgcaagtcacaggaccataaaaagaggcaacaaaagggccttaggtaaagaaaaattataccgatacattactgcaactcctcccgaattttcaacatcatacacactacatcgcatgcagggaacatgtgccgctaccaagagaccgacaaaacctcattcctcccaatgacaagttactcggatatattcattggaggttcaaggctctcgacaagaatgcgcaggtctaaatccttatcctcaaacttcttgatgaaaggatgattctgcaagaatatatatgacagttcagaacaagatggtcgaaagatgttattacagttaagttcgctacaaaaattattaaatagaaggcaatgctgaccaagagttctgaagcagacatccgctccgcaggatccttttgtatgctgcaaagcaatgtaacaataaataagattagactatgataagctgatgaaatgaatctttaatgataagttggaagaaactgttatttaccctcaagccatgcttgtatccttatagattagtcatgaaatcagatataggagcacacaagacactgttatttgcatgcataatttgacttaagcaaagaagttcaaaagtacttctgtaaacaacaatctgacagcaacgcaaattgatactagtcatgatgtgggacactgggccagggtgggtatactactgtttagtccgtaactatctcacagcaaaggttttattaatctggaaaacacctagatattttgctgccctttaaataacttgatttgcaatcaccctagaaactaattgataaaatgccaccaattagatgtgcttgatctagaatattgctattttgtacctaattgcatctaccttttttttttacacaatccccaccacaagttctcattttgcccttcttactccatcatctgacctcaagtttccacccctcttcaattcagagatgccagcaatagcctaaactgccttccacacccatagcgccgcatacccccaccatctacttttgtctggatttgctgcagctagggctccagctccccagcaccatggcctcttccatcgactcattggagagctcctctgacctaaccaagtgcatcaagctcacctggcttatctcctgtgatttcatcacattgatgactacttttgtctggatttgattcctttgtggtaagaacgagcaatattacttggtgcaagattctttcttgggttttagtcattcagatccattataacctttaattgcttggtgcaaaattcttgctcatgcttctgttctagatacagaaagcttgccaagttctacaagttggagctccagatcagctttttgtcaataagtaccactaacgtttgagggtgaccatggacactgaaagatttgctgacttctgacctccagctttctcccttatcttcatcaaatcagttattccacttgttcttttgaagcatagcattgaacaagagcaaaataggaaaggagatgcaattaagttcaaagaggcaattggtaaaccaacaccatctaaagggtggcaagaaatcaattaggttccagagtgtggcaaatactagactcaccatctaaagagtggtacatgatcaattaggtgaggcagcagctgtgacagtagcccctggacacctcagtgctcaagcaatgatgaagttaagaccttaatagactacatgcatctcgtttaggactaatacaatttttaatatggccatgtaggtatcacgttaaaatgctaagaactatggtctacaaaagtaaaccaaaggttgcttgctcaaacccactgctacatgttttgcccactgagccattggctgcaaagttacactttaagcctcttggtatgcaaagtgatctgacaaaattgcaggaagttacaactttccagtggataacattgcaggatcgactgcaatataaaaggttgtagaaaatttttaaaaaaaaggattgtggatttcactaattgtgtccatcaacttcttcatgatcacaaatgctaacaataaagctaagcatattcaaaggttaacaaaaggaacactttggtacagaaaatacatcaacttcctggaagagggaattgctacacatatatacaagttacaaatagcgttctcaataattccaaacatttcttttgcagttccagttttttttttttttggactcacacacaaaagactaacaagactttgaaatatagagcaaaacagccaaagtagtatgcaggggaatactcaggaaagcagtaataaaagctaatttcatgtgtaatttcagagagatgattatcataccaggaggagataaatgcacaaaattctggagagaactggtccgctggtgcagagggtggtggctggtcaacaattgcttctaataattcgtagaagcttaaccaaccttccccttctgaaggtatataggggaaccgaccaatggcacactcgagtattactaagcccaaactccatatgtcactcttgtagtcataggagcttccactaatacgctcaggctgaactaggaagaaaggtagaaactatgagaacaaatttatgaattccagatcagatcactgtcttgaacatagactaaggggtacataaataaagcaggtcattatttcaacataccgccatatagttgtaggttccaacaaacgtatcccgctgacccattgaacttgctagcaccgcacttaccccaaaatcggtaatctttacttcacctttacggttaactaacaagttagatggctttatatccctgtgaatcacatgcctttcatgatgaagatacagtagaccctccaaaacctgagttgtcaaaatatcatgcaatgtttttttacgttagaatactttttcaactggatagatgcgacaaaattccaagcttattccgaaaacagggaaagttagaaataaaaggctaagtttatgctaacctgtttgcaaagtactgccaggtatggctccagaattgttttgacttgtttaatgatatctgcaagagatccacggtccatgtattctagaacaagatatattacaccattatggtagaaagattggtggcaaaggactatatgtgcgttctgtgttgcttgatttattttgagctcttgtactatttgtttgcgaactgcctcttgaatgttcatttgtatgccctgtggacagaattgcaatgctagttaattaaatgccacagcagtatgaataccagggacaatgcacagaattcttgattgatctgaacatcataacatgatgttcttcattagcatcaatattaattgaaaatcagagttcaatgtagatattgcatgcaacacgtaagctgacgacagatgcttctgctacaccatttatgtagaatgccccacctaatttcaacagggaacatactaataggtgccaacactaccaaattgattaaaaaatcaatcaaatgctatgatgcagaataatctgattatgataaacatgttcaaaatggaactgagagattgacttccagctttccatgattacaaacataaagatagagaaacagttcaactgaaggactcgcagcctgatgcagccacaagatatacattttccatttaagaattagtgtggaacactagatggattttgtgtaatggaaattaccttcaaggcatataatgtccccacccacttgtgccgaactagttggacgataccaccactccccttaccaatgacttgaatcatctcaaggtcatccattgacaactgaacatcttccaccttcaggtttgttgactgctggaagacataaagatgaaacagaaattgagaaatgtgaacaatgttatatccatggataaactctgaaatgtttacacaatgattccttagcactattgcagcacataatacattgcgagaatgcatgagtggcatggatcccatgcattgcaagtgagtattgcattcaatcagccaaatgaaaatcaacagaagcatgataaggtttgactgaactagtcaacctgtacatgtgcttctacactaacctacatgtcaccataaggagtacgataaagcagtttacatgaacccagtagggagatatgaacaaacaaaaaaagtagccatggcaccaggaactcacaggttcatctgcagtttcctcggatataagctgcaaacctctttgattaagccgcagttcaccatccttgaatgtaccactcgcggtcctaaaggagcaccagcgatcagtgacagctattaaattttaccacgaactcccgaaacataaatcaacgattaggctgatggataaacaaaataacaaacgatctggaaccacgaatagcatttcagccactctaagtgaggattgaagagtcagttcagcaactcagatcatagatatttcaagcaaaagatcagttagacagtataagtagacctacgcttctgtaaatcttatctccatctcagttcataactaaccccaaaatcacagtaagacactatgcaagacaattcgatctgaactccaaaatcgtcaacaaataactaaaaaaaaacacagaagcccttctataccagaggcaaaacctcgaaagttcatgacacccgatcgctccaaaggagaacacacaaaggaaaacgaaatcaagtgacagtaaaaaaaaaaagaaaaaaaagagcacgtttcaggcccagggaaccgagggagggggaccctacaggaacttgtcgacgggcgtctcctgcgcaggcacggagagcttgagctccttgtgcggcttcttccccctcatggcctccccctcctcctcctctccggttagggtttatccgccggtaagagacgggggaccgaagcgcgagcgagaggcctatcccggcacggatctgccccgcggcggctcgagtaatcagccgggagtggcgggacgcggcgggagggagggaggaagcagcccgcggcggcgagggagggaggaaggagaggtgaagtggcgtcggaagaagcgaagaaggaaggaaggaaggagagcgtgtggggaagggagtgggatgggaagagaaagaaagatgctgacgatggggaggggggttgctctgtgggaacgcacgagttggaaaaatcaaaaaacttgcggggcccgcctacgtatgcggctgattctgggacacggtcatctcgtcttcgcaggcaatgaccttgggcacttaccgttattcccttcattctcgattcttgaccttgacattcccattctttcaactacacatatatatggtgtgttttgcgaaaagagaaatttataggtgtcacattaaacgttgatcggatatcggaaggggtttttagatacgaataaaaaaattaatttaataacttgcctggaaaccgcgggatgaatttattaaacctaattaatccgtcattagcacgtgtgtgttgctgtagcacttatggctaatcatggacaaattaggctcaaaagatttgtcttgtgatttctatgcaaactgtgcaattaatttttttatctatatttaatgttccatgcatatgtcctaatattcgatgtgacgtttttaggaaaaaaaattgagaactaaaaaaggccatatatgactcaccaaacaacatatttgtgaagggaagataatttataaataaaatttttatatacgtgttcttagcgatctaaaagcaaaaactgaaaaataaactacgataaaaaaacttcaaaatcaactctaaatttaagattgaaaattcaaattttggcttataagcataatcatgaggctgatacttccgaatacaagaatcattttacggctttgctattttgcactcgcatgaaaattcgtaatccatctccctctggtcgtgaattctgcttcaagatctgtgcacactatcggactagtgtggaaggtttttctacatggacagttcttcagcaggcctttttttcccaagcccatggccttaccctatcggaaagtcctttttttttaattggatccatgccactaaaaatatgccaattcaaaaaaaaatactactattatttactactatttaacatatcggttgtgtgccactgaaatttaaaaaaattggaaccatactactccatcacgaaattccgtctctctccttccctcttcctctcttagcaggttagtgttgctgatacggtggcgcgtggttggtgcgacggcagatgacaggaggtcgatggcgacgacgactcctgagccctcctaccgccacccgcaccagcccaaagacaaacctgccaataaaagcgctatggtggtgcttggtgtggcgtggcagggaggaggtctcgacggcgctgtcgcagttggtgccgacgatcttctctatgtccatgaaggtggagaagaggtcgtcctcggagtcgatgtcgtcgaagccatcgccatccgcgctgccgacgaggcccaagttatccgggaagcggaaggctgcctcagatctggcgtggcgacaagggcagtggcaaccacggccggctgcgtgggcccgtcacgccgctaccaccgccagggatgggtttgtcgcgcatgtacgccaccactgtctcctcgggaagctcatcgttggagcccctgtgcacgatgttgaacagtcgcggcgcctgcagtggcgccttcgccattcccgctgcgcctccttctcctcccccgaccaacgatcgtgcccccgcgacatcgcagtgcacaagacaagcaccatcgttgccgtggcccctgcacccgacgatggtggtggagaatgagaagcgtcgctggagggagagaccggagagaggtagggaaaagagaagagaggggagggaagtgaagaagatgaaactgacagctaggtccctcatgcagttgaggttaacggagattttcgacatatttttgacagattcgtaaccgcgtgccacacacattttgcaaaattggaaaccatgccactgccatcacattttccatccgtcttcttccttctctcttctcatcttcttgctttgcgagcgtcagacatcggtagttttgtgacgattgcggcagtcagcctccgcggctgtgaggaggtcagcgcgagggctctggcaacggcgagggagagaggcaggaggggttggcagagagcgcggtcacccaacgggctgacacgggggatgtggcctccagatctaaagaggagacaaggagctagagagagaagagaaagggacaggggtggagagtggaggggggcaccaccggcgatggaagggagcgtaggtgacaaatggtagcgacggtggtggaggaggaggagcgacgacggtggctgtgaggaagtcggcccgaaggtgggagcgacggcggcaaccagcggcggtggtggagggggaggaggagcgatgggggcggagggagcaaacgactcaaccgggctgcaccgcccgcccttgtgtgcgccatgaccgtttgccaccaccccgtctccggtcgctctggcctcgacttcaacaccgggtgaggaggcaggagaggatggtgatgcgtatcgggttaaggagggaggagcggatgagatggattgctagggaggctgagaggtggtggagagagatgggaaaaacaagagggaaggatggaggaaaaagatgaatctgataggtgagacccacatgcagatgagaaagaagatagaaaatgtgacggcagtggcacggtagtgacagcaaagatgttggccatcgagatcttctgcgattacttcacatcatagttcttcctttcagccttgatcacacacagaaaatcctaaacgcatgtaaacctgtacacaaatatgacacaatgcatgtgaccgaataaaatttgtgcaaacttattaactttggtcaattaacactctaattgcatttggtcaattaacactaattgcttatcagtacgaaaaccatcagaagctgactaaccaaatcacagtgaaccaatatttatcatttggctaattgtttggctaataaccgaattgtgcaaattaaactctcacggctatgtatcaaatttggctcagtgtgattactatattggatgcgtgtaatacatgcaacgagttcctctttattaatgtataatatggtttcggggaactgctggtttcattttgcattttagacttcacacaacttgcagcagcctcttacgagacaaggcagtattttttttcaacaaaactagaccaaaaccacatataaaaaaagcacagagaaattaaaagtatgccgaatctaattcgtacccttatcagaaaatcaagtaggatggctcccataactattgaaatcggtgtaatttaaccctctcagcggttttggagaacggtttcactgacgtgatgtttcaacccgatccaaccgactggctcaacatgtgggacccacgtatcatagtcacattttttttcttccttctctttctctttgtttcttcttttacccaccatggcgacacatggcccaaggaggagctgcagctaggccgccctgatgcgtagcgatgacgctgcctcgaggtgacgctacatcagcctcccctccagccagcgccaccgccgctgctcatcttcgtgttggggagaggggagaggcgacggcaaagcaaaagcagcgctcatcgatgtcgtcgaggttagggccgaggtcgttgagagaggcaatgcgaacatcccaaggtggagaggtcggctcctccctgttgagcgacggaaacagaggggtggtccggtggagcgaagaggagctggtcggcggtggcccaaaccgacggacggggacagggtcagcttggagcagagatccaagaggcgctcctcctgttgtgtcgagatcgataggggtggatcgcggtggaggtcgcggaagccggcgggggcggcacacgtcctttcttctctcaccgcaagcatcttcccccttccattctatccccgtgtcccgttgcccatgtcggcgaggtgctaggagctcgagcttcgactcgctgacaatggcatgcaacagcactatcgtagctccggcggtgggcctcgagggagggcggtggtggcatgctctcctcttcaccagctcggtgacaacggggacatgaggacgagttcgaactcgaggagaccacccaactccacgcgctggtgcctccgtcctcccgcctcttgcgccatgctcttagacgccatgggtgcctcgatgtcaagctccatgacggcagcggccatagccatgctactctaggccggagacgtgcttcggcggtggactcggtggtggtgggctcgtcgcgaccacccctgcatcactgttactgcgtagaacatcgtgcttgaacgccatgccgtcagcgacagccccgctgccgacttgccggccgcctcacactgccgggctagaaagaggagaaaaagagaaaaaaaaaagggagaagaaaatgtgacactgacatgtgggtcccacatacagagtcaaccagttggatcgggttaaagcgccacgtcagcgaaaccgccctccaaaaccatcgaaggagtcaaattataccagtttctcagggtcgttctacccggttttctggttaagggatacgagttagattcagcctactttaagggagttaaagttgatttttttttccactaataaaacatcatacaggcccattgcacattgcctagaaaaagacaaaagcccaatacggagaataaaaaatcagaccccaaaatgggaccgcaaaaggagtgctacgggcccactaactccctttgtttctttgtcacacgcccgttggatgcagatcgaatgctcacacaaattgactgacggattcaatttttttctggcgaccaacagacggtcccttcaattagtagtaaaaatcattaagagatcatgtcttggaaagaattggctactagtggctttcttaatctggcatggtataggattgggtgtaacatagttcggaaagaaaatcagcatgtgacaatgaatgcaggcttcaagctactttgtactcccttttgcttgcttcgagcaccaaaaactatcaggcacttcgaagctacgatgacgctagcggaaaagttctcattggaacggactatcaatccaacaaaagagttcgctcaccattgagtctgagaagtgatttttgtttgccctacgaaaaacattttacctagaaaaacagttatttgaaggctcctatttttgacgctcgatggtgcatctaggaagatgtaaaggggagccatctctagtgctatggttccttaagtaccctaagaaaacgttctaaaattattagagatccctaaaccaatggatccatcaaacatgtattttgcaagaggcatggatgagttagataatgtttagttgtttcctgaaaacacattgccatttgtgagatggttgctagttgctacattgctctgggcccatagctacttgttgctttgcttaattcgattacaatcatttttttaaggaaacccgattacaatcactggtggtatcttgttgtccttcatttttaatccataatttttgattgcaaattacccgccgagtagaaaccgtgataaggttctttttctcaggctattcatgatttgcgttcatgacatggttcaacaaaatgatactcatactctcctagactgtctaacaaattacgatttggccctctctactgttccctagcagcagaaaccacgattggtttgtcattcgggttgagctcggacctcctgcgcaatttcgattgacagggctgttgttaaagttcctcagattcaatgacaaacctcgtggggattctttgttgagtccggtgatgcttacaccaatatcttcggctcagcaatcaacctcaatctggtgccattcccgtggaggtaactgaaggggattaacggtttgtcaagcggtgtgcacttctcatgaggcccatggcagcagtcgacacaattttaagacgtcgtggctttgcagtagtcatggctcactgcagctccctgtcggcttgctcctttttctgctgttcggtttcatctggaaggctgcttccatagttcggttcaccctctcttttcagggttgtcacttttgctttcaatttctatctttggttgtgtactggggtttatcccttaactctgttcttgcttaataaagtcatttgtgtttaaaaaaaacaaatttcaagtaaatatgaattacaaaaatgtatctgttatgagttatcgaaagcatataccagtgctcaggcgaatgaatggtgttaatggttagtaatttctgaatacaaataaacttcctaccactgaatacaaatctccttcaaccctacttccctccaaacttgtttagctgcgccctgcctcaccttccctgaactcctgcggctggtcgtcgttgacgacgctggtagtatttaccgtaacgagagtccacaacaattggcttctctcgacgttgacgacactggtagtatctctcgtaactagagtccacaacaattggcttctctgatcttctgtagtttcttccaagagaagtactaagctgttccacaccacccatgtaacgagctttcctctccattgccttgtggagagcactctcatatctttcccctcttcttttttccaaacgtgacatgctccttttcgaaactgggacttcaggccccttcatgatctgattcgatcattgtgaaaatatgcagagttgtaatgctttgagtaacaattttgacagagaaacaaatcaggcagcaattgctaaatacctcaggtttttcagctactgactggttttgtgcttcagtagacctgactaatttcaggtctgctgttaccaccaaggtctccgcttcagcagccatagcttgttgtgcgtccagtgggccatgtggttccaataccaaatccaatgggccctgcatgcatatgtagttactagttacagattatcagaacaacacaaatttcacaaaggaaactctgaagctgatctttacctctgaattcacaacatcagttctctctgcagcaagattaacatgtttcatcatgttctgagtagcgatcatctgaagcggctccacatattctgcagattgtaaaggaatagccaaatccgctggttgaacctctgtagggtatacaaataagctaaacaatgatttttgtacggttgagcatcaatataatacaggaaaacagcatactattccattcttaactacttgactctcagtcatacatccagccttcccctcctactgccactgtataccgtactgaacttggcactaacattactaccatgtaataagtttctctagtgctttaacaccatgggaatcacaagaacattgctgaaaactactacatctgtcccataataattgtatttctaggatttgaatttgtcccaaaataattgtcacaatagagtactaataggtctcattaatcacttctcatttaatctttttctattttaccctccactacccttccactcttacctatacaccatttaataaggggcatcatagtatttcttctcaaaccttaatatatactccctccgtactcgtaaaggaagtcatttaggacagcgacacggtctccaaaacacaactttgatttcttgtttctataaaaatatttattgaaaagtgatatatgtatacttttataaaagtatttttcaagacaaatctattcatataatttttacattttcaaactcaacaacttgagagttattcatgatttatattcccaaggtttgacttaaacattgtcctaaacaacttcctttatgagtacggagggagtactaaacaaactagaattgcaatttatatgggacggaggtagtatataagaacaagggaggaggacattcaagcaagctgcatcttgtctgacacctcaagaaaaggtcactgtggtttaaggtgcattggatcagcatcgagtggatattttttgtttagcaaaatgatgaaaatgaatcaaccttgaccttgacttaggccaaaccaactgaaatgcaacaaaacaataacgtcaatttttcgttagtgtgatgcctactttttgttagccactaaaaaatgaccacataaatcttatgagatgtctaaacagctgtgtgggtagcatttttatgagacatctaaattactttccaaaacaatagatgcctaattgaacccagtatgcctaccatgaaatgcggccattggcaggtctccatctaaagtctaaacatgactttacaaaaaacatgtacatgttcttcataactaatagttcggattaaacagataaaattagccaatttgtagttctgtcagttcagttcaggaagcatgaaaccaaagagttataattcagtttaattctttaagaattaaatccaaaagttgctgttgaagtgattggaatgctcgccctctaccaacacagtgaccaaaactacactagcaatcaattaagatcaactcacttctcatagcaagttatccacagtaagttccaactcgtagtctaaagaagcaatccactcatatatttggaagtacctaagtgatgtgtgaaagacttaccgctatcgaccaacaaagcgggtggccatggcgtttggaaaagataagtctcgccgctgcacctaaactcagccatgaccttcatattcttcaggtcaatggcaaattgaggatagcggtcatcccaggaaacaagaaccaatccactagccactgttcggacttgtcgcaccagggaatgcctgtcaagcacttcactaaccggcatttccttctccaattcccacctcctgccaccaccgtcctcctccatgagcagccacacttgcatgtggacgttgtccatggtgccatcaaggcatacaaggcagcacacgccatcctccatctcccctatggcgtacttggaaggctggaacaagcttacagggagactgagcatggagaattccatcgtgagcgtgtcaagcaatatcacaaaattgtcctcgcatttccagaagataatccccgccgcatgcatcgcctggccccggcgaggccgcctcatgttttccacccacgggtggaagctccactctcgagtaccggagttgtactccgcggcgcgcatcctccggccatggcgctgcacggacaccacgcggaacgacgccgcgccgttgtcgccgcgcccgtgcagcaagcagtcggcaatgtaggcgtccgagaaggggtcgtcctgtgggcggcggatggagacgcgccggcgggacaccgggtcgtagacggcgacggatctacctccgcagaggagcaggcggccgttgcggcagtcccggagttgccagcggggatcctcgccgtccccgacgcggatgagcgagaagtcgcccccgagtaccgcggcgccgaggtcggggtcggagcggacggtcgcggcggggtggaacacggggaggccggagctcccgtgggagacgaacaggccgaggagaggcgacgaggtgtggcgggcgcggaatcggcggaggaagtcggggccggaggcgacggcgagccagcacttggaggctagcgcggcgcgttggagggaggccgccgacgggaggcggagaaggatctcggcgaggaggtcgtcggtaaatggctgcaatgccatccggatccggaggagtgggggcggcggccggcgcgctacgggaagaggccggaggagacgggaggggcgcggagttcaccggagtggcgaatagcaaggcagaggcccgcgacacatactgacgcacgacgcaggtcgccgccgcccgccggtgaacccccaaaggaacggtgggattggaccgttgagcagtgaggtgagcacttttcacttcgcacgagtccttgtcttcggtcgcctttcctttttttttttaacgaaccgcgtgatgcgaggttccatattaataacagaaataaattactccacaaatgtaaaaaaaaacaagaaaaaattattatctagattacctcaataaatacaatgaaagcagccaatgatactagagatattacagttgaggattaaacaaacaaaatttaagggagacgggtgtgctacttaattgcattgcatgcatacatgcgtgttttttttattatgaaacataagaaaaatagttgtcttatattttagtataaacattaaaaaaataatggttatgtcttatattttgggataggggagtagtagaaaaatgattataatagcttggaaggttataataaaaggaaaaaacaatacgtcatgttgcattcctacaacacattgctcactgttgagggacaaatagataaaaacacgtcagtacgtcaaccaaaatgcacttaaatttatccatgctattgtatggagagggagagggcaattgataaggatggagccgctcttccccgtgcaaaaccgccaatatggccatcttgagaagagcggcgcgggcggcggcgtcgggcgctggggcctgggggagagccgcgcgagcgaccggtgttgagggctggcggcgactcgtgtgggattggggatgaggagtagagctagggttttgatgcatatatggcccttcaagcacatatgggccacaagtccacaacagcatgggctagctacctcagctcattaaggctcgcgagcagctcgcgagccagttcgagctggctcgttatctctaacgagttaaaaggccagctcggctcgttagaaaaatgaaacgagccgagctgagcttggcgcgagtcaagcgagctaacaagccacgagcttttcgtccaggccttttgatgggtgagatagctgggcatggtttgggtggcttggacaccaagcgtccgtggtgatcacgagttcacgacaaggaacaacgtcaggaggagatgaggagattggatcttgtatttgcttgattaggaatgacactgtcgagctccttaaatatactatatatatagagagtatatgtttgaaagttttcaattaaataacttgctataatatttttagatagtcccaaaattttccctattacctccgtcttaaaatatagctatttctagcacaataccttatcccaaaataaaactatttcttcacctacctcctcctctcaaccaatcacaaccattctccttcacctacccatgacacattaatcaataatacacttcctccaatcattctcacatacttttttaatatccgtgtcaacctaaaaaatatctacattttaggatagaggaagtaatacattatcaacaactgcaaaattaacaccatacgaatgtgctttcgaatgcgaatacgatgatatcatatgcatgccactagatatatatatatatatatatatatatatatagttagttagttagttagtttaattattataaaaatgatgcaaatgttgctttttttcctaatattataggcgccttagaatagagggaatagacactacttttattattaaaatgaccaaaacgtcgaaggagggattttatattagacaaattttgcgacagcacactgctattgtgtggttttagccgtaggacaccgcccgaatatacttttgggagaagacactccataaacgtggtaatttatcaatggacaccgcgccgattagaataataattcctggttgaagagtagacagaaatcacgtgaaagttctaaaatacccttgagtccacatgtcatatatttctaacatctctcttctctctatcccctcccacgcttccatagccgatgcctcaccgatgacgccatgcctcaccaaggacgggggagtcgagcagctcggtggggctgagccccagtgggatggcgaagtaggacgacggcgacactggtggcggcgagagcggcaggcttggtggctgtgcggacttgaacttgggcaccgaccaccagagccaccgcgccacgaggaggtgttctccaatggcctcaacatcccggacatcatcaacgagcacctcggcgccgagccgaccctcccttacctcagcccggaccttcgtggcgccaagctcctcgtcggcgccaacttcgcctccgctagcgtcggcatcctcaacgacaccggcatccagttcgtgagtgccactgactgatcactgatcgatcgcggtcggtgagatgcgttcatggcgttcatggcggtgttcttgcaggtgaacatcgtgaggatgagcaggcagctgcagttctttgcggagtaccacaggagaggctacgcgcgctggtcggcacggcgagggcacggcggatcgtgaacggcgtgctcgtgctcatcaccctcggcggcaacgacttcatgaccaactactacctcgtccctttctcccttcgctcccagcagttcgccctccccgactacgtccgcttcctcatctccgagtacaagaaaatcctccaggtctgttagactaagcctgtcacatttagctggttagttattcatttgtttgtgcatccgtggcaggtcattggattctgtcacgagttagtttctcttttacatgttgcatgagccagaggcgcgcagagttcgcgtcatggccgagagtgcgtgtgtgtgtgactcgccgagaatgcagcgttgatcagcacttcgtgggatggcgcggaggaagtggtcatagcggctgaataggtgaagctgttagtttgttatgcatgtaatcgttggagaataaatgagataaaaaaaccagaaaagctgcaagacgttgcgcggcaccaaaaacctgtgttcttgtgttcatctctgttcgttttgctttcacgcgcgtctacacttttgtttttcctgtgtttatccaagtgatcgcgtgtgtgagggttttgccacaacaagtggtatcagagcctgagtttaacatgtcttccgacagcgacagtggccgctacactcctccggggcggcgtggcgccggcggcggcggcggcagcggcagtggcagcaagcagggcggtggttcaggcactggcactgatggtgctgaagtccccatcgtccaacaaccagcaccgagggatcctagcgtagccgtgcgctatccggtgctgacgagaaccaactatgccgaatgggcaatgttgatgagggtcagcctcctggcacaaggtgtttggggagcagttgatccgggctatgctgagttcaaggaagatcgggtcgcactagcagccattttgcaagctgtctcaaaggagatgctacgaccgttagcaaagaaggactccgcaaaggccgcttgggatgccatcaaactcatgcgagtgggtgttgatcgtgttcgtgaggcgaaggaacaggcgttccgtcagcaatacgaagcaatgcgcttcaaggtaggagaaactgcggaggagttcagcttgaggctaacatcggtggtcacggacatccgtgacatgggtggcgtgcttgatgatgagcatatgatcaaaaaattcctacgtgttgttccaaaaaggtacaagcaggtggcagtcgcacttgaacaattccttgatctgaagacaatgccaatcgaggagcttgtcgggaggttgtcgaccgccgaaagggatgataacgtggacgacgacgatgatgcgccacgcggaaatcgtctctatctcaccgaggaggagtgcttggcccgcatgaaactgaaggaccacgatgggtcctcgagcgggtcgaagagcggtggcggcggtgagaaaagccgtcatgacaagccgtgcagcggtgggcgtggtgaccgcggccacgacaacaaaagcggcggtggatcatcgtcgaccagaacgtgggataggtccaaggtaaagtgcttcaattgtgataaacttgggcactattccaaggaatgtcgcaagcctcgccgcgagtggcgggaggaggcaaacctggtgcaggttgagaatgaacagccggcgctgcttttcaccgaagtgcaccagacggtgttcctcaacgaggaacgcgtgattccgaaggagatgcctgatgatgtctggtattttgatactggcgctagcaaccacatgattgggaaccgagcgatgtttgcatcgcttgacgagaaggtgactgggactgtccgcttcggcgacaactccgtggtcgagatccagggcatgggcgccgtcacgttccagtgcaaaaatggtgagcaccgtgccctgacggaggtgtactacatccctcgcctgcgtagcaacataatcagcctcgggcagcttgaggaaggaggatgcagaggtgtccttgaaaacgccgcactaacgctgttcgacgcagagcgtcagctgcttgcgtgggtgccacgcaaaaacaggatgtataccctgtccctgaaactggccacgcctgtgtgcctgctgacgaaggcagatgatgaagcatggcggtggcacgagcggtttggacatctcaatttccgctcattgcgtgatatgagtctgaagcatatggttgaaggcatgccactggtgaaccacgtcgagcagttctgtcaggggtgctcccttggcaagcaccacagggctccgttcccgcgcgcgtctgcattccgcgcggagcgagggttcgaattagttcacggcgacttgtgtggaccaatcacgccgacaacaactactggtaaacgctattttcttttgatcgttgatgattattctcggtacatgtgggtcgagatgctcaggagcaaagatgaagcgttcaagtgtttcaagaaaatcaaggcagcagctgagaacgagcttgacgtgaagctcaaagctttccgcactgatcgtggaggagaattcaactccaatgagtttaccagctattgtgtcgagctgggcattcgtcgggacaccacggcgccgtatacaccccagcaaaacggggtggttgagcggcggaataggacggtggtggagatggctcgaagcatgttgaagagcaagggcgtgccggcacatttctgggcggaggctgtcaagacggcggtgcacgtcctgaaccgtgcgcccacgcgcgctctcgacggcatgacgccctatgaggcgttgtatcgtcggaaacccaaggtacattatctgcgtacttttggatgtgctgctcttgtgaaaaaggttgggcctggggtgtcgaagctatccgatcgctccatcccaggcgtgttcatcggctatgaagacaatgccaaggcatatcgggtttatgatccggttgcaaagaagttgtatgtgtcacgtgatgtggtgtttgaggaggagaagaagtggaactgggaaaccaatactggcagacaagatcctgactggtctggcacgttcactgttgtgtatactcccagggacatgggagacagcttgggatccaacggaggcacccaagaggtgtccgacgcaccggggcagcagtcgccggctacaccggagcggccgccgccggccacgccatccatgccgaccacctcgactggtgtggagtttgtcagtccgccgatgggaggttcgtgtgactcggaagggatgccactccgttaccgttcgctggaaaatcttcaacagacgacgctgccggtcgatgacacggtgatgtcggacgtcaacgacttcagcgggttttgcctcgtggctgccgaggagccagacagcgtggaacgtgcgctggccgaacccaattggcggcgtgcaatggaggacgagatgagctccatccgtggaaatgaaacctgggagtttgcaaggcttccagaagggcatcgagccattgggcttaagtgggtttttaaagtaaaacgagaccctgctggtaacatcgtcaagtacaaggcacgactagtggcgaaagggtatgcgcagcgccagggggtggactttgatgaagtgtttgctccggtggcacgcttggagatggtgcggctgctacttgctttggctgcacatgacggttggtcagttcatcacatggacgtcaaatcagcgttcttgaatggtgatcttgaggaagaagtctatgtgcagtagcctcccggatttattgacgacaagcagggcggtgcagtactcaggctgcgcaaggcattgtatgggctgcggcaagcaccgcgagcctagcattccaagttggacgccaccctggtgtcacttggttttgatcgatgtcccatggagcatggtgtgtacaagcgaaagactggtgatgatctactgctagttggagtatatgtggatgatttaatcgttacagggtccaaagatactgatattgaggagttcaaggctcaaatggggaaattgttcagtatgagtgatcttggtctcctgagttattacttggggatcgaggtacaacagtctagaggaataatcaccatgtgtcaaagtagctatgcaaagaagatcctagagatgtctgggatgatcggctgcaatgcttgtgcaacacctatggagaaccgactgaagttgagcaagaaagatggcagtgcagctgtgaatccaaccgagtacagaagcatagtgggaagtctccgttacttggtaaatactaggcctgatcttgcttactcagttggcatagtcagcagatatatggaagctccaacatcacagcatatggctgccgtgaagcatattttaagatatctgagtggaactattggatttggttgctgctatcgcaaacaagaccagtctgataatggcttgatgggctacagtgacagcgatatcgctagtgatctcgatgatcggagaagcatgtcaggtgcagctttcttccttggagcaagcttggttacttggacgtcacagaagcagaaagtcgtggcgctctcatcgtgtgaggctgagtacatcgcagccgcgtcagctgcgtgtcaaggtctgtggctatctcgcttgcttaatgacttgattggaggtgcagcgaagaagttcaagttgttggtggacaacaagtcggccatagcgcttacgaaaaatcctgttcatcatgacagaagcaaacatattgacaccaaattccattttattcgtcagtgtgttgaggaagaaaaggttcagattgatcacattggcacagatggtcagctagctgatttacccaccaagccacttgggcgtgtcaaattcctggagttaaggcggaagctgggtgtcgagaacgtgaaggtgacaaggcttaggggggtgatttgttagactaagcctgtcacatttagctggttagttattcatttgtttgtgcatccgtggcaggtcattggattctgtcacgagttagtttctcttttacatgttgcatgagccagaggcgcgcagagttcgcgtcatggccgagagtgcgtgtgtgcgtgactcgccaagaatgcagcgttgatcagcacttcgtgggatggcgcggaggaagtggtcatagcggctgaataggtgaagctgttagtttgttatgcatgtaatcgttggagaataaatgagataaaaaaaccagaaaagctgcaagacgttgcgcggcaccaaaaacctgtgttcttgtgttcatctctgttcgttttgctttcacgcgcgtctacacttttgtttttcctgtgtttatccaagtgatcgcgtgtgtgagggttttgccacaacaaggtccgtatacacttcgtcttcttcctctcgatcaattcgtctctgatgtgttcgtccgttggcatggcatggcattggaagaggctgtacgacatgggggcgaggcgggtgctggtgatggggacggggccgctggggtgcgcgccgcacgtgatgcgcgcggcggagctgttcaacccgcagctgtcgcgcgcgctgcaggaactcgctggagagcctgttcccgttgaggaacacgttgcagagcgccgtggcggaggcaaggtctcccaggagcgcaccagtgagcgcattgaggtggaggctgagcgtgtgcagcgccgtcaaatcgtcgtggcggcagaggacgacgccgacgccgcgatggcaacggcggacaccgcgagtccgcgagctttccgacagatagagagagatgagagagcggtggtggtgtggcagcgcggcacgcggcacgcgccatggaagtgtggccgtgggcaaccgtaggccatggacgggatagagagggatgggagagagatatgacatgtgggcccaagggcattttagaactttcacgcgatttctctctcctcttcaatcggaaattattattctaatcggtgcggtgtacattggcaaattaccacttttatttagtttctttcccccaaaagtaagttcgggcggtgtcctacggctaaaacaacacaatagcagtgtcatgtaacaaaatttgcctttatattattacttgaaataatactgtagagacctctatagttctaatggccccaggtaatgttatgctttagggctcgtttggaaaaaaaaaagaaaaagtgaaggatttctagaggatctagatctttagggtacaattaaaacaaaatattgatgcttaaatttctttcgaagatcctatggaaggagccattctatgctggagccattctatgctggtattgaaggaaaacaaacataatgtcttccctgctggaagacctaaattagtagattattagatagtctacagaaagaataatctgtagaaatatcttaaaagcctacctgatagaaaatatttatagtgccatcttattatttataatttatagtaccaccttattagttctagtatagtagacgtctagtcacttgaacaatgtggtaagaattagagaaatgtgcatgctcgtacccctcgtcaggccgggctcaggcatggggctccaaatggtcgcgcatacgccgcttttttctatagctctgctttattgtatttaacgaattatccgatgtttgtttgttaaactcactggatggtctgctgcgtggcgtggatatcatacaagcctcttgatcacacgttgcagtatctctataaataccaaaccgccgtctatatgcaacttacatgaaaacaattgccttctcttttgtattgccccattgctcattgtttactccatcacgcccgccaccatgcacgggcatccgggagagcagctatatgcaacagttgcctttaacatcctgcacctagccagagagggcggataagatttggaagtgctccgcacgactgctcattgttcatccactgtggctcattttcctatgttccatcgatgtgtgttgtcatcaatattttgtaccgcacgtcgtatgggcagtgagtgccgcgcctcgtctagaacaaaatcgtcggtatgttttaactatgtttcgtatatttgatatattcatgtctagtattgtcgtatacatatctaggcaatatttatgtgaggtgataatgttagcttatatagttatatgtttaatattatgatttatttgtatgtggtggcggtagggtttcggcagtggattggggaaatggagcggtggacggggtgctcacgatggctgcggtggcgggaaaagcgacggcgcagtgcgnggtggacgggagcgacgatggggcaccgctgaatgcgatgggaggcggtggagagagggaacacggtggagaggtgctttaggtggtattttggggaaacgggagggatgcccaggtagaacttggcacggcgttgcccacggcgcaagtggcgtggcgcgacggtgactagggcggcggcgaggtgcggctaaaaagctccggcgggcggctgcgcatggctcggcgtggggagagcgatagggggcgcggcgagcccggggatttggggaaaatgggagagggggccccggggatgctttttataggtccgggaggtggaaatcgggaccgagaaaggcgggaaccgaccggcgatgtggggcgccgacgtgggaaggttggcggcggttcggcgctgattttgcggggaggagtgggggaaatgggggaggaggaggtggggatcgagtccacgtgctcgcgaggtgaggtggagcgcgggaagcgcggcatcgtggggcgaaaccggcagccatggcggttgcagccggccggatggaggtaaggggagaagctgacgagtgggcccgcggtcccacttgtcggcgagagaagggggaggaggccgatggagggatgcaaagaggacttgcgggagagggagggggaggagctgggccggcccaaaagaagggagaacttgggccgaaaggaggcccgaaaggaaagagggggattttaattgtttttctttttatttaattggttaaatgaactttgtgctattaaaattatttcttagaaaatttacagaaaaatccggagagtatatttaggcacagagaatatttcaaaatatttccggccaatgatttttaaagaaaattttaatttcctttataatttcccttgattaaattactttaaattttaatataattcctagaaaatgcattactaattgatttttaatccccaacgaaaatcggggcgttacactcaacctcctgctgcaggatcagaaggttttaacgaggtacgccggccatcacccatcgggttggctgcataggctgacacgcagcctcggccgctgccgatggagaggatctcggtcacaggacaggatcggtgatgttgtcgagggcttgcagttgcaatagcctggctgacttcaatgtcaacgccagcacgaccttatcgatgagctctacaaacttggcctataagcctgatctgcctgtacgtcttagtccatgatctaaaattgtgattcctgatttatgagggactatgagtctgatctccctgtatcagactatcagtccatcatctattttgttttttcttcctaatttgtcagggttttttaacaggggaagacaacgaggtgatggaaaacaacaccgcctgccagatgcagtatgttagcagcgtgtatttgtttgacgaattgagtttgcagcgcatatgtgaaggatggttattgtaatgtgtgaaggctagggatcatggtcacttctgtacatgccacaacacggtatttgcactcttctcatttaatctactagcccataggccccatacaaaactaaatgttagtacatgccagatacactattcataattttgccactgtttataggtcaattttttccatgattgataaaagttcaccttcacatctttttttaatcaacgctgacattaactaactccttaattatttacttgcatcctgtacattgactgagcagttctcttcaaaaggaagaatgtcatcacaaacaacaatgtgggcatgatctactgtcaatgtatgaatactaattgaatatttgttttttttttcatatacactaattgaaatagtactaggaagagagctataatacagtaaggtggttgttcgtcacaaataaaaatcaaggatggttattcaacaaaattatttccacgctgattcggcacttcagatttctactgcttgcattgtatcaatatttttagatgattatattactaatattattgatgtacctagaaattatacatgttatgttgtaatgtgattcgtttgttaatgacaggaattaggaaatatgggaagtggtgtttgatgttttctcatacagccatatttatattatatctggtctatgcaagaccaaattttgcttaggaaaaaatatttgacaaagaaaaccattttgcaagtccaaaaaagaccaggggacttacatttttgggctagtctcatattagccaaagagtcttttcaaaggttcggttccttcttattacaagatggctcacaagtaagattttgggaggattgttggataggagttcaatcctttgagaaggagtatcctaacctctacaatctagttagaaataaaaataaggtggtggccaaggtaatgagtggaataccgttaaatctgtctttcagaagatcaatagtgggaagaaacttggaagcctggtatgagctagtgtcgaaagttgttaacactgtattgacagatcagaaagatcgcttcttttggaaaaacaataaagaaggcattttcacagtaaaatctatgtacaagttcctcatgtatgaagggctggttcctaggaagaatttcatttggaagctcaaaattccacttaaaatcaaaattttattgtggtacctcaaggaaggggtaattctcactaaggataatctagcaaagagaaggtggaagggtagcctaagttgctgtttttgtaactctaaggaaacaatacaacaccttttctttgattgctcaatggctagatatatttggagtgcgctcctttttacatttgggattaggcaaccgtgtagcatgtctcaaatgtttgggaattggctgaattgtgttgaacctaggctcaagagaatattgtgtgtgggcatagctgtatttctttgggcaatttgattatataggaatgatgtggtctttaatggctccaatcctacatctttcttgcagatcattttcatgggaacacattgggcaaggacttggtctttgcttcttaagggaaccgatgaagaaatagttaagaactattgcaaagtgttggagaagcatgtggtggaattcttctccgtgtatggctggaaccttagaagaagattggaagcctagtcttttcttcgtttgttgttcttaaaacctttgtttgtgctgtcatctcttatgtaatgggagaggtcagttgatgcattttgtacccttttattagggagagtcttatgtactcgtgttcggattttggctgtgtataccccacaaaggtgtagaggccgggtttgataatcctttatctaaaaaatgcaagctcatgtggttaattcattctaagaattcttccttctgcctggctgctctgatcttttcttactacatcgagataccgtcagatcatgacatgtcttctcttcgtccgttgcaaaattgtgtgtgtgtgtttttattaatcactccatcttctgccaaattgtaagtccatacctttcatttcatctggaccctgtgaacgggaccggatttcctgtctagatttgtcttttttaactaatttttaacttttttctattcagtgtactgatggtctagatggtgcatggatacaggaggctgttctacactggtggagaaaccatctttcgtcggtcggccgaattccacaatagtttcggttgcaataaaaaccggggctaaagatgattttagtcccggttaaaaagggtaacggacatatttaatttttagtcccggactaaagatgatctttagtctcggttcaaatgctgtcagggcctgccaggcctcccccggattaccaaccgggactaaagatcgtaactttagtcccggttagtgttaccaaccgggactaaagatcacggggatctttagccccggttcataacaccaaccgggactaaagtcccacccctatatatatgtcttcttcctgctccagctgcccgagcaagcttcaaaatttcttcaaaaaagaggggaggtcatgccaaaatttctagtgaatttattttggtgattatatacaaatcggaggtgcctaaaaggttagtaacttcatcctccaatgtttttttttgtcatattacatttggagctatgttttgcacacttttttgtctccaaaatttagttgtaagttgatgagagagaaaatttgtgtgggggaagaaagaatatatagaaatttagtttatttgctaaagaaggttttataaaatagttgagaaggaaaatatagtgaaagttaatcttaaataatagaaaacaaactaaaatgaaaattaaaagaagtacaacacattaatattagtttaaaactttagaaatagtaaataagaattatttggtgtaatattttataatttttgtatgaataatgatatgtcattattgtatgactgttgaaagagtttgtaattattttataattattgtatgactgtcattattgtacgaataattatttatgtatgattttttttcttttcatgtagatggatcggcaatggatgtacgctgaccggcggtccaaagagtttattgacggcgtgcattattttttgagagtggccgaagctaacaggcataagggttttatttgttgtccatgcaataagtgtaagaatcagaaggagtattctgcatccaggactattcatttccatttgtttgagtcggggttcatgccaagctataactgttggacatcccacggagaggaaggggttgaaatggaagaagatgaagtggaagacgataatattccggactttagtcaggacgctggatttgaaggaaatcaaatgggcgaggaggaaagggatgctgatggtaacgacgttgcggatgatcttggtcagatgttgcaggacgccaaggaggactgcgaaagtgaaaagggggcccataaattggacaagatgttagaggactacagaacgtcgttgtacccaggttgcgagcaggggcacaaaaagttggataccactctggagttcttgcaatggaaggcaaaaaatggtgttagtgacaaggcatttggtgatttattgaaactcgtcaagaacattcttccggagggaaacaaattgcctgagacaacgtacgaggctaagaagatagtctgccctctaggactggaagtttagaagatccatgcatgtccgaatgattgtatcctatatcgcggtgaggagtacgagaacctagaagcatgccctgtttgcaaagcactacgatacaagattagacgagacgatccaggagaagttgacgggcagctaacaaagaagagaattcctgataaggtgatgtggtatttccctataataccacggctaaggcatttgttcaggaataaggggaatgctagaacgatgcgatggcacgctgaagagcgtcaacaggacgggatgctgagacaccccgccgatggttcgcagtggcgaaacatcggcaaaaaatttaaagactttgaaaaggacgcatgaaacatacggtttggtttaagtacggatggcatgaatccttttggagagatgagcagcagccatagcactttgtcgcgccccaaaacaaccctaaaatacatcctctaaattatgcctagaataattaaaatccttgtgaaagcctttaaaaattaaaatgtgcaaagttaaaagtcaataaaggcttggaggattttttgtatatttcctaaaagcctaaaatgtgtaaataaattttagtggaattttcagagcacaaataataattgttaagaaataaacaaagttaaaaatgttttataaaaagaaaaaccctaaaaatcccccttccctctcttgggtcggctcggcccatttccctccccctctcccttctctccccgcggcccatccggcctctccccacgcgcgcgccgctgacgggtgggcccgcccgccaccctcgctgacgggtggggcccacccgtcatctccttcctcccgccgctcccgccgcctcgcccgcgcctagcgccgccgccgccgtgaatcccgccgcctcccgtcgtccccgcgtgaaatcaataggggggaattactccccgtgatcccctccccgtttccccccattttcccctctctctctctctcgcattcaaacggctggatttgctcccgcaaatctcgccggcgccattgatggcggtcggacctcccggccggtttccttccttccccggccgccctctcccccttccaaccccatttaaaccctccccgcacctccttcgcccgtttccacccttttgccgcaccttctcctcgccggaatcgagctcgcgccgtcgccctctctctcctccgtcgccgacgaccttcggccggctctctccgctcgccgggaccgtttcccgccccagcgtcgccttctccggcttcgccgcaccgccgccgtcaccgtccacccccttgtcgagctcgccgaccgccagagcgccgccgtccccgtccgcccgagccgcgccgctgccttcctccgctccggtcgcctttttcgtcgtcgccgtcgacctagagtgagccgtggaccgccgcctcgtttccccctttccctcccctctctcggacgccgctccgccgcgcctatggctgccgccggcgaccataggggcgcaggcgcgccgcctcccgccggccacgccgacgtggccgccttcgggcgcgccgagcggctgccgcgtggggcccggccgtcagccgcccgcgccctcgggtgcggctgacgcgtggggcccacggcgccggccggtgcgagcccgggtgcgcccggtccaccgtggaccgtgaggctgccacgtgggccccactcccgtggacccggtccgcgcccccctccccctcggctgacgcaataatccatttttaaattaaaatttaaatgaagaaattcgtaaatattcatttaaagagcatataaacctcaaatggccataacttggccatttgaactcggaattggaccgttcaagtctctaatttttccttaagaagtcaagaacccatttttgtgctttgttcctacttgttatatgaagtttattagagtaaaagcctttttattttccattggtcgtgtagacgctgcagcttcggaagatccgctcttcgtggaggttgaagccgacgtttgggaaagcgagcaaggcaagtcacatcatccttgaacatattgaatcccagtttataaaattattttgatttaaattaatgcattatcgctttatttaaattcccgcgttatcactgttttatttagccatgcctatttacctttgttatgaccttattattattgctattattattattaccttgttcaccctagactaaacaaaacctccaactagtgggtaccctatgcgtggtaccactagtatgaatttaggtagatgcttcgctggttaattaggcaacattaggtggttttacaactctagactttgggagtattcatatcacctggacactatggaatggttggattattgtggaattggattcacacctccccctctattcaaaatcctcaaaatggttttaggctgggctcggggtgcatggttttgatagtagcgcctcggccatataaggaccggtcttcgggcttctgttgcaaagcactaccgtacttccacatgtctagtgggtaaggcttagtttgtggctcagtctggttataaacaaaagtacacggatggagatggacgaagtcgggggtcgatggacatctctagggcaaatgaaggctacacgagctgcggcctggtagtcgagatgtcatggcacagggctggtgtcctgctgctaggggctcagtcctgcctacctgtcccggaggttccggccgtaggtggggttgggtcggtactcttgtctatggctaggatgggttggaaactatgtcacatcttccgtccgtataccgtggtggtatgtggcatgtggttacacgtgaggaagatgtgtcttgtgggtaaagatgtacacctctgatcagagtataacctattcgaatagccgcgccctcggttatgggcaagcctagcaatgtacccaagttagtgttttaattcttaaaacctgcttaacaactaaaatatggaatggttggcctgggttggcttgggacgagctgggacccagggtcgggttgccagttcggtctgaatcatcgtaggccttgggttaaggcaggttcgtgtgggttcatggccttgattaataatcttgtatagctctaggatcgtatttacaaaataagctttgagcaactaagtgtcttttaatgctgtttactgcaaaccctaacccctcatattataacccccttgtactcccttgcatttattctgcacttgtgggtgtgtcttgttgagtatggtggttgtactcagtcttgctcaatttttcccaaacccagaagaggagttcctggatgatgaaggctttggtgtctagctcgtgcctgccgtcaagcgcctatggtcgtcgccctagtcttccgctgtttttcgtttgtcttcttgtgtgctgggccttcgccgcccatgtaataaattaattatttacgcttccgcttgttaaactctgaattgtatcaacttttggtgtaccttgcctcctaggacaaggaataatacacgcacgtaaggaacgcccgttgggttatttccggtcgtgacacacttggcccgttacgatgtgtatctacaacctccctcctggctatgtatgaagaggaagtacataatgataccaattattattcaaggccccaagcaacttggtaacgacatcgatgtgtacctaggaccactggtcgaagatcttaaactgttatggaaaaaggaaggtgtccccgtgtgggacgagaacaaacaggaggagtttaacctacgagcgctgctgttcgtaaccattaacgattggcctgcacttagcaacctttccggtcagtccaacaaggggtacaaggcttgcactcactgtatggatgaaacagaaagtacgtatcgtaagcactgtaggaaggttgtgtacatgggtcatcgtcgattccttgctgcaaaccacccggtacggaagaaaggcaagcactttgaacataaggcggaccaccgtacgaagcctaaatatcgcagcgggaaaacagtgtttgctatggttaaagaccttaaagtagtgttctgaaaggggcctggaagccagcctatagagagcgaaggtggtcacgcagcgatgtggaaaaagaactctatattttgggagttaccctattgggaattcttggacgtctgccacgcaattgacgtgatgcacctcactaagaacctttgcgtaaaccttcttggcttcctaggtgtatatggaaagttgaaagatacattggaagcatgtaatgatctaaagcatatggaacaactcggcgaccttcacccggaaccaaaggagaaaggaagccattacttgagtccagccagctacactcttagcaaggcagagaaggaaagtatgtttgaatgcttggagagcataaaggtactgtctggatactccacgaatatcaaccgaataataagcacgaaggagaagaagttcataaacctaaagtctcatgactgtcacgtgttgatgacacaactgctaccagttgtaataaggggtatccttccagacaatgtccgggcaacaataacaaagctatgtgctttcatgaacgcaattttgcagaaggttatcgacccggatagattagaagcccttcagaatgatgtggtgcaatgtcttgtcagttttgagttgatatttccaccttcatttttcaatataatgaagcatatgctttgtcaccttgtcaaagagaacagtattctcgggcatgtgtacctacacaacatgttttctttcgagaggtacatggcgtgttctgaagaagtatgttcgtaaccgtgctcgtccagaggcaagcatcgccaaggggtatggaacagaggaggtcatcgaattttgcgtaaaatttattgaaaaccttcgcccaatcagggtacctgaatcacgccatgaagggagactacggggaaagggaactctcggaaggaaagcaataatgacggtagacaacaatttattccgtaaagcccatttcacggttctgcaacaatcttcattggtagctccttacatcgaggagcacttggctctagttcacgctagaaacatcggtaagtccgatgcatggattacacggcatcacattgatactttccccgcgtggctacgacaacatctcatgggtaacgagacgatcaaccaacaactggccttcctggcgaggggaccatctgggtcgatcgcgacattccagggatatgagatcaatgggtacacattctacacgagagcccaagacatgaagagcatgaaccaaaacagcgcagttcgtatcgatgccatgggacacgatggaacaaccggcacgtattacgtgccatcgaggacatatgggaacttgactatggtcctctcaaggtccctctgttccggtgccaatgggttaggttgactggtggaggcgtaatgattgatgacagtgggatgacaacggttgaccttaacaaggttggatactcggacgaaccttttgtccttgccaatgatgtaacgcaagtcttttacgtgaaggacatgtctagcaaaggaaagaagggtagagggcatgacgagccgaagcgtcacgtggttcacccaggcaaaagaaaaatcgtcggagttgaggacaagactgacgaggattacgattagttggatgggcaacccccttccacggtgatgattgaccctagcatcctcctatcaaatgaagacaccccttactcacgtagcgatcacaaggagggaacaatagtgaggagatagtacgtgcggtcaaccgtcaccgccgatgtattgccgtaattattgtatacacgatgtaaactattttggatgtattgattatccatataaatcaattgttgtatggcatatgttaattacgtacgattattagaggttttaacagttttaaatcatgtatatgctagttatatgcaataattagaatttttaaaagttttaaatgatgcatgtggcatttacatatgttacttagagtttttaacaattttaaatcatgcatatgctagttatatgcgataattagaatttttaaaagttttaaatcatgcatgtggcatttacatatgttacttagagtttttaacaattttaaatcatgcatatgctagttatatgcgataattaggatttttaaaagttttaaatcatacatgtggcatttacatatgttaattagagtttttaacaattaatttaatatcattcatatgctaattatatatgattattagaatttttattaattttaaatcatatatttgcttattacgttttatccacttaatttactacagacaacaataatttttcgaagtaattgtcattaatttttcgactttaaataattttagtgcattattttctattttagaaacacatatgtaatggaaatcaatattcagtgcgtttatcagtagtcctggttcttaaccctaaccgggtttaaaaagaatttgaaaatagagggaaattatctttagtcccggttgatgagaacaaccgggagtaatgatatctttactcccggttgttgagaacaaccgggagtaaagatcttatctttagtcccgattgataagatctttactcccagttgttcttgttctcatcaaccgggactaaagatttaggggtatatatatattcccgatgcgcgccctcgtcttctccaccaacacttagaagttttttccccgatcgatctctctcggcttctccttcgccgccactgcctagggcatccccgcgccgacgccgccgtcgtatctcgccgttgtctcgcgggcgtcgtcgtcgccgcctccgccgcctctgccacctccgccgccgccgcatctctagggtgagagccgccgccgcctccctctctctccaaccttgatctctctctctctctccccaaaccgccgccggccgcctcgttgccgacgccgccgccgacgtcgtcgcggccgaacacgactccgccgcgccgacgatgccgaccccgacctcgatacggcagccaccggcgacgacgtcgcgccggcagtgccgacgaagccgggccaccgcgccgccgcgccacgacgccgggccgcgccacgccgccgcggcggcacaacgccaggacgccacgacgccgccgcagcacgccactgccgcgctgctacgccgccgccgcgccgcgcgccactccgccgccgcgccaagccgcagccgcgccgccacgccgtcgccgcgccgcgcgccactccgccgccgcgccaagccgcagccgcgccgccacgccgccgctccgctgccgccacaccaccgctccgctgccgccacgtgaacgaacgaacgatcgtgaacgaacgaaacgtacgtgaacgtgaacgaacgaacgaacgtgaacgagaacgtgaacgaacgtgaacgaacgaaacgtacgtgaacgagaacatgaacgcgaacgaacgtaaacctaacgtgaacgtgaacgaacgtgaacttaacgttgtatgtgaacgtacgtaaacgaacgaacgtgcgtgaacgaaaagtgaacttaacaagaacgcgaacatgaacttaacgtacgttaacgtgaacgcacgtgaacgaacgaacgtaggtggacgaaacgtgaacttaacaagaacgcgaacgtgaacgatcgtgaatgaaacatgaacttggtgagaacgcgaacgtgaaatacaatatatgttactttgcgtttatcctaatacatctttttgtatgttgcagaaaagacgtagtcgtcgtcgtccctcaagccggagtggtagctaaccctcgaaggaattcgcgcaggcaagtgatgtaaatatatgattgttagatttttaatgcaattaagactattagatttaatatacgacacttggacttagcatatatgattatctaagtttgaaatgtacgacacttagacgacttagcatatatgattacctagggtcctaatatacgacacttatacttagcatagtataagattattagatttgtaataagacagcatataagattgtgtagggttctaatatacgacaattagacttagcatatatgactatttgagttttaatataagattattagagttctaatacaagattatttgagttttaatataagattattagatttgtaattagacttagtatataattattgtctagggtcctaatatacgacacttagacttagcatagttgactattacagttttaatacaatattatttgagttttaatataagattattagatttgtaataaaacttagcatataagattgtgtaaggttctaatatacgacagttagacttagcatttatgactatttgagttttaatataagattattagagttctaatacaagattatttgagttttaatataagattattagatttgtaattagacttagtatataattattgtctagggtcctaatatacgacacttagacttagcatagttgactattagagttttaatacaatattatttgagttttaatataagattattagagctttaatataagattattagatttttaataagacttagcatgtaggattgtgtagggttctaatatacgacagttagacttagtatatttgacttagcatatatgattgttagcatataagattgttaaagcaaaaatgacctatagacttagcaaatatttcttgtatgaacagatggctgatcgcgatgaggaacagatactgtacaatacaatcgtggagggaagcagccagtactggaacgaagaagaggggaacgaggatccaaaccagtacttgaacgaggaagggaacgtggagagggaagcggaggggaaccaggaggggaacgtggagagggatgtggaggggaaccaggaggaggaggctagtggaagtcaaccctccgctggacagaagagggcacgcaggcaacgaggtgccacgaagaaactagagggtcggcacatcataacggaagtggacgaagatggccgacctagtgccccagcggaagcagccaagaactacgtacgacacagctattgggttgtgcgggataacgtgcctgtcagtatggtgtactggcgcagaacaagggcacgcggagatcatgagagctttgtcccagattcggagaaagagatgctgtggaccacaatgctcgagacattcacccttcccgcgggtacagaggacaaagtgaaaaggtggactctaaagaaaatggcagaactgtttcagagcttcaagggagatctgtaccagaaatatatcctgaaggggcagacaccgaacttcgacacattcccaaagctaagggatcactaggacgagttcgttgcatataagacaggtcaacaagggtaggcgatgatggaaagaaacaaagaaaatgccgccaagaagaagtaccatcaccacttggggtcaggcggctatagcgtcgctatgccgaagtgggaggagatggaggcaagcttgcttgagaggggtatcgaactggccaccgctaaatggctggatcgatcgaagtgctggtactatgctcacggtggaatgctcaacccagttgatggctccctggtcttcagcgatcagatacgcgaggctacgcatcgactaacggacgcagtggaagcctcttcggggggcacgttccgacccgacagagagaaggacgagctgtcactcgccctgcagactccagagcatccaggacaaacaagagggaaaggagtgattccttggaagattggattcaaggaggacatccacacgtacaggagtcagatgaggagcaagagagataccgaggcgaagattgtagatcttgagtacagggtatcgagctacgagctaagcatgcaagaggaggcggcaaggaaggttggtgaacacatggccgcacatcggtcccatgatccccagccgaccattcctcctgcaatggtgagcccttcaggcaatcgtagcagctgcgcctccacggggcaggtaggatcacagagcatggacgccatgcaaacccaggacgaaatcacctgccccgttgatgacatcactcagcggacaccatgtgagctgcatattcccttcaagaacttatcaataaaggtaagctcgtagtttatagattttagatttgtccattccgcaagttgctgcttatatatgttgattactaataaataacctctcaccacgtgaaggtggcgtcgggcatggccatcccgacggacccttcaggtacttaccactgcaggccgattccagcaggatactccaaggtcgaagttgagttggtggaaggtgcgtacgaggacctcgagttggattaccctggaggagacggtgagtcgcatctacgagacacaagccacgccattatactatggcgcaagcggtatatcatcctccctggctgacaagcagcgtctcgtgcaccatctcctccggctccaccatctcctcctccgactccgccatctcctcctcaggctcctgcaccgtctcctcctcatgctccagcaccgtctccacctcaggctcctacaccaactcctcctcaggctcctacaccaactcctcctcaggctcctacaccaactcctccgcaagctcctcatccggtaccttccaagtcaagggccccccaagctccaccgcatgcccccacaagggcaacgaagaaggcgaaagttgacgccacaaaaaacaaggacccggggtacgattgcatgcaagaggagcttgacgcttatgtggcatcataagtcaggagacaattgaagcctcgaagtccagaaaagaagattcctatagacccgagtgccaggaactttttcaggggtatgtctgcacctaccaaggaggccataaagctatcggactatgagcaaaccagtccctcagcttggagaggaaccaaaccaagagatcgagccgttggtgaccggtgaagattttggaatacaagaatttattaatgacaccgggctaactatggatcaattgctacgaggcgcaccaatcgaaaaggcggaagtgaaatacatgtacgaactcggtaaaccgcttgtcaagcctgagcagctgcagtccctacccagacaaatatacaagttccatcaactgtacatggagatgagcgccaccggtagagagatgatcggagcgaggatcagggacacggacttcttgcaaggagatgacattctcttgatcaatttcaagggtatctacgaactataccagctggacgccctcgacgtctctattatgagttgctagattttgtaagtatcgttcagttagatttcttattacgtttcctttaattaaataggtccttgtatataagtagactatatataatatatacttccttttatcgttgtagaatggagattcaaagggcccgacggcgggggggttttgatactggattcattgaccctcggaaagtaaacgtcgcaatgctcgaccagtatccgcaagccacagaggacaatctcgtccatctcttgaaggcgcagcattacaagacgttcatactattgccgtacaacacagagttagtttttactgtcttcctataccaaatatcattcccgcacgaacatgctaagtgtttcatatgtaatgcatcccacgcacattgcagattccactgggtccttttactcttcgacctagaggcctgcaccgtcaacgtatatgactcaatagataaaaaagtctacgtttgacaatgttttcgaacttatagacaggtactgtcataagttcctatgttaattaagaatcttgttataattaattgctactatgaatcatagctttaaactgcatgtagggcttggtatcggttccgtcatttggtccgcggcaaatggagagaaagacttaggcagaagttcaattttcctgtgagtacacatgctctacatttatattcaatctccaattcaaatacatacaagtgtatattaattagatctcttgccgtttgtcatttatttatagtgcgcaaagcaaaagcagggaactaacttgtgcggctactacgtgtgcgagtattgccactgccttgcagaccaaatcatcaccacaagagagctcgatgtacgtacaaataaattcaaaatttcattgcgtacatatcgatttgtttttaattactaattaatttcatacattcatatagtttattcgtatgagggataacctgatcacacacaaggaatttatcgcggcggttaaagaacaactcatgggattcatcaacgaataaatccttgatcccaagggtgaattctactacgacggaaatacaattcattggtccttagcttctgagataacgactacgactactactacgtcgaaatcgtagctagctaggacatcataatggattgtaattaatacatgtctatttttctatatgcatatacacattttctttaatgtaaatatatattttggtcatatatatatataaaccatgcagcaacaaggccatgcaaacaaaaaggtcagctcgatctttagtcccggttatttcacccgggactaaagatagcgatctttagtcccggattggtagtcccggtttgaaaaccgggactaaagggggttacgaaccgggactacaaacgctttctccatcagtgctatccgccaatgaggtgcctgccctgccaactacttaggagtgtgccagcattctacatggttgtcgcctccatgatcacttagcaggtcagtttcaacactcggcctctctcccttttcccttcccacgttcttatggtgctctttgttctcatgtgtgtgttgcaaaaagatttgctcgatagaatgcttattcgatgtaatatcgttcattgcaatttttagatttttatgttcattactactgcatggcttgatttggaagacaactactgtgaagagcatcagaagtggcaatgacaacaagctatggtgtattatcccagaaatattgccatgtctgcgtgttgtatcttctcacacttatcttactttcatctggtgtaagcaagcactatgtttcttcacttatctgtttattatgtttctttcaatcagtttttaatggcaaagttcttctttgcgagaaattgctttgtaatctgtagtgtgcgttgttctgtaaggaatcatcagtggatcacaatccagttgtatatattacaataatagtattgaggatttgatgtataaattgtttagaccatgaacattaagatgaaaaaattaatttgtgtcccatgatgaatccaaaattttgtatttagttattttgatcacttatatttacattaaccaacatatagtcccataagctttagatggtatttttattaccacgattaatatgggttgtgcataataaaaatatttcatcttgcaatatggcaagtttggtttatattagttaaagaaaatatgtccgatttaattgatattggcttctacgtgcattgcacgtgcatgatcactagtaaattgaataagatataagtttagtttacaatttaattatatcatgcaagggtaattacaagaaaatcataaccagcattcaaagcacattaaataagttcaatttagcttaggatatagcacaagaataaatcaaaaatcatcagtacatggacattcataataaaatttcacgcacattaagaggatgtttggttgagtgccaacctttgctaatgttgtggcaatcaagtttgaccaattaagcttagtgtttggttcatgccacaagtgagttatgccacaatttttcagtaagctggcccacttgtcattgagtggttttttttgccataacttaccacaattgtggctaataaattcttttttttaaacaacccgcacaagatagtgtgacgtttctattaataaaaaaggaataaagtacaagcctatagtcctgggagactatagttaggaaaaagaaaatatacaaccacaccacgcgtctacgactgatcctactgcttaaacaaaacatgcacacaacaccccaaagcaataggacttctaaacgacgcctccaagaaggaaaacgacgccaaaagcgccgccgccgtccgtgctagataaccaagacaaggttttgacatgaagaacccactgggaaacaatagaaaacacggcaacgccccaaggggaaaacgacgcctacaggcgtcgccgttgccagcccaaaggctaggcctttgcctgttgttctactctccacgttaaacagtgcttgccattttagcagaaccaccatctaatccccttcgacgtgcagccactgcgccgacgcctcgccgagggccaggcatcaaacaagagtctccaccttcaccgtgcttcacgtccatccacgtggttgggttggagagggagagggtgagagagaagaatggatcccctctcccccgcactcgcccgtctagcgtggccatcttacggcggcaagccgccaccgcaagagggcagacgcctggaaggaagctcgccgcaggcttcaacacccctgtcgacgtttgatgtcgcgattccggtatttgcatagtatggggatcgttggtaccagggtatatgcgagattgtaataaaagagatggggacgaggatttttatacaggttcaggcccctgaattgtcaggtaatgaccctactcctgttggccgaagccggtcgttgctcttattcatcataatcacaccagtacaatatttagggtagcctatctatttgttgtcgacttggcgttctgaagtgttgactcgtagtcgacaacagggtagccttcctcttcgaatccgcatccggcgagatcaaaggcagtgcttttgtctctcctgacagtatctgtagacaccataggggactagccatgcttatctctgaagtcgatatccggcgtcttgtcttggcgtatgttggcttgtatgttgatcttgtgtcttgatctattgttccgtgtcccctctcctcctagggggccttgtatttatacccatagatgtccccttgtccaagtagaacttggaaaaccaatatggatacaatccttgtcgtttccatgtagaacactattcatccttccttatgcggaactcctcctatatctaaaggttgtttctatataagacatgctatgtggtgggtcctgccaagatttagtcaactactattaggtatatggtatccataaccctgacaaccccccgcacagcatgaccgtcgtcgctgcctcgactagaccacccgtgttccaacgggtgcttggtcgcatcatcgtcgcctccgtcctcctcaccgcagccatcgcctcaccgttaccaccgccgacgggcttcaccaccgcccccggccgctccgtcgcgccgtgcagccgtctcctgtcgccagctgtgccacgtcaccctgcgccatcatcggccaagcctccgctatggccgccactgcggcctcccgcgcgcgccggcctccgcagctcccggccgcatcaccaaccacggcctccacgagcgccggcctccaaccgtgcctccccgcgcgccatcctcctcagcctccgccaccgtggcctcgccatcaccactgcgtcctccacatgtgccggcctccttcaccggcggccgccagccgccagccgccaccgccaccttcggctcccatcgtcgtcgcccgagggcttgctccggccagatccgtcatggaggcaccggatccaaccgcggggaggccagatccagccgcggcggcgccggatctgccgtctccaccgtctccacgccgcgtcgtcaacctttcctccacgcgtcggcccgccatccacgcgcggagacggggcgccgtcgggggttggcctcgccgccgccatcccggctggccgcacggttctccggcggcgcgctccgacggcggcgaggggagggagagaaggagagagtggtggcggcgacgctagggtttcccctgtgtcgcccgcgtgtgggcgacgcgggggcgagagaatcctggttgccgctaacaaattcttagccatacaatgtgtgccatgccacactttgacaaatattttggcctaccttcctactttctccgtcccaaaatgtagacattttttaggttgagacggatttaaaaaaagtaggtgagaatgattggatgaagtatattattggttgaaaagagaaggtaggtgaagaagaatggttgtgattgattaaaagaagaaggtaggtgaagaaatagctttattttaagactaggtactatgcttgaaatagtatattttaggatggagacagtagttaattgtgacagctaaaaaaacacagtagcgaggtttagattctcgcccttttctttattcgacggtacgcacgttaattttggtttgcttgacgtggtgttcaacagcacgttgccgtgacttggatagcaaaacagaacgctacggtgccccggctaggggagtaaagaaagggtggaagaaagatactcgagcaatcagcgataccattccaaatgctagatgacaaatctccctttgcaggctcgcgcagcgtcattctcggagtcatcgcttccgtccttctgacccatcgcctgctttgggaaaccaaccttttactactctcacttcacctgctatctgaagtatcgaaccccttttctttcattcctgtcctacgcagctctcccttggacctttgccgccacaaccaactactgagagcaagtttaatggctataaactgaaatataaccttatacgaaggaaagaaaatttaagaaaataaaaaggttggctctcatgtctaatagctaactattcacatactttaaaatcaaaacattaaatgtataggtgagagataaagataataagaaaaatagagataatcttataacttatctactatacatgttaactctaatatacatgttaactctaatattagttataagcttataattgactctattactaaactggctctaatataagttataagttcatagttgactctattattattactctcagagtgaagtaatgtggtcgtttttacagtgtggtacttgttgagatctagacgcagcggcggagacagcgtgggggcttgggggaggggtctttagaccccctaccgtaccattagagccccccataataccccctaaaattataatccatatatttatactttgtattaaaaatatagctaatttatatgagacatgtattagtttttattgaccactttgtttaaccctgctataattttattctagacgtacctacacggaggcaaacaacgttccatttaccaaaaaaaaataagtgaatataaaatcttggaacacaaattgcttttcacaagttaatgcacgtacgctaattggggcagctgtctatcgatgcaacaatcgcattttacagtgccaacatcatttctcttcatcttcagcgagcagctgggattgcaatctgcaattgctagcgtctggtttgaagtttgaacttcttaaaactcagcgaacagctaggaatacaacttgcaaagtttcaagtttgaacatttcgctccgacgatgaaagaatgcagtgcagcctctttgaggtggttgggcaaacgcgagcacccaaacaattcgaggagccagcgtcattaaagtcagtgaggacatgagcgaggcagccaaaccctccccatcttccgcggttggcctttggccggggctgacgccaagccacgctgccgggccaaaacggctgccaccgatcgatggcgacgaacggaagcggccaagaaccgctcgcgcgaaccgcgcctcagccgcgtactactaggagtattataacgggtggcctttttgccatccccacgcgcggcggccggatccggatggatctccccttgctttttgatccaacaacaagcaggagtattgttctgggtggggtggcgaccgcgggaacgccaaggctggcgtattgggcgttgtcaaccgtggtgcgtgatcgtggtatcggtggtgtgaggagagaaagtcaggagaccgccttgtcgtggcgctctcccgtctcgacgtacttcgggagagcacgagcttggggttggacgcggacgacgacttttcagcggggaattaacaagaaggaattcgaactgaaatattcgctatatgaatatgggttaggtgagatgaaagttgggtttctcttaccgaaagttgggtttcccttaccgtcggtggtggggttaccgcgccttgacaataagcacaggtacaacagtaactgtgacaaaccgtaagattccgtataaaatttatcaaaatttttaaaatttatttaattttatagttaccatgattttaccttttatcttacctagtggtaaactcaattaccacgaaacatgcgtagttaccggattttataaagcctgaatggaaggtgcaaaacggaccgatgatattttagaaggtttgttggaccaatgaagtcttcttaggccctgtttaaattctaacttttttcttcaactttcaacttttccgtcacatcgaactttcctacacacaaattttcaattttttcaattttttcactacatcgttctagttttttcaaacttctaattttaacgtggaactatatgatacgttgaattttacaaggcagttgtttttcatccggaatataattaagagaaatccatgcgtaggccatgtagtatcatatactcctacgtcccgtgtggtggtccagatgagtgtgtgctcagatagtcgcactgaccagagtctgccgtccagggcgatggttccattggaccaccggcgagtcccgcttgaccgccacggcgccacccatgaagttcgcctcacagtcacacgcgctcagacaagcatcctaccactactagtcgctatactccagactagtgccaccgccacggcgcccgcggcttgctccgtcctcgtggatgttaaaaaaataccccttgcagccgtccggggctcccgtcgcatgcacccccagccacagctacaggccacagccaggcaggcagcgaagccagcgacacgcctccgccttcgccgcggcccgtaccccccgccccacgctgcttctcccaccacctgcctcctctcctccttcctgctcctgcctcctcaaccccacttcacctcaccctcctcccgcgcgcggtcacggactagccgcacgccacgccgccaccactagctcgcttcatttccaccgcacgcacgcacgcacgtacgcgcgccgcgccggctccctcccgccacaggtacgcgcggggtaccggcggtgtgtgtgcgtgtacgtgcgcgtccggcggctcgcacgcgtcgtccgtccgttgatgaggcccgcgcgccggggctggggagtgggtgccttggcgcgggcgttcctggttctgctgctgctgctgctggccgcggcaacgacgacgacgatcggcttcggctgccgaggcgcggaggccatccgcgtcatcccgccgcacgggccggcgccaggcagtgcgaggagtagccggggccacggccatcgccgaagccatggcaacgctgcccgggtggtggatgctgcaatgccggtggtggggacgaggccggtgcccgcgctgtcgccggcggcggacgaggagagcaagcgccggatcccgagctgcccggatccgctccacaaccggtgaccccctgacgcattgaccaccatgctctggcacatgtgctcgccacgctgctcctgcatggatcgatcaacccttttgtctttcttgcctgcttaatcctctcaacttctcttcttttgttttctcaacttctctgtaattagtaggcagccagctagatagggctttgtattggaagaatctcccaatccattcctcctcctagcggtaagaggggatcgagattcttggcatacaaagccctatcatgcctcaccactttatttatgatcgatgatgatgagaaatcaatgaaaaaagaatgcaaagatctatcagattcagaaaaaggctacttccaacggaagaagaatcagttgtcgtattgaccgtctcagttcatccacgaaccactccagtgcaaagcacaaccttttcacagatgcgacagccttccatgatccctttttcttcagatacaactcccattttttctgtttgttcttctgccttgtaccacctgccggctttgcttcttgatcgatgttgctgtagtaggtgtgttcgatcgctgctgtgcactgcagggctgactgctgctttgctggtgggagttgcggctccctcgacacggcattaaatgcgcacgtcttccgtgtggccggaaagagtcgagagcgccgtgctgcgacgcgacggcgagtgatggatgggacgggtggcgatggacaggcggatggaccgatgggggcgcgtcacgccgtcccgccggggccggcctctccgtttacctgcccaattttcgctggacagccgggggttttcatgtgcacggcccacggtgtgacccggtctgactctccgtcgtcagcgaccaccgaccatatgcgcggcgcagtgccagtgagtgtgttcacgtttgagttgtgtgctgtgtttgatcggtttgcttccgtcacgctgttgaggttgaggaggggtcgcgttgcagcttgcacgctagctagtcaggtgctttggcgggggcaatgatgtctcatggccatgtgggtatccaggcagggttggtggtagcagcggcagattagcagctgtagtagcacagaagagggaggagggggaaggaagatatggggcatgtttggaaaaccagtttacaagaatttgaaaatgttggatttctcggggcttattcgtttcaaaggaattgcaaaagaaaaaacataggaatagggataggttttaaactaccattcgtttcatagaaatgcaccatagaaaaactataggaaagttttccattcatttatttttgaaggaaaagcataggaaaaaataatcctaaagatgaagatgaagataaaagattaagtgtttcacgcaaaacgaggtggtaataacgtgtgattaattgagttttaatttttacaaacttgaaaaatggattaatcttatattttagaacaactttcatatagaaagttttcacacgaaatgtaccgtttagtagtttgaaaagtgtgtcacgagtgtccaaaagtttatccaactttagttagagaaaagaacagggctgtcactaatgtttgcattccgttggttggcttgctcaataacataggaaaaattcctgtgtttttcaatccataggtttgcacatgtattcctgtactattcctacgttttttttattcctacgtttcgaaaatcctgtgaactgaacgagccctcagcttttggcttttagtttattttttggattctaaattataagaagcaactggttggtaactagtttaggccccgtttagttcccctaaaattttcttaaaaacatcacatcgaatctttgagcacatgcatgaagcattaaatatagataaataaaaaaactaattgcacagttataagggaaatcgcgagacgaatcttttgagtctaattagtccatgattagccataagtgctaccgtaacccacatgtgctaatgacggattaattaggctcaaaagattcgtctcgcagtttccaggcaagttatgaaattagttttttcattcgtgtcaaaaaaaaccctcccgacatccggtcaaacatccgatgtgacatctaaaatttttcttttcgcgaactaaacatgcccttataagaatctgaaaaagttggatttctcagcttttggtttttactccgtggtttattaagctagagtgtttggggaacctctgattcctaaggaaactgtagcagtcagaagccctcctaaacaagcccttgatcagtctctacgtcctattttaacgatgagattttactgcaaaggaggacgtgagaatttcacacaaactttctccatgcatactgtacaatgattattaataaagaactcttaaactgtttaattataaatatttgctgacataaaagagagagaaaaaataaaatatcacagctatggttaaaaaatcaatatcgactcttagggtgtgttcgacagtgcagcatgggaactcatccctcctgcatgtaaaacggagcggccttttatcacgtgattaattaagtatttgtttttttaaaaaaatggatcagtatgatttttaatagcaactttcgtatagaagtttttttttgaaaaacgcaccgtttagtagttgaaaaaacgtgcgcgtggaaaacaagagacgtaggttgggaagatggagtgctgaacttagccttagcgtctatacaacataaatatagttgtatgagggtgaaaattaagaaataagaatagtagtgaaaaatattactctttgagttaataagttagattctttgttatcttaactattataaggaaacggtctttaaataatttgctattttctaaaagaccatactaagaatgtactgatcatgccataactagtgcaaacaataaatattgtcttatcttctcattttctattcgcacaaatggtcattattttggacagtgatgaagatatttccatttcatccaacgcaatgctagccttttggttttagtgtggaaactagtatctcccttatacacccatccaccaatcaaacgtactagatttacatttttggagaaaaagtttgaattgccctctgttttattggggtgagtatgaattatctttctagacgcgaaaataagatatatttcactctcaacttataataccagatgaaaaaaaactaattcaattcgaaatggttttgatactatgttagtagtccagtcaacatttttgtaataaaaaaaatgataggacccacctatcagattctctccttctcacctctctcttctccctcccctagcgcgccgattcggtggctgcagtgggcagcgaggtagcgacaagatggcgttaagcaatggaggctattggggccagtgaacggcggaggcggcactacacagcggtggggtagaggagctcgagtggtagaggcggatgggggcggtgagagatagaggtgggagagggggcggttcctccttggcctccgctggcgtgcgcctccttcttttgcctccgccggtgcacggctgccctccgtacaagctcgtgcaggcacaggggcaatcaaggatatattgagacaggggggaggggggaggtgagagagagaggagaaagtgagtagagagaatttgataggtgtgtcccattgattcttttctataaaaatgtgctggctatactatcacgtaggatcaaaaccgtatgcaaagttgctcgtggtttttcatccagtattaataactgatagtgaaagatgtttggttttcgtatttatggggtaattatattgtcccaataatttaggggcgtaatttagacttattttcttgcattctttatatttgaacaaaaaaatgttgcacaatgagctatatgtgttacaaccgctttgacctaagtttgcacggactatacaagttgtgatgttagagcaaacaaattcgcaactagcacacaattaagttcaggcgccacgaacataatttactcaaatttaaatctttaggctgtaaatccaggaagcgtgcaatcactatggtactgacgatgttactttcgccagattttccagtatggttaatcactgtaccggtggacaagtagcgctgatgaatgattctcactatagattcctagtaacagtagtttccactcgctatactattgggctcatgcgcaagcaactactaggggttattcaatgagttgaaaatccagttattctgactgcaaagtaacaactccattcttttttcgtgaacgcttcaaattagatacgctacagtatttttgctacagtgctgagaggaatcatatccttctacttgatatcatacagtactacagtgctagtaggatcgcttcggctcctttaggcccccctttgattcaaaggaaattcataggaattttaaaggatttcattcctaaaggattattttcctataaagacctttgaatcaaaggattgaatcatgtacaatcctataaaatttctatggaatgccttttctcatacaagttttggaggaaatttaacatgaggttctacctcatgttaagaattctttgagtctttatctctcctcaaattcctatttttttcatgtggctcaatcaaacagtcatttaatgactatatttttcctgtgttttgtaatcctatgtttcacacttgtactcctgttagaatcctatatttttcctattcctctattttttcattgctgtgatttaaaggggcccttagaggataccaattcataggaatcattccaacacatgttctttggaacaaaggattgtagcatacaaattccaaaggaatccattcctatatatacattccagggaaaaatatatgtttttctttttctaagggctcctttgaatcgtaggattgagaaaatgtaggaatagaaaaaacgcaggattttgagatgaatgtaagtgtaaaacagaggattgcaaaacacaggaaaaacacatgaatgaccgtttgattagaccgcaggaaaaacacaggaattagaggagagataaatactcaaatgaaaatttccatgaggtagaatagaacctcatgttaggtttcctacaaaactagtatggcattaggcattctttcgattcaaatggctatataggaaaaattcttataggaatgaaatacactaaaatttctatgaatttcctttgaatcaaatgggcctaaatttgcatgaaggtattagattcaattttttgtgcacaaatatatcgccgtcacagcacagagacagaagggccagttcgtaaatgacatcgcatctggacgagcggcaaactcgtgaggtacttcaccgtggcggcttgtgaaagtgagacgcggacgagttctcgttttttttaaacaagtttcgtattgatatagcaggaaaaatacaaaattacaaccctggggattctaaccaggaaaagaaaaaacaccaccacaaccacaagtttgtagctccttgcttaacccaggagaaggtgctagcaccgaactgaccacagctaagtgtgaccaaatgtcactatacctacaaaggggttgtaaacaccctgccaaagaccaactccacacagaagataatcgacgagcttccggttgtcctcacgtagaatggttgagttgaaggacagggtgagagaaaaggagatccactcgtccctcgctccaacctgatgatgaccaccaagcaactccgacgatcaaactgagagaatatggtaatggtgaggaccaaaagacctcctagacaatggctctaagaagttctcgtattggaaaagcgaactcgcaattgcatgacagtgtgatgccgcgtaattaacctgtgtaattaatataatttaaaggcaacatatttaattaactggtgtaattaatgtaattaaatttatctttctttgtttacaatttcgatattcacgacatcgtgtagcatcatccggactagttctagcagaaggaacaccaagttgacacggttcggacgagttcgcttcaggcatggtgcaagtttgtggccacatggtctaatttggataggaagaatgcgatcccgtggcctcataaaattactttgcttcttgtccatgaactcattgcaaattcgcggtgtccgcacatgatctgttgataatgtctagtttgcaccgttcttttgcaaactggttcttttgaaaaacttatttcgaaactaaaccgcgccaaaaatttcatccaaaaataagtcgcgggctcaacgccagggccgctggcactgaggttagtcaaccgccatggcactaagacggttaacctcagcctgcgtccggcttggacgctagttgacatagcggatgaccaggagcaagtggagaggcagaatgagtaaccacggtctagacgggacctgttcaagacagagtggtgagtatcctttgtatttacttatttccactttccgtacttcgtggttataacttcttctacatgcacgggagttggtcggatagtgaacgatgcgagcgtggcgctgggcacggtccctggctcgcaagaagagagcagcgttcttcgcaatgctctacatgtagatttctaaaattcacgcaccctgcacatatttggaactaacgcctacatccttctcttggtcgtagactctacgtcagcgatgcaggaagttggtggcacggctgggatgtagggccgacaatgccatcgaaccagctcgacgggccgaggaacaagagggtcaagagaaggaacaagagggagaggaggagggagatgatgaggaagaggaggaagaggagggggagggaagacgaggagcaagtggagctcgggccctcctagctataggacacaccacagttgtcgcagggggaggggcatctcgaccacagcgcaagagagcatctacttatgtgtggaggtacactcctaccagcctcatgctcctaggtgacttgtatggttgtgacttgtgtacccaaaacttgaacttgtatggttgtgacttgtgaacctatattttgcttatgtctatgaatgggttgtgatggatctgattgtggatggatgtggatgtgtatgcatgtggatgtgatggatgtgtatggattttggatggatgtttactccctccgtcctaaaaaaaggcaaaccctaggtttacgtgtccaactttgactgtccgtcttatatgaaatttttttataattcgtattttcattgttgttagatgataaaacatgattaatattttatgtgtgatttgtctttttattttttttcataattttttcaaataagacggacggtcaaacgttggacacggaaaccagggtttgtctttttttgggacggagggagtatgtttatgtgtgtggttgaattgatggatggatggatgtatatatgtacttgaatgaaggatgtatatatatggattgatgattactctgaattgatgaattgcggatgaaaactgggcagagagctggttgtgagctctctacctggggccatacctcagtgccagggaaaatggagctgagatgtatgacctcagtgccaatgctactggcattgagacctggccaggtccaacacaggagcagtgttggacgatgttgagcaactgacggctaagtctcaaacatcagcgccaaacataatggcattgagatcatggggttcaacgacatttcaattggtgccgagattagccaggttagcgccggcgggccacccaacataggagtggtgttggacagcccgggcgccagcggctaagtcctaaagctcagtgccattacggctggcgctgagctttggggttcaacgccaaacaaaatggcgttgagtacctgccatgtcagtgaggggagcgtcctcgactccacgtggataggggctcagtcccaatgtagctggcgcaggtatgttcaacctccacaccagctaccatggcgctgagccgacgacctatttttggttgaagtttttttgtacggtctagttttgaaatttataaatttttgaaaagggccaatttatcaaataaacggtagtttgcatgccgttcttgtgacgtctgcatattattgtgaaaaaaaaaatcaatattgatattttttgagaaaaagaaatgaacaatataattttaattttttttcatactgtcggtgttatgggcccggggtacctgggctaagggaaaggaagcctttccctgtgctacgtgcccgggtggcccagaccccccctcgggggattggacacttggccgataagtggccaaaaagcggccgtgtgtccccggggggttcggggtgcctcgtcatacccctcgggcccgaggggctgagtcatccccgaggccctagctcggccgccacgtggcagccacgtgggggctagaacgggcgggggcgctgtccgccagaggcatttatgggcagcgccccaaccgcccccatcgcatttaatgcgacgtggcaggtcgcgcgccgtccgccgatagacgtgcgccaggtgacctgctcttgaccggtctgcgacccggtgatggatggatgggacaggcggcagcgcacccacgcctcattttgtgtcagacggcgtgggggctggtatgccccgtcccatcatctgcagagaatagacatgcgggtcaatactccccacgcacgtgagcccacgaagtcaccaagaagttattagggaatgacaagggatgttcgccgtgtcaggtggaggacttcggtggggaccacccaagggcggccacacgaatcgcttccggcccaagccgtggaccacttttcaatctaggcatgtgtgggcccctctcccagaggagggcgtaggggcggtgcatgtggtatccccttcaactatgaaaggaggaccttgccctacgagcaaggggacgactcttgatatatcagatttgaggcataggctagcaaaaccctagtttgttcacctgggatcctagttctctgtaactgttcaaagatcaacgcacacacaggagtagggtgttacgctctatagtggcccgaacctggataacccctttaccttgatttcttcaccatccacctcgcaaaccaaatcactgcggatccgactcgcttgggtgagatttcgttcctaagcatcgcttccagtcccttggccgaactcatgaaggggggcctcacagcctcctgctagagaggatcactcctcaacacatacattccacaaggaaaggatcacatcagctcaaacctattgttatttgttctttgagaagtccaatgcaacttctctctttgtttgtcttctcactagaacggataccctcatctcaatcgagcggtaagccccatctcaatcgggcacggcgctcgtcacaggctagaagtcactgatgtgaaaagtaatctcaatcgggcaaatggtcgtcactgatgaacctatctcaatcgggctctaattgaagcccgtcatcgatagctttgacctagtctaccagttaaactatagcccgtcatagatgacctatctcaatcgggccacaaataaagcccgtcacagatgactactaacctcagtcgggcctaaactatagcatgtcacagatcacactcatcttaatcgggcctaaactacagcctgtcacagatgactgctggcctcaatcgggcctaaactagagcccgtcacagatgaccatcatctcaatcgggtatttagttatggcccatcacagataactataatccacaaaaaaaaataatttttgttttttggctagcctcaagcctttgctagccatgcccgctgcaaaaatgacagaaacaaacacagatatcaaatatccccagatccccagcatcacccattcatatacatatgcattcacatacatagacatcaatatatttcacacaaccacacattcacagtcatctcatatttcacatccattcacatatttcataatcattcaaatatttatcatatttcacctgcaaaactgagttaattggatcaaatatttatttagcaagtcttaacataaacatatgaaatatatacatagatataagcatcacagttacatcatcacagttacataataagtgttcatcattgcctaaacataaaagttcaacattgttcatcattttattttaagcctaaacattcctttgggttaattatttcgcggaagatgaagctggctatctcctcgcgaatctcctcaaagctagtaggcagagacatggtaattgtgccctacattgtcataattcgagattagttcatcgatcatatataagtactaaaatgtagttactctatcacaattgagaccaccgacctcaaaatcagccaaagtcttcaccttttctgtgtacagaaggcgcatgttgtggcacacatggaatcggcactggtcacctatttgttgcttcaccaggaagtcttttttgtggatgagggtgtcatgtcctgtcttcctgaggcctcctctttgcacatattgggcccgcgcttcatctatcgctagttgaattggggtccaatcatatgcgttcttatcaattctggagttcaggtagtgacatgtactccacttaggtgttatgaccagaaggatccaatgggcactgtggcattaatatagtgaaagttaattaagtactgaaggaatgtgtcatgctattgtgtatatttagataacacacttactattgattataggcgcacataatgtactccttgtctcggcggggccacaaggtgtcgtagatgtagttgacaattccttgacggttattctggagatttgtgacagtgaccacttgtggatcaaggaaggcaacttccggtgaattcttctgacaccattgccaacttaacctacacacaagataaacgatcttgtaagcgagttaaaccgattgttattaccagattgagttgggcgacaatacttacaaggagtagcacttaaggaggcttgtgtccaccgcttggagcctgtagaggtcgaatagatccttgaagtcgaccacgatataatttgttggaccaaggaatggctttccatcgtgctctccaaggatgtcgatagctttattcggcctcctggcgttagatttctccatgtagtatacgtgaaggtccttgcaagtggtgcccattgcggcaagcacgtcatctccaaccaatggtatgcctagttggaactcctgtggagcgacgtatttcttcttgacctctttgcccttagtctcttcctggcccttgcccagatctagcttccttggagctagaagcgaggcctgcacctttcctccccttcctctcccctttgcttcgggtttatcgatagtaattctctgaggggaagagtgtgccttcctgctcttcttcatcggtgggggttcatgaatcgccttgctgccggcctccgttcggtcctccccaaaatccatgtcatactgcaactgcacatcgtaagattatgcatgacgatcttgagcaggaggggttgaaggagcagatgcgggtctctttggtggacgaccgcctggtgcagtggttggcctcgctgtaacccttatctcaatgaggtccttgggccattggatgaaggtaccacgggcatttccaagtgagaggacctcgtcgttcggtggatacttcagtgggaacagctcgtattcaggcttcaccgagtcgacttgaacttttgcatagtcgcccctaagttgcgctccatgcactcttgtctctggggttggcttgtacgcaagtccctcggctgctggaaccgtgaaggtcggcatcaccctaactgtgagggtgcagctcgttggttcctgcgatagattcatcaatttttttagaatattatatatcatatggattcgttaagtttttcatgcattgtggacaaaacttttaccgttatgtggtcgacggcgctgtcgaccgatgttggattttccgccaactcagttgatgcacaactgctacgtttttgggtgggacttcctaactcttcgtgtacagcagcagcggcgccctaggggttctgttgctcttctcggatctcttgcctatcttggtcctcatcgactcgagcttttcgtcgaattcagatgtcagctccgctcttatcgatgcctggatcttggtttcaaggcgtgcatctttctccgccttgttggaagtccgcttcttgtactgccacgtatagtctggaaatccatacttccagggaacggaagacccaacgccccgtgttcgtccacggtgttccttgttgcccaacgttttcgtgaggaggtcgtcctcgcgtctttgagagcaggcctcttgcgaggcttgttgctcggcaaccaactccttctgcattacaatttagtgtggttaaataaattgcacgatgggaaacaatgcgaacatctattttgactagacacttactatagcatcgtacactcgttgatcttctggatttggcatgaagattgtgccatgagcattcttctggtacctggccctggccaagttccttgctcgagggtgtgggatatcgccaaacatgagcggcgtgttcgattcctccgcttgttcatcctcctgctgccattcctcttccttaccgacatatccggcggtgccaagccggtgcggatgctggttcttggtctggagcaagcgatatgcctcccttctagctctggactcgggggtcgacttcttcgcatggaattcctcccagacctattccgtgatccaaggaaatttctcttttggatctggattcgccgggttgtagacgaactcaccgactagcttagtcttgaagttcttccaagcattgcccataactttaaaaacagtctacctgatacggtcctcatgctccgtaggataatcgaagctctccttgaacgttagccaagcaatgtccttctctgcggccggcacatgcttgatgtcatcttgcagaatactaaatttctgcctccctatgaccctgcagatagacctaaatcggctcaatattttccttggagatgtcggcaaccctacttggtccaccgctgttatgcggaaccgttccttagggattttgttccttgtcctaggagtacgtgcccttgaggactcactagttgtcatcgacattggttcgccttgctgagacatcgtctactttttttcaaaataacgaaaatacacaattcagtgcttcaatggcttagaatccaaagttctaaaatcacttattcacgtaaataaactaaattgcacatctcacaaatctaataaactgaattgaatatcacatataaataaattaaacatttcatctattcatccacattcatctatgcataaacattcatctattcaaacacattcatctaatcatctattcatcacattcatcaatcgaaccacattcatctattcatcattcatgcgcgatggaggactcacctgggggtcggcgtcgggctcggtggaggcggcaggctcggtggtggtggcgtcgggctcagtagagggcgtcgccggggtcggtggtggctgcgccgagctcggtggaggcggcaggctcggtggcggcgtcgccggggtagatggtggctgcgctgggctcggtggaggcggcgtcgggcgtcggaggctcggtggaggcggcaggctcggtggcggcggcctcgagctcggcgagggaggagtcggcgaaggaggagttggcggcggcggatagtctcgatggcggcggcgccgggctcggtggagggcgtcgctggggttggtggaggcggcggcgtgctcggtggaggcggcgtcgggcgtcggagaggaggaggcgacgacgatgacgaaggatgtcgccaggcttggtgggggtcgtcggtgaggaggcggcggcggtccgaatggagggcggaggaggctcggtggcggcgggctcggtggcgacggcggcgggctcgacgatggaggacgacagcagcgctagggttctaaggaggcaggaaactgtagcgggacttagaaaaaaattcgatccgatatgagaaaccctagttatagtagagtgatgagtcatctcaattgggcattgccagagggcccatcagagatgactcatcggtgacgggctccatactaatgcccgattgagatgacactcaggcccatcacggatgactcatctgtgacgggccctaagataatgcccgatagagatagattaatctctatcggacttaaagtaaggcccgtcaccgatgactatttttctatttttcccatcaagtctatatttgtgagtgcaaaatatatagctgctatataataattcaatttgttagtcataatacattttcggatagtaaatgatttcaaatcgaaatatggtcaacaacaaaattgtagagcttatcaaggacaacttttattttggtcatttgactatataattttgttcccaacagcttgaaattgattttgaaaatatgacaaattaaaacagcatttgtaaatattaaatgatttcaaatgaaaaagtcaacaacaacaaagttgatcctctcatcatgatctacaacttttatttgggtcatttgtctctataactttgttcccaacagcctgaaattgaatttgaatatatgacaaatttatacaacatttgtaaatattaaatgatttcaaatggaaaagccataaacagcaaagttgtaaaacatatctaagatctacaacttttatgttggtcacttcttcatccgacaaagtgatagtaccaatgtttacaaaattgacatatctgtattgatgtttataaaccagatgagagaaatgtgatttttgtgaataatataactgtcattttgtcggatgaagaagtgaccaaaataaaagttgtagatcttaataagttgtacaactttgctgtttatggattttccaattgaaatcatttaatatttacaaatgttgtttagatttgtcatatattaaaattcaatttcaaactatttggaaaaaagttatatagaagaatgactaaaataaaagttgtagatcttgatgagaggatcaactttgttgttgaccatatttccatttgaaatcatttagtatttacaaatgttgtttaaatttgtcatatattcaaattcaatttcaaactgtcaggaaaaaagttatatagaaaaatgtccaaaataaaagttgtagatcttgaaaggctctacaagtttgttgttgaccatatttacatttgaaatcatttactattggaaatatattatgactaataaaatgaattattacacagcagctatatattttgcactcacaaatacaaatacttgaaatggaaaaatggaaaaatagtcatcggtgacgggccttagtttaagcccgatagagattaatctatctctatcgggtattgccgtagggcccgtcacagatgactcatcggtgacgggctccatactaatgcc

SEQ ID NO: 6227 - DNA, 2617 bp, Oryza sativa
atactcttgtatcaaaattttaaaaaatggatgtaacatttatatgctgcacaaaatcctcataaatttgagatgtgattgagaattcaaaagtcaatgatcaattgggtgtttttgtgaaacttttggaccataaaacctagggttatgtgtcacatgacaaaatccctgtggttttgggtaacttggaccataataataatagggagagtttaataaaatatactcctatttatttgttgtaatacctcaattccaaggttcatgcttttcagatatatgcccattttggttggatgatataacatatttacatatagtttactggagttatatgttatctgggcaagccacaaagttgctgctatgatgcagtccttctagtttatagccttaagagcatttgatcaatttgataaactcgtatgtaaatactacagtgattttggatgaaatgtaactgagaattttactggctggttatcattgtaccacaatttagtcagcacttgcatcagcctctttccaggaaacgcttgtggttcacttggcttgctattgtttcgagtcccggaaatgttgggggtgctttttttatcaatgacatgcttacacttgggcttatgcactatgatgcaacatgtgtataatcggttattgctcaattatgcagcatttagaggagtctcttggtccgttgtcaaaagagagagaaagcttgttgcaagagcatgaagctttgaaggaaaagcttgatcaggagtatcatcagctggcagaaagaaaaagggaattccagcaggaaattgatgcactcgagacacacaatgagcgtatcaaagggtataaaactcatattgctcctgaattttagtttgtccaacttctactatctatgtttactcctgaatccttttaggtacctgaattcaaagaagggcgagaagcttaatgaactacaggaaaaacatactcagttgcagtctgatctacagaaaagtaaggaaagaaaagaagaaaaatcggcggagttaagcaagaacaaagagctattgaagagccaagatcagttgaaaagaaacattgatgacaaccttaactacaggagaacaaaggatgaagtggaacgacttactcatgaaatagaattacttgaggacaaaatactttccattggcagcctgtctactatagaagcggatcttaagcaacattcacaagaaaaagataggcttctttcagaggtattttatatctcatttgaaacaactgacagttgcatctaataagatggcgttcttttatgctctgtttctgtaatcattaacatacaatacgtatggcaatgtatgtatttcttaatgtcatgttcacatgttccagtaatgaatttaaaaggaaattttactcagaagattgtgatcaccctaattctttttggcaacttatgcagtataataggtgtcaaggaacgcagtccgtttatcaaagtaatatttcaaaacacaagcttgaacttaaacagacgcagtacaaggatattgagaagcgatactttaaccaacttcttcaactaagggttgatggcatgaatgtccaggttcattttctttggtttttgatcttgttgcttgatctaatagctgatgtgactgcagacaactgagatggcaaacaaggacttggaccgatactatgctgctttggataagtgagtacgtctcaccatcactatgtgctattatgttctcatttttcttgtagttactccccaagatttaagtaagtgatactgactttctgaacattgttcttttcacttcaataagcaaggtttgaaaaaaagctaagtgagtaagtgatactcatgtggttgcccccctagtattgattatttgattatgcataaccggcaatggaagattgtgtgatctaacctatgtatgccaacaggaagggggcaccagttacatatatatgctctaagaatagaccagtatattgaacactagtaataagaagcatcctttttgttccttgtttaaagatttgccttccttctactatgtattaatagactgaaaatgtcacgtttgtgtcaactgttataaatttccttgtttaaacactgaaattgtttattgccgtatctgttatatcagatttgtcccttataaactgaaaacattgaaatcccatagtcttctctctgccaagaaaattgcgttgctgtcttatgaatctgttttttttttctaattttattagcatgaaattcttatgtagtactccttccgttccatattgatcatgatgtaaccaaaaaacagaaattccaaattgatcatcatataaccctgaccctttcgtttgacgtgtagtattattattgtatttatgcatgcaaattgagtttgcatacagggcatttgggggtggtaaagttcctgtttcttgtgtatgggggaagttaaagtctgcatgtttcttgattttctcccatcatatactcacattaaatgaaatacaaggaagttaatgcttctcttggtcttgatgaaaatacttatgtgatgatcaatatggaatggagggaatacattctatgatgaacata

SEQ ID NO: 6228 - DNA, 2692 bp, Oryza sativa
aagtagtatcctttgcatgatcaaattaatcggtactgtagcatatgttgtaaactctgttaagagcatgttaatgagttgtccctgtgtactctagtctatgtgtatcttcaattgttatttcttttatacggaactatgagcattccataaaatctgcaacacaactaaattgcagaccacccttaggctaaaccaatcacataatgcaactagtgaggttagaagtccccctgaatgttgttatatttgctgcagtgtaataacaagagtagtcttagttatcatagtatatttattatgtctattttagggcataatatgttgcgatttgtagatctttttttatttggtctcatttaaattagagtactgtatcatgacactgggttgttaccagattatcactccctcctgcagaggggcatgggcatgaatatggtgaagagcaagcaagcactgctactcctggaagactcttgttgtcaaatgatagccacatagcaggttttcaacaagtatgtcaaccgcaaatcaaaataaacatgcctgctggaagagaatccatctataagtgtgagcccattattgagatacctccaagtccagaacatgaatatgaagaatcaccttatgagcaagaattatatgaagatgatctttgtgatattgaagataccataccagaattacagtatgattttgaaatagatctgtgttcactaaagcacacggtgaataatggctcttggacaccaaactctggaaaagacttggccttgattaattcacagcatgcctctgttcaaaacaaaaggttgaaaaacatagggcgtcttagaacagaacacaacgcgtatgtaaccctgttttttttatatactgctatattatcctgaaaaatcaaacggtatcttgctaagcttgataagttgttgtcacaggtacgtcctcccagatgatcatgcaatcttggaagaggtatgttgtatgccatgagcctgtaagttcaatttttactacaatgatgaaatatatttagtgaccggtttgcaatgtctaccagtttgaagatagagttccagaagatccatgtccttatcttctagttgttatttcttgttctgatgaacacacagtgaaaggcacaattctggtgagcaaccacttgtttggaacataactgtaaggtgcagtgtaaaagataatattgtgctctcgattctcaagtaacatgggctcattattaaacagagtcaaaactcagattcagaattttggggatatgcatatctatataaaacaatgttgatatttgtaccaaaagttaccgaaattgaagttaatatcaaaattaacaaaattttcatttgaacttatgagaccatatcacattgttgaacttacagaaattcaattgtagatatttcttacaaggtagaatgagaggtttttcaactgtaaattctgtcataaacatcttatgcaaattcaaaatcataagaaacaagtgatagtttcttatcttctgtgttctcagtttggaggaaattagtacgagttgatccacaaccctcactattctaaggacaatattttttgtttctatatgtaaccttaaattagttttcacttaataaagattataatatgagtaatttttttctcctttttgattagtttttgcactcactattgaacagataccctgtcggacagcaaccagaggaaactttccattgaatggtacctactttcaggatcatgaggtttgcagcatttggtcctcttcactccaatttcatcttatgtacatttactagttataaataagatgaagaccatattggctagacattgatctgttatatatattatcctttacaggtttttgcagatcattcatctagccgttccccgattaccatccctagagaatgcatctggaacctagatagatgcattgtatattttggctcgtcgatacaatcgatcatgaaaggtattgtttgctgaaaggcgaacctgagattcatgaaataattgctttgactgatactaagttgaagtaatcatcaattccaggtcaaacaaggcaagacattgaggactgctacaagaaaggtaccaagtggttgtaagatttatttcctctttgatgtttctgtcttcgacagtccgacagaatttagatactgaataagctaggtatcttacaattaaaaataaacatagctagaacataagggcctgtttggataggggtgactggcattaagtagattaagatatagtttgaagttgagccatatcccacaaatttcgaaagctatttcagctcaaacagctgaaggccagggataaatcagtgaacctcagaaaattcctactgaaagtgcatccgcttatgcgtagcataatgataccctgttaggtattgttgggtttgaaggggattgaagaggattggggggattgagagggaataatttcaccccccgataggtgtggaataaatcccctccaatccctctcatggggattaaccgaacaggccttaggtggagtcaacccacaactccaccagtacactacaaatataccaatacactacaaatatgattccctttaagaaattgtatatgattcattttcttgaatcagttaaacacaattaagttgcaattttttt

SEQ ID NO: 6229 - DNA, 1593 bp, Oryza sativa
ctagtaaaagaaaggatatcataaaagagtactccctccatcccataatataaggcacccacgcatttcaagattccacattcaaaacattttgaccaacatttagtacaatatgaatcgaattttacttgctaaaaattgtataatcggattgacatttgaatttactttcatatggctataattttgttactacaaaccttataatatttgagaaattataagacaaagattagttttggggaccgtgtcaagtttgaccatgccttatatcatgggatagagggagtacctacctaatctattaggattagcagttttacttcctttctgaataagatttgcattaagggtataaatacccaataggaggtcataaaaagtttagccaaaccaagtgagaagcatttgcagtcgagtggcttccttccattcggtgctggtcgctaagaagcatttgcagtgttcacccatctgtagaatctagatcaactgtggttattttcactgctagttggtccgatggtgccgtcgacactgttgacccgtcatgcttctacttctctaccacatagtgttgcacactagttggcatgggtccaaggactgagggttgggcgtgccttgattgatcagctatgctgccactaacgttctgagctctggttgataggcgaggagaatagagaacctttgtttattctttgcttcaataattctgagagatgtgttcccttctaaaagagcagcttacaaccaccgagcaaaccagatgagacacgagtatcttcttcaagagagagctagcaaagtatctcgtttcctaaataatggactttgtacttccttggtgcaaagggtcaggggtcagccagcattaccagttcactcctgctgcggcagcaaatgcatgcatcttgtccctttcttttgcttcttccttggtccaagactgttgcccacatggtgcacaaagcccatagcatgtacctacagcttgttgtatgaattattttgaattgcatcctttattttttgtgtaggccttgtatgttgacacatgattagtggagtaggggcttacatcttgggatgactgtgataatagaatatgctcagatgtttgtttttctgctaggaagtttcacccaacttgcattttacaattttgtgtttatattttctgctagggctcttatgcggttccacaccatgaaaatggaggagataaacaaaataatcaaggaactgtggcaacagacatataggggccaagatatcgactatataagcattaattctgactctgagggtgctggcactcgatcatacagctatcgtgtaagttaaattagctaacccttgattaactttcttggattgttcgtcagggttcacttgttttcaacttccttttaggttgtcatgcaaacaggtgatgctgagctggaaatgcgagggcgctgcagtgccggccagaaggtaaattttggcgatgtttatttttcactggtaattcagtcaatttattgacaggtttgctgtcttcttttaagcagtacacctgttggataagtgctagaattattttgt

SEQ ID NO: 6230 - DNA, 41765 bp, Oryza sativa
  unsure (1)..(41765): unsure at all n locations
gcgtcaaatatttagaaacggagggagtattttatttattttgtgcgcaacaacttagacatggttttattttttagttgattaccccgtgccttaccatctttgcaaaattgtaatggaggtattagaaaattaaagaatcaagatccctcattttgtggatctactcatgtagaaacatcccttctaagttccatgttcaatgtccattgaattagtagtgtgctttggagcaaatggttgttgtgatgaccttcatagtgtctattgatcctagtgaggcactgttcataattttcttgcaatttttgctatagtatttaataacactattctgaccagatcattgatacaatcttcttccagagctgtttgaaaaggcagtgtattttaaattataattttctttccagatatcagttctattgaagagaatgcttttgagtggcgctcactaatatactggtctgtcttctatgttttccaaatgatgcaacttccttttaattctctgttcttaacatgctataccagttattgatgatgagacttgtgaagaaaggcttgaggacatgagaaggcgtggagataagaatttctacatgtgtaaagtcaaaaaggactttgtaattgatgcaacattcaaaggaaatgattgccgcttttttaaccacagttgtgaacctaattgccagttacagaaatggttagagtgctctttactcgctgatgcattatatcaatttcacattttgcttagggttgttttcttgttaaattggtcatttggtagctaagctttctgcttaaacaaattaagattgtttcaattacttttttttttgtttttccaggcaagtcaatggcaagacaaggctaggtgtgtttgcttcaaaagctatagaagtgggggaacccttgacctacgactacaggtacctgttcttatcaccatgaagggtttttgtcctttacagcacgagaattttaacctgatttttataacctatctttttaccatcaaagatttttcttattctcgcattattcagttttcgcctgctgaagtgcataactcagaactgttagctcagcctacaaaatattatgaccataaaaatatatgttgagacttctattcaattatatgtgtaatactaattactccctccgtttcacaatgtaagtcattctagtatttttcacattcatattgattttaatgaatctagatagatatatatgtctagattcattaatatcaatatgaatgtgggaaatgttagaatgacttacattgtgaaacggagggagtactaagtattggtaattatgtttcatagttctttttgcatgtttatcccagtttcatttgagtacttggtaaatccttgaaaagtactacctccatttcagattataagactttctagcattgcccacattcatatatgtatgcctagattcgttaacatctatatgaatgtgggcaatgctagaaagtcttataatatgaaacggaggaagtatatattacctatcactatatgacaattgaatctgctttctttggcctcaaatatatatatcttttgtacggagtacatacacgcaaccgagattttcaaaacttagtatcaatatcttattttaatattttgattggtaaatatgagaatcatatgatatttgcatatttctcttgaaaaacactatcagaatagaatattatttctactccctctggttattaatatcacttttgggcataaatgcaatgcaaccaaaattcgaaattttgagtatcaacattttttttccttatttggattgcatatatgaaaatcgtctgctcatttgtcatgaaaattactttcataggattttttttatttgggtcgtacatccccttgtgtgaaagtaatttcttagtatatatttatactccaaaggaatttttcatgacaattactttcttatttgagtatatatttaatacactcattagtgaccatcaaagagatttttccataaacaaaataaaaaaaacagttgtcatattactttggttcaaaaggtgttgaacagaatcacaaagagatcctctatttgcttgaaaaaggatatgcatgatgcagttgatgaccacagtattctggcttctgttttgtagattcgagcaacattatggtcctgaaatagaatgtttttgcggggctcaaaactgccaagggaatatgtctgtgagtggtaaagattgatttaagttgtatgctgttaggaggtacatagaaggtccaaggccatggcaaatggcagtaaattcaacatatagtgaatattgattgggaagcacattctattcctgtctttacaatgtgtcatagacaatttgttcgtactcatccttctggtttaggcttgcaatagtgttatacaatagggtaccctatacaccattctttgatgtgttcaaattttactactatgtaagtacgacaaacgcatagtgtaaatattgatacagtgctatatactattctttagactccatatatcctaaactttgagtgaacgtctgtctagcaccctacactataaaaccatatgcatctgaatttgttctgagtatactccatttccctctagatagttggagggtgtttttatacctagcaaggacaagtattggaggagattagaatttgcagtaactatttactgaatgtttttgcaagtgtttgttattagtatgtctgaagttagggctatcaaccaagcaagcttgagctggatagaagctcaggtcgagcctaaattggcctacaagctagctttcatgtcaggaggctcaatgaagcgctcgataccagcattttttagcatgaaacctcttattgaagatgggagatcagcttttaataaatcaacagctatattttaatacagtttgtaaagaaagcctcagtgaaatcaattataagttgcaaccataaaacaatctgaagcattgtgtgtcatcgttttgattatcatagctcatagatgggcactccgccactccgtagttcagttgtaccatacagattcctcatgaatgacccactggcccagacggctccccaagaaatcaatcgcctgggccatgaccatgacactgccaagcatgcatagcatagtactccttttgcagattaaggaaagtgacaatgctgcaccctagattttcgtgagaacaatgcatccaacattcccactatcagattcgatcatttactgttgcacatacaaaaagaaatggagtgattatctttacaggtcacaaagcagtcaaaatgactccatgtctctctcaaggctctatcaacatccctccccttacatacagtgatacagataaggagttcagaattcagaagaagcccatacatatatgaacaggggtgtactgcaaaagtttgctcgagatcagggccagaatgcaaaccaaaggtcttctgcagcgctgcatgtgccatgtccgtccccaaatcaacaaaagaaagagagaaaagaaagcagcagcagcaaaagataaagaagcctgtgaaaagaagcaaaagagaaaccggagaggaggagcccctttttctttacatctttctcggggaaagggcctctctttgatcagacagaaactacacactgtggtctaaaactaaaaagcatctcaatcactttgaaactactcgtactactccagctagcaacaaatccaatcccttccctctgtaatatatttttcttctctttttttcctgaagtactctccctgaatatctgattctctgaatttctttttcagtgctctgaatgctctgctgcattctgctgctaccttggccctgacagctccatctcctctaccatgtcgatggaccgcacctcgtcgctgctaaggctgctgtcgttgtcgtggaagtcgttgaagaagacggagccgttggagtcgttgcggtggtcgtagccgagctcatggggcgccgccgccgccgccatcgccgccggccggtggttggcctcccatttctcggcgagcccgtctccctccagcatccggaccacctccgacatcctcggccggtgagacggctggaactgggtgcagagcagcgccacctgcaccatctccgccacctctatcctgtcgtagtgaggccccaaatcttggtccactagcaagtcatgcagcttctcttggtgcaccttcctcaccttcattttgataacacgatcgaacgaaaacaaaaaagaagaaaattttcagatcatttacacatggagattaagtagttgaagacattgtcatttttcagaagcaagtcatttgcatgccatatgcagagtgaacagtacgtgggaggacgatcagcattcaaacatgcagtggcaatgcttgcaggattgcgttagtatgtcaggttcatagtactcgcaattaatcttagactgacagttggggcgcctactgactactgtcattcgagcatcagattcactagaagttgctattgaatgagcagcgcctcaaagtgcagtgagccagtgaccgcgcgcgcaatgaacgcacatgctagtgtactggatggatctttcgcaaaagatttgcgaactttaccaaagacattcacgtacgggctcgatcaaagcaaccgaggcttttaattcgtcaaacaagaactagtgcaacatcttttcgatcacggctcaaacagcagctaaaaaaagctgaaaattggagaagaaatgtggaagtgcatgcttacccaatcgagcatgacgcccttctggtgctggatgacgccggagcccttgccgacctcgagcgcgcgctggccggtgacgagctcgagcagcaggatgccgaagccgaacacgtcggtcttctccgacgactgccccgtggagaggtactccggcgcgatgtgccccaccgtgccgcgcaccgccgtggtgacgtgggagtcgccgtggtcgagcagcttggcgagcccgaagtcgccgacgacggcctcgtggcactcgtccagcagcacgttcgcggccttcacgtcgcggtggatgatctttgggtcgcactgctcgtgcaggtacagcaatcccctcgccgtccccaccgcgatccgcttcctcgtctgccagtccagcggcggcttcccttcataaattttttgcgtaacaaatgtttcaacaaaatttgctccaaacaatttcagttctcaatgcgcagcacaagacaacaaaacgccaattgcttgtgagtataaatgctgcatacagttgctatgtttgaaccagcaaggtacgtagggtatacagaacccgtacgtccccctgcatcgtgaacaaaaaccacgaacgcggccaacgtacgtactactgaaataacgacgtgtacagtatgccacaaacttgttggcacatgcgagcacgcagcaacaagccggcaacagcgaccagacacacgggctcgtagcgtagctggggcacgtatagcctgtgctgccgctggctgcctcccctgcaacagctgcggctagggagaggaggaggccggccccctgccggaataaaagaagaaacaaacgtttccctgcaactcccctgaccggtggccccctcccacccggaccaccacaccgatctccaaaaaccccaagcaccgtggcagcactactcctactgttactccctctgttccaaaataagtacaattatggttttccgcgtctaactttaaccgttcgtcttatttaaaaactttttgaaaaaattaaaaacataagccatgaataaagtactattcatgttttatcatctcataacaacaaaaatactaattataaaaaaatttcaaataaaacggataatcaaagttgggtacagaaacttatggctacacttattttgggacggaggtagtactgtataaaaaccatcgcaatgatcgcgttacacccagacctcaaccctgagcccctgatgaccactcgtcatcatgtttgcccaatttactgctacagccgcggcggccggtgaaccagccgcacgccgttgttgcgccgcgcagcgaggaaggacgcgcacgccggtgaagcggacaaaacgtgagtgcggtggcgcctggcgagtggggcccgtgggggaggaggcaaagtacaggacggggtggaggcgcgaccacgcctgaccacgctgacacacagggggacggggactacgactgatccatccccatgactcctgcgtgcaccccaacgcgcacgcgggacccacacaccacgcacccacgaaatcgacactaccactgtgttgcgtgtgtcacgttaagcgtacgtaacgtacctcgaaggcgggaggcgacgctgccgttgggcatgtaggggtagacgaggaggcgctcgccggaggccgcggcgcagaagccgacgaggcggaggaggtggcggtgcacggcgaggctgatcatctccacctccgtccggaactgcgcctccccggacgcggtcgggtccttgagccgcttcaccgccacgaccgtgccgtcggagagcctcccccggtacacgtccccgaaccctcctttccccagtatgttcctcgcgctgaacccgtccgtcgccgcgtgcagctccctcagcccgaactgcctcacgttccccagcctcgccatcacctcccctcctcccccatcctccacgtctctccccttctctgaaatcaccaattacactcacatattaactaactgatcgatcgtgcattttagtactggtgttgatggggacgtggcgtaccgaggatgccgaggacggaggaggggcccgagaggaggcagcggtgccggcgcctgcgcctccagagaaagcaggagacggcgaggagcacaagcgcggaggcgccaaggcttgtccctactccgatcggcaaccgcgcggcgcctcctccaccctttgacctccccaccgctgccgctgccgcccctgcagtgcacacgtacaccgcgcatgcatgcacatacgcccaaacgaacacgattaaactccctccgatcccccaaaccgatcgatcccaagaatgcaaagacaagacgagaggaggttggactcactgctgctgctgctcggagtggagtccagcgggaatggcacggtgaccggggcgaccacggtggcgcactccgctgcgttcgcgttccccgcatggctgccgctgctgctcccgcatatcattggattgcccacgacgctgcatgcgtgcacgcataacatgattgaaaaaggaaaaaaaaacacggcatcagattcgaaaacatccaagggatatttctatagtattttataagttgtaacagagctatagctagtggcggctggaatagaataagaagacgaatgcacgagcagtggtactagggaggagtagtccatacttgaatgttcttgtggggaagtgaggaacagggccagtgaggttgttgtaggacaagtccctgcaaaatcgcatgcacaccaaaccataccaagatcaatcacatcgatccgttcatcggctatgcaagacaaaaagaattgagacgatttgacagagttggattaattagcgtacaggaaggagagctgtgggatcttggccagcgacgacgggaacgccccggacaagctgttgttgtttagcctcctgcggcaagattaacacgcaagtgagacaaccatgaagaacttaaactattttagctttagtgtagagtagtaaagtatggaatggaatggaatgtgttggggggagagaagtgactgacaggtatcggagggtggagaggcggccgagcgtgtcggggacgcggccggagaagcggttgttggagaggtcgagcgtctgcagcctcggcagcgcgcccagctccggcggcagccggccggtgatgttgttgttctgcagcagcctgaaaacaaagtcgaagacaaacgacgtcatcatcaccatttgatgctctgctctgcttcttcctcctccatttctcccaagaacacgagatgaatcgattggaatctctaacagaagcaattaaacaagaaaacaaaagtttctttctcttgcttacacttgttcaagattggtgaggttggcgatcctgccggacagggtccccgacaatccctggctgggcgctcccctgagacgaggtacacaagcacgcattagtggagctgatcgagccggtcggctgccatttccggtctctcgctaagttgctcaaaacaagcaaaagctagacgacgacgacgaagactgagagagagagagagagagagagagagcgagcttacaggccgatgacgaggttgtgggcggagcaggtgaccatggcccagctgcaggggtcgacggagtcctcgtcccagttgttcagcacgccgtgcgggtcgaccagcccctgcctgatggcgatcagcgcctccactgcacgcgcattcgccgcgccaaatacaaccaacatgcggtctcatcagccgcagccatcttcggttccaagaaacgtcagacaagggcacgtaccttcagggttgaggggctcggaggagaaggcgaggaacggcgcgtaggagacgacgaggaagaagaggaggaggaagaggttggaggccattggaatgggggagcggagcagtgggaggaatgatggagaggagaggcgcccgagaggaagaaaagtgagaaggagggagaaggagaagcaggggtgaggggaggcaggcaggcaatcagccgtcgagcgagtggagtagtggctctgctttttctcgtgtgatggaggagggaaaggagaccgggggcggggagtgatgtgactgaatgccatggcaatattgggcatcttttggatgaagatgaaatgatcatgccatggaagctgacaggtggggcccactttgcagtgatcaattttggcctattggggtgagaggggagagggggagagaagaggctttgttttgatcttccaaagggggcccatgatgcagtgagtatgtatgtatgagcttctgaggtgaacattgttttgttttatctttcttctttggcattttatatgggagaattgtagggtttgtggatatacaagagaaggaggcccgtgaaatcgataagcaataatgctattgttatggatatgagtattttcaacacttcattataacgtgttgattcgcacggtacattagggatgagcctccgggggagagagagagcgaggatgaagtctagcggtttgtttggcagagctacaacttccaaatttagctttaggaggttggtctgcagtgaagctgtggaggagcctaaacctagcactctctagttcattttgtgagagagctccatccagctccgctcctattttaggtggagctgaaactgtttggctaagctccagcttccagagagatagagctggagttgagccaaacagacccctaggtgtctttcaatgcatgggttcctaagtgaagagagaatgttgtttatgatcgaaggcgaagagaattgaacaaaaaagttcaaaaattgaaccaagaaagaatttaagagatgttaccaccaagcaggaggtcaccatgggcagcagcgccacaacagggatagatggatcataggtacacaatgccagggacggagatagagtatgggagggggtgcctaggaacccagtcaaaaaaagttataactaccgattttcaccatatatgcacccccctaatacaaatttagacacacccatcagcttaaacttgatataaagtagagtaaattaagcaagaggcaccctcttccatttcgttctagctccgctccagtgccaaattaaagctctcatgctcgaaccaaacactattgtctaaggggtgatcaggggaacaagaggggtttcaacccgtactacccgtacaaaccagtggataccttttttttataaagacatgttcatatttgctaggtataggagaatgtatcgaaactctattcttctaatatattgacgtgcaattcttttgtgcgttcgtgaaaaaaaaggtataggagaagcttaatgatcgtagcataattagttcttttagttttctgaatagatacttataatatattcatgaatttgtttgacttctcttatatttaatccacttaattatatatattagtttgcttcgtttcattggcacctcctaaagtttggttatgcattcgctattggttgtctccttgaccacattcactgtggctacattttcccgagaccgaaatgtattggaggtaaccgaggagagatagagataaaggatcaaggttgatgtcttatgttaaattttcatagacaactctgtcaccactaggatagtgagctagcatcaccatatgttgggtttcaaattgcttattgctgaggacataagaagggtttcaaattattgtttgaccgttgacgagaacacgaggggtgaaaattagttagtatgtctgataagagcaagtttaataatatagtcaactactagctccaagtcaactatagtcaatataatagccaattcatacaatagttatctataagagcagatataatagcagactattagccgactataaacatattttaatgagataaaatatgagagagaaaagcagcagactccaagacgcagcgtgtgtagacaggtgggaccatatattaataatatagtaagcaactattgtatgaattggctattagattgactgtagatgaattggagctactaatgagctatactattaaacttgatttaaacatatactacactattaatacatggtctcacctatcatacacatattgtgtcttggagtccgtgctgcagctggctacagacttgtagctcgctgcttatctctcttcttttatcttctcgatgtgtgtttatagttggcttatattctgctattgtatctgctctaaatgatagtatcctgaggcaaattacacggcacaaaaaaaagtgatcaagtcgatgtatatgaacatacttgatgaaaattctaaagtgtagaaaaatctaattgttgtattatgttattttgtaatctattagattgaccctctcatggggtatatataggagtataaaggagatagagacttggagtataatacaaataagggtagatttatctctaggattctatctctaggactctattttatctctaggattctatctatataatttgtatttggctcttatctctaaccaacatatttgtacttctaacattccccctcagtcgtaacggaagcgaagcgaacaattacgactggatttgaaattttctatttcttcatcttctttgactcaccatcatcgattgcatctctcatggacggtcctccacctggtacctgcgtccccttatgtttcgtcccttgactctcctctattctccctcccgcaatcatagctagagtggcatggacgatagcgatgacatggacgctttgactgaagtttccgtcaatgatttttgttgtggacgttcatcgatgttgccgatcatgaagtagccatggttctaggtgtagccgcatgtagccgaaggcgaaaatttttttacgttgttgtgaagacgaaactgcaattgttaacatcttgcaccttgtagatgtcagaggatgtcattggggacgtcttgcatatgtcaggggatgtcgttggcgatgaggccaccacttttgcttggtccttctgtgccgtgtagtagtgatcacaatagtgataccgagttgatgcagtcgttgtcatcgtaaatgacgtgatcgatgtcgtcgtcgttgatgcggtcgttgtcgtcgtagaggacgcggtcgatgtcgtcgaagaagcgccatgctgatgtatctgtcagatgacgtgaggtgtccatctatatggacgagttggcggcaggaagttgatgaagaccactggtgacgtagaatcggcgaagacgatcgcgtagtcgtacaggttatcgatgcagcggctggcccgatcttgctgtagacttggcgatgatcgataggtgacgttggtcttaaagtagatcagtagatgtacatgctcgtagctgattagatcagtacaatacaagagtatatttatctctaaaattttatctttaggactttattttatctttagaattttatctctagtattatatctctataatttgtatttgacttttatctctaaccaacgcatctgtacttgtaacgtgaagtactaatgatagttccaacttccatgcatgtacttattcattagttagccaattagattccgttgccgaggggagcaatggaattcagaatcagtggcgttttgattcgtttgtcagggatacagagctgccgaacctggcccagggtatctcatgaaaaaaagaagggaataaaagccgttcattcaaaaaagaacgggaaggaaaaaaatcatattaccaaatgacatgtcgaccccgaaaagtgctgggcccacatgccagtgagacacggtccgtagtcgcgtgaagcaacaggtcaggtcaaaggtcagaagcgggtacactgggcgctactggccgtaggagttgtctgcctctccgagtccgggcagttgtacaattgtactataagccaatgtgctagtataccactagtctactctagatcagtacaggcagcgcactcacacacacatactagaacgcacatacatggaaaatgcattgctgatccagatacattctccggttgcgaaacacatggtgtactacgctacgcgaacgtgatgatctctttttcacgtagtactacacatacacccctctctgacaaagccaaagatgcaaaagatgacaagagtgaaaaaagaagcaaaagaaagacagaggagggggaaaggagagagaaacgtttgctgggaaagagaagcaaaagcaaccccccaaagatgagtgaagagaaaaagagacatgcatgcagatgcagtagtaggacatgcatgcagaggggaggcactctggtctctgccgctgctgctgctgctgctgccgctatctcgatccgtggctctcgtcttcctggccggccggccggccagccggtcgggggtctctctgtccctcactccctctctcgttctcttcccttgcattctctcgggccaaaagccgtgcgatccgctgggacaccggcgtgtggagcagggccctgccggctggccgcggcgagaaggggaatcatggccggatggaatggacgtgtagtagtagaatgatgcgtgttcgatcgagaggcgcgcgaacgcgagcttgtcatgatatgttccgcaaccgcgcgtgtcgcatggagtgttcgcggggtctgagttgttcgatcgtgtcggccgcgctagccctgcttcgcggctgctcctgcgtgccaatggcagccgcgaccggtgcacggcgaccgggctgatcggctaaagcgagctagcgagagcgcgactggtgctcatgcataaggtgacaagattaaaggtgcggtttcactagaagttgtgtcgtaccgggtgtatggctgtgtgcactgatcgaatttgtcactggttcctccctgaaaccgacagggtttcaggtgctgatcgagatgaaccaaaatgaacatatatgggttgcagtgtttggtctggctaccgtgttgcttagaagtaaccttgcatcaaccagcatcggtatacatacagacatgccacttgctgactttcatgcgggcaaccagcatcggtatacatacatacatacatattctcgttaactagtattcatcgaaccgagtaactttaagttagagcaaattaatactttaaattggacaaatgaaaaaaaaacatacatgtagattttctccaaaaattctttttttttaaaacaatcagaacaagatgagggcacgatgattcattgaatagtgtattaaaaaattgcaaggtcagtaccttagaaggcagtaataccaggaaaaaataccaccaccacacatcgagagcacctacacaaagtcaaagagaaggctagcacctgatcgaccatcactaaacgtgatcggtcaccgctagaccaataaaggaaggtatagccaggacggctcaaaaccaatccctagactgaactcaactctagccacgcctttgaaattgaggaggagagggtgagagaaaaaaaatggatccgctctccccctatggcccgtcaacgtggccaacttgcataagctaggacacagttgcaagaggataaaacaactagaaagagcttgcatcagctgccagagggaagttttggcaagggacctagatgatgtctccagcgagatgaacgatgatgagcaccaccgtcgccgtctattgaggtctcaaggaggaccaagataaggttttcacctggtagtcctaccagagtaagccatgttcttttttctaacaagagttggatgaagattaaaattttcgtggcacgtttttcaaactgctaaacggtgcgttttgtgtgaaaactttctatatgaaagttgctctaaaatgtcatattaatttatttttcaagtttgtaataattaaaactcaaccaatcatacgttaataccacctcgttttgcgtaaaaaaacttaattttcatctttatttttaagagaaaagaacctgctttaagttgccatatcttggacgatcgctacttaaaaaaagaagaattttcataggccctaccttggaggcttggactactaatatgatgctaaaagaaaacaacgtacattaatttcgcctacaatgatttacacaggcaaaatgtcttaggcaacaactcacattaatgtctaatagcataggtgtgccacaggcaaaatgtcttaggcaacaactcacattaatgtctaatagcataggtgtgccacttaaggtaatgcacgtgaaaattacacataagatggtcataaagaggcccgcctagacaaatgtgtatctgtgtatctttagacaatgctcctaattgtccgtccatgacttacacctttttattttcctcatgccactacttccactacctacacttccatcagtgatcacgactgggcttctcaaaattcgaatcacccgactcctctattgccacgccacacctcctcgcctccaactctttgcctattttccaatacatagagtgtaatgcaagtttttcgccgcaatatctccctctctctgcattctcttctatctctgccatattgggttcgagatgccaacactagtatgtcaccgttagcaaatacttttctctgtctcaaattatagagcactcctgtttctatgaaaatcaaactcgttaaattttgactaacaattacactagcaatatttatactaagtattatgcatactatatatttcaaaatattttatattatactaattttatagttattgataacataatattaaataattaataatcaaattatatcgttgaaaaccatgtaaaaaaatagatcttataatgtgatataatgtgagatagaggaagtagaatgtaaagacagagttgaacacaagaggaccgcctcgccccaacaccatcaccatcacacagaacatcgaacggggaactgacgagtatttcttcaacgggtcgcatatgctcaacttggtgtcacaattcaacaagctgaaggtgctagcaaatcatcaacacaaagttcgtttgaggcaaagacatgtgtcttttggttttcctcggttcatttccttgtggatgtaatgttcgtctgaattcacatatgaaaagagagaaaaattacaccgttggtgtaatttttagttgaagttagttcgttgttctctatgttcaggaggggtactgcccctgttgaatgatgcccaataaaatgtgattaacaactgagaagacatgaccaacagattaaccactacttttcttttagttattttgcatgatgtttgtagttcagtagattgttactgattgcttggtatagttatcaactcacaggggtacatcttcagataattcaaaaatcatacaaccatatccacaatttcatatatatgcataaacaaattctatacataaaaataaaattctattatgaattattcatccacataaatgtgtacatcgataggcaagcgcgtagcgcttattaattagtcattcatcaacacctacacacttatttatgcatacatgaataaggtgatctgaacacatagaacacaaactacacaagctaggaacacacaacaatataatctttggtaagcttcacgcgggtcgtgacgagcttacttgccatggccactgcccgcgtatgagccggctctggaccctgcatacgagccggagccggcaccagagcctccatgcgggccagcaccggagcccgcgtacgagccggcttccgagccagcgtacgaccctgcgcctccgccgttggagccggcatacgagcctgcactggaaccagcgtacgagcctgcgccggagccgccatctccaccattcgagccagcatacgagccagccctggagccggcgtatgaccccgcaccacctggccccgcgttcgagccggctcctgactcagcgctcgagccggccgatgagcctcctccacctgacctcgagctcgaacccgagcttgagccagaccacgaacctgacccagaccctgaaccggagcccgagcctgagccagagtaagacccggagcctgagccagagtaagacccggagccagagccgccgccaccaccaccaccaccaccaccaccgatgcccactccaatccccgagccgagtcccaggccaccgccggtgccgacgcccaatccgccgccaccgccaactccgaggccaccgccgaggttgacgcccaggtccttccttgcagcgcggccctcagccgcgagaacggccgccgcgaccaccgcgacgcccaacacgacgccggccttcacggaagccatatcgcgcaaacgcagacactctagccgtgcacacgcaggtgtctcaacctccggtgaccagtgctcctctgctgtactgctgtgtgtggtgtgatgaactgatggcttgatggattgatgagttcgtggtgggatttagcggtgaaatttatagggagcgcgcgcggttgtggtggtacgcatgcgtgcggtagctagcgcggctcgtcgtgtcgtaaggttttagtgggatttgcgtcggtgtcgcgaggttgtggccgcggccggcggagggcgtcgcgtagtggagcaatccggcctgtcccgcagatttgggcgcgctctcctcagcaatccgagcgacacgtacgtaaggcagaccggaccgagctgatcaacccatgtacgtaccgatcgatcaatcgtacgtcgatcattcgatccactaaacacggctagctagcttccaatcgattgaacgcacgagtgtgacgtattcgatcatgttggggcgtgtgagccaatgtaggtaaatctgtaggatggaatgcatgcagagatgagtccatgcagagcacttcagtttggattacggaagcttcgagagaaggcaatcgatctgaggactcgtgtcttttcatctctggttgaccactggcgctcgtactgcatgattagatttggtggtctccagctagctggtgcgccttgtcgttttctcttgttgtcaacgaaatccatgccacctggagtagttttgatttgacgaacaacgaccaaaccattagttctgcatatgggccgccaagaagcaagcagtgggccgagcttcaacttgacgggaaaaggtataccggaggtccctcatcttaccgccgagttacaaaatcgttcataaaccgaaaaaaacagatatatatatatatatgcatctcttaacttacaaaaccagatcactctaagtcgttagacggttttatccttggttttacctgacgtggcagttgagtcagcgtgtgacccacgtggaccccttcccctcctctcttcacctatctaactactgggtcccacaccattgttcacgctcagttgccacattcacatgccacgtgggcaaaagtagaaaccatctctttagagtggtaaaaaagagagcaaatctaaagggacatttggataactgccaaacttattagtgatgaaaattaaatttcctgtaaaaattagtcgccaacagctcatacacactaaaatgttactattccccaagaaaaaaggttatcgtcgaacacaaattgtgaatcaataataaaaagtttttataacatggccctggcataacccacaagttttttactccctccgtctcataatataagggattttgaatttttgtttgcactgtttgaccaatcgtcttatttaaaaaattttgaaattattattattattattttgacttactttattattcaaattattttaagcacaactttttatttttatatttgcataatttttttaaataagacgaggatggagggagtataacatggcattcatgaaaggaatttttttggcggggcatgaaaggacttcaatcttgacttacaaggacaatcttaaaaattgtagtaggtggtacgttcagaagaggtagatctctggtctctgacacgtaggtggtacttaaaaattgacgggatataaagaaacacgtatgaaacacgtatggatgagtcgatgcatgagcagagtattataaattgagataatttattgtatcggttttaccccgttatataatagacaaaatttaccacaggacacgtaaaaaaacgtgtaattggctgagagacaccgcgaaaatataatacggctgatggacactaaaaaagtataattagccataggacatcggtcgtattattttattatttccaggtcaaaagaggtgagatattttttaaatgcccatattgccccttctctttccttcttttcaccttcccgttgacttcgccgggaacgacacaacagccacagagagcgcggtggggtgaggtcagcacgacgagttgcgacgacattggcggccagggcggttgatggcatggcgccaccttggaggtgtggcgtctggccagatcgatggcgggcggttgacggtagtgccgatgtggcggggcgtggccgagtggaggaggagcttggccgggcagcggcaccaagcgcagggggaggcgccgacgcacggtggcctggcggcggtgccagtcgagctattctctcgcgtgcgctagctagagaggcggttggatcggagggagagcacccagaggccgcgtgcgccgacgagctgtgggcgacgagcccccatctccaactcccttatggccgtcctcgatgaccccttgtcagcagtgtcttcgccgaggccggattccgtagtggggacatcaagctcgccatcctccgcccagctccacccatgccgctcctcggccgcctccccacgcgcacccacccgccgtctctcttcctctgcagcttcgccaccgtggacgaccgacgtcccttcacatgttgtgaatctcgccagcgccggggaggactacgaagccgtcgacactcggtgggcaatccgagcatttcaaaaaaaatatcaccagtttcatcccaaaaatgataaaacaatgtttctagtatcttacagccaattacacaacttttgcagtgtccatgagcagtgtcacgtttttgcgatgtcccgaagccaattatacgtttttttgcgtgtcttgtagcaaaattttcctatataatatgtcacgatagtgtatcaatcatttctgtaatgtatcacatgaccaaattctttctcaaaatatacctaaaacatccttagaaatatagaaggctaacaattaatttatcctacaagaacttaaaaaaatgatatttttaaggcctccttgcacaacataaggatttgtatttgtttgtaagtttcaatatttttacaactataacttatcttttataatctacatacaatactttgtgctcattttttttaatgtaaatcatcatacatgtgctatacgcaatatttgcatggtactatcttttgagtaaacaattcctcgttcatatgtcacacacaaataactttaaaaaataaaacatgaaaacaaatcttaacccatatgctaaaaattctatgcaagaaggctaaaaaattcatatttttaaaaaacttctaacgggattaatcaatctacaatcttctatagtgcattttggccatgtttgagaaagtatccaatcagacgatacattgtagaaacaattaataaacttgatcaatggcatattataaagaaggcaaagttgatggtaaattattaaaccaatacaatgtcagtaatatcctacttcacttcttcttacagtttcttaggacacagtggctcgcaactggctccaaatgttggagatacataaaactttttaagagatagctacaacctactaattcttcatatccttcagcacgaaatttggatctatttgttgtcgctacgttggagtattataatgtcactatactgcaaagcacaaccatgcctacaagcaacttaggcgaagaaaacaaagagctataatctagcttaccttgttaaccacgatcaactggtcagtcgagttactaattgctatcttcccggagtatcttccatgcttagaatttgaggtgtttaggagggagctaggatggcacaatgaataacatattgcacaaaatttccaatgtttgcattttggttctccacatttcaagaatgcatgggatcggaccttcaccaaattagtcaattttatcacagattcagtgttaatcagaaaaatatatggtgaaaccacatgtagggtgaaaattttgaactttcttataaagttttcaaaagaatcacacatatgtcggaaatatgtaaatagacaaccatgcaaaattgcagcaacaaactcaacttcatcagctatataatactagaattatcttagataaatgtgataatttttttaggcgtcactacaaattagaccatcatgggtgtattaggtacagtagtatttaataattggtgctaaccaaagaatttctttttaaaaaagagtcagttttttaggctccaccccaaatgtacaacaaatatacacacggtctccaacccaaataatcaatacttgattttttttatatataaacatcttgtattatattatgatgaagatattttctacgaaaaatctattcattttcataaaaaataaatacccttaatttatatactgttggcatatataattaaatatataattaaggaagaaagttccactgaaaccgtacatttccaaacaagtaaattgcattagcggtaaacgaatttgttaggtgggtgcaatctagcgcatgaacttgaaaaacgcttgttttaatgcacaaacttgtttggtgcgtgcgaaccaaggccaaaatcacacgacaaggtttgatcttgctgatttttttatttgaatgctatgtaaacatgtatcttagaaggattcaaggatatcatgtagacaaagatctgtttagcaaaacatacaataaaggcatagtgattgtataaagaatgaaataaaaaaacaagtaataatgcaaggggtagaaacaaagaaagataaaatagaaaccaagtttacaaatatagcctttctaccatatgtgcatgcacatgatgtactaatttatgatgttcaacttagaagaattagccttttgtgtcgttttggccttagtagtgacgcaccacataagttcatataccaaaacaagcgttttataagtttatgcattaaattgcacccatctaataagttcataaaccgctgatgcaatttactctttccatacaaatcgttaaattaatctattatctctctataatacatctctcctattcatatatcatgaatgaaaatctacttgaatcttctttacatgatttaatcaaatgtatcactttttatttcacagacagcaatggaggcatggagcagtggacactctgaatttttatggcgattggcgacaactctccatgaacagtatcaactgggacatttaatttctgtcttaaatttcttttccaaatacgttactcttatggtgttattggtcacttcggactgtttgtctaacgagctttgttaccgtccatcatcctttttaagtacctcccggtacttgcaattggggctatccgttgagcctgatccaacggttcagaagcctcggtaccacaaggtacaagaatttggaagcctcggtactgcatgcacttgaacaggtggaagggcaaatttggatttttgacatagtgcatccgttttagtagagtccgtacggccgccggcaaccagctcctcccgatcccctccctggagcatcatctgcacagcggcgcggccaagctcgccggttgatccaagttagctggacacctctccgcctcccttattgcaacttgccgccgccacccaaccaacctagctccattttctgatgttgggcccaaaaaatcggtccgtcttcctcctgatgcagatggccattgaagatgatacaaactgctgaatttgtatcgtcaccatgagtcccgagggacaacccagaagacacttcatgcgagccttatgttttcaattttttacgcactctttcttttcttcctcttttttcattcctcccaagcaaaatctctagggagggtttgttttcttactcaccgtatcttttctacaagcaagatctgggccggggttgccgcaccaccacaactgaccggcgaacaacgtcaacgtccctgtgcgaaggccaccgcgtcggggtcactacgccaccgcagccgctgaacgaaatcggtgtcgccgttcgctgacgcgacacgcgtgagtgggaggataggaacgaatcgactagcagtcgccaccccgcccacactagtaactcgtttccttctttggaataccgatcatgaccctgatgacttaatggcttgatttcatttggtacctggcagtactagtaccttgaggtaccacttgatgatggaccgtagaaactctcctctaacatcttgacaacagaaactagaaagcaaacggcaaatgacaattagaacatttttatgatagtatggtaacgtccagaagaatcaacctttttttaagggaaaattgctctagacacacacttgagtgtccatctctccactttagcacaaagttgattgcaattgttattttgccacacactcgcggagtcatcgttttgcggaataagcaaaatgacatatttgcaaacgaaaagtaatttatgaataaaacttttatacacgtgttcttagtaatttaaaagcaaaggttgaaaaataaacttcgatgaaaaaacctcaaaattagctccaaatttaaaatttaaaatttaaattttggctgataagtataagcataagagcaggtacaatagcaggctataagccagctataaacatattttaaagagataaaggaagagagagaagagcagcgggctacagatctgtagccagctgcagcacggactccaagatgtaatgtgtgtatgacatgtgggaccaggtattaatagtatagtaaacaactattatatgaattggctatagatgatttggagttaatactattaagcgaaaagatgaggcaggtggtactcggtacatcataccattttttaaccggaaggtaacattagcaccgactctaccgcccatatatataaccacatgtgtcgggtaacaacaggcgtagctaccctttgccccctctctcacacaatttgactaaacagtggctcatcgtcagtcatcaccatccgcgcgcctagcttagctccaccggtgggctaacggccgtgccactcatgtccctcgcattcactgccgctatatgggctgcggcggccggtctcgccggccacgacgacgacgagcttcctgatcaggcggctgcggaaaccacgccgctcctcctgctgatcctgtctatcacttacttcctagcggtcgccgtgatgtaccgcgagctggccggcggcggcggcgtcaccgtcaccgatcagaagcaggacacggtggtaagacgagacgcttgctagctctcggttgctccttagtacgtgagtgtgtgcacgccggccgatcgacgtcgcggcgacgcgtatagctatatatgtgtactgacgcgtataggtatgtatgtttgattgtatatgctagagtgagatttcgcgcgcggtagaggttacttcgtttttcttttattttcgtggcttgtctgaatgtgaatcggttgtgagacgatgatgtattcgcccgtttgtatatgtttggcccaattgcgcgtttgagtgtgtgcaactgaaatattattttcgttttcatgggttgattgtgaaccgtgatgctttattttgtattccatccatccacaaaagttacacatatttcacatttaagtttttccaaataagttgtttctatttataatctttatgcattcaagacttagatgaagagataaattaaatgtttgattagaacccaaaaagtcatctaaatatttattggttgcatggttacattcactctttaaatttataacatccaagatgatttaatttctttttgattttggtgacaaaagtaatatgtgtaacttttgtggatgtggatggagagagtacaattgtaattctactggttaaaggatttgcaattataccgaatagtagatctagggacgagtataattactagcgtaatacgagtgtcaagcgacaagaaataaagacaaacactcgaaaagttggaacacatagtaaaaaaatcagaagaagcaacgatcgattgcttaatggctgacctgaagtacgtatcattgatttgatcggttacttatgggccaggcaatagctaatgtaacaacttagtactgtatattgaaacgaattccaggtgtcaggcaacacgggtcatagctggtctggctagcccaccctacctaatgggtaggtccgcctagatgcggagctaaaacgagatggagaggatgccacttgtttaatttactatgttttatattaaatttaaactaatatagatgtctaaatttatattgggagagatgtacacatgataaaaaatatgtcagatataggactggttcctaggcatcccctaaatactctagctccccctaggtccacatcatgttattttgtggcaacttactctccggtaattcaaagaacaacacaataattatgatactcgttttcaataataaacggacatttatcctgctaatatcgtcaaaccagcacaatgttcagtaatgagttttcatcagagacttcttctactctctctgtcccataatataaaaacatatgaccagataaaacatttcctaatactatgaatctggacatgttacatgttcagattcctagtaatagtaaatgttccatttgattctagattcttatattttataacgaagggagtatacttttaaaatgtttttgtcggaatagttttctagaaaaagcacaactatttttgtttctttatagttttctagaaaaagcacaactatgtttacattttcaagaaaattatagccgtgaaaatttaaggctgtttaccgacccgtcttcaccccctacttccacaaataattgagagcaaaatggactgatggcaaacatcattcgagtattccagtagattggaaaatgtgagagctatgaagctaggaatatatatatagtattaatattacggatttgctgaaaaagtgtctccatattttgtggctgagtacagtcgaattttaacggctggaatgcgctgtgctggacatcgtgtgcacgatgcacatccgtttctccacctgtttatccctttgtaatttttttactttatttgttgatccggaattgctatgggtttgtagcagtcaattttgttgttgtaattatgtatttatacaaatttacatactagttacaccccacttacaaatcacttatatatgtaattttgagatttacatatgtaattttaagacttacatatgtaattatatgtaattttaggacttacattgtaaatatactaaaattacatatgtaatttagagatttacaatgtaaatacataccgaatattttttgataaaaaatatggtgtcataaatatagctagtcccttaatattatccctcttgctgtccaaatcaagcttaattagctcggacaagagtcccgcggttaccagtagctttcgtgattattattcttattccatccagctcgacgttacatcatttttctaactgaattggttgcgttggtaaattacccgatactgactaattgactacgaacacttgttcttttgctatctaacgtgtactacaatctgctgtgaggttaagttagcaaccaaataccaagggggggtgcgcactgcgcagtgatgctggcccgttttgacagatcgggccaacatgacagcattgaccgaaacctaaaaggaataagttcactttgagtccctctatttgccaccaggacgattttcgtcccttgaccacaaaaccgggtatgacccgtcccccaacttacgaaaaccgtacagacgagatccctcagcagttttgaaggtggttttggctgatgtgacgcctacgtggcttgtttgactagatattcgtcacacgtggcattggcgtgacgtttacgtggcaattatatctcgaaaaaataataaaaaacatgggacccacatgtcagctaaaaataataattttaaaatggtggccccacatgtcagctactcctcccttcttccccctcccttctctctcatattcatcgtcctctcttcttcatgtgcgcagggggaaggaggcgaggcgaggcgacgggaccatcccccacaccgacaccacccccagcgcgccgccaccgccggcatcttcgtcttcctcctcgccgccgccgctgccgctgccgccagcatcttcgtcttcctcctccgccgtcaccgcctacatcttcgtcttcctcctcgccgccgccgccgccgcagcaaccgcagcaagcaggccggcgacgacgacgtggagatggccgaggggaggaacaacaaggtcgccgacggcggcagcaccgatgactcgacgaccagcggcaaggcggacaccaaggtgtagctctggcgtctcaatcgatccatgagcgatcgagtagctcagtagcatgcaatcggctaagatttcctgcatgtgttctagtactacaagtaataatattagctagcctaaaaggctaaaacacataacgtgcatgaaaggaaagtactatcctaactgaataaaacagcttttgcaggcacaagtttaacataatatgtctgctttgatctttatttggaagttgtaattaaccatgtttgtaataacgagataattaaacgagagtatccatgtgtcaagaggtcaagcgtgacctctcccacaccgtccatggcttccccgccgatgagcaccacgtccgggaggtgattgcgctcacgctccactcctgcgcctgcgtcgcgtcgctgtcgcgctgcctgggcgtcacgctcaagatgctggtgctcgtccaccgtctcctcgccgacggcgacccggcgttcgagcaggaggtgttctacgccatgcgccggggcacccgttccgtccacccccgccccccagcgccgccacgatgtcgcccgctccagccggcctcctcgttgctcggccgccgtgcgccgttccagccggcctcctcgtcgctccgccgcccatgagcgggagagagacaagagggagagagaggggacagagagaagaggttgtgaggatgacgtttgggtccacatgggcccacctttttttattaatttgtgtgtgcaactgacatgtgggcccccacaagttttttcggatttaattgccacatcagcgccatgtcaataacacgttggacaaaaatctagtcaaaagaagccacgtcggcgccacctcagccaaaaccggagtcaaatactgacgagggaccttatttaaacggtttcgtaagttgggggatccgtcgtacccggttttgtgattaagggacgaaaatcggactgggcaacaaataaaggaacccaaagtaaacttattctaacctaaaatggccgccctggcgccaatcgcggatcacagcccaaggcctagtgcccacacgatactgggccgagctttgccggattccacagcccaccattagcacctacccaagaacaccgtttacaaaaagaacaaaaaaaaaacacacacacacacacaaacttacaaaataatcgattttatgatataggagttagggaggaggaagaagagaagaactagaaatagtgttctcttaactcttaagcatgaatgttagtaaatttgggctgttggcccaggtgacacctttagctagtagacaatccatttaattgaagacgtcatcacgttccatgtattcactaagtagagaaggatcaaatcaatagttcaatataactggaagttacaaatcatacaaggacagcctcatcgtcaaaatcgttctagctaaccaggcacgaagcatgcgcctggggcacaatacaaacaaccatgccaacctctacaacctgaacacacatatgtcggactcaagcagagcattctctgcgacagcaagcacactctagcgacagcgagccaacaagaaggtgggcacgggaagcatgctcgggtccggagcagagaagtaggcggcaggaccagcgaacggcagcagcgccggcggcggcttcaccactgtctccgtgtgaggcttgctgatcatctgcgcactcgtcgtcgtcttcatcgtgcggcttgtggagttgctcttcccgctgcagagagcgtagtcttcctctgggcgaggcttcttgttgatgtcccagcgctcggccgacgacgcgcggctcagcggccgcttgctgctgtcccagcgctcgacggagtcggagcggcaggcgctcccgttgctgccggtcgacgacgcagggctgccgggtgtcttgtgcgcgtcccagcgttcgcaggagtcggcgcgcccggggctaccgccgctggctctcgacgacgtcgacgacgaggctgccgagccgccggctttcttgttcttgtgcgcgtcccagcgttcgcaagcgtcggcgcggcaggggatcgcgctgccggagctagacgacgacgacgacgctgccgaaccgccggctttcttgcgcgcgtcccacctctcgacggcgtcggcgcggccgggcttgggatcggagaccggcggcgcgcggaaggaggcggggaggatgatgaggcacggcgtcgggagcagcggcagcatctggctcctcagcggggtcgggagcagcgccggcaacttgctcgcgggcggcgtcgggagcagcgaagggagaaccgctgccgccatggctagctgctcgaaatgtcacgaagagggagatagttgtacgtgccgcgacgcgaagcgatcgaagcaattaaccggagacgagagcgcgcgctggaatcgcacgtcgaattgatgggctgcgtcatccacgcgcgcgcgccttatatcctcgcgaatcaattcgactcccattctgattcggagttcgcaccgccgatctccgatcccttcggaagtcggaataccgcagaagaggtgactccgtgactgggattcggactggaaaacaatgggtcgaactcgggccgctgtggcatccaggcccatcttatcacgggccgttccttcgacaggccactctttaggcccagtccgtgccggcccacatttgccagaccagcggatcgagttgctgacatccagtccaacatcggaaaattgaaatgctctcttttttttttctttgtagtgcattgaactgaatcagccaatatgaatatgcatattgggaatgctatttgacgcacgtttgctacttatgattctagtgcacacttagaaaaaagagagaaagaagccgcataccaccccctcgtgcggcaggcaggcgttccccatcaatcgattccaaccgtgactccgcgtgagtcttcacaagtggtccgaagtggtttttccttaaatctgatggtaactttcaacccaaaagtcctgaaatttttaatttggattggaaaaactttcaatccgaaagtatagaaacttccattttgaattggaagaactcccaaatcgaacttcaaaagactttttaattgaagatctgaaacttgaactaaaaattcaaaaacttcacatccaaatccttaaaattttgaatgaaaattctcccaattttcattccaattctcccaattctcccaatggagatggagtgcacccccggagactatacaatatcctgaatccctgactgcacctgactttcgcagaggtgctccctggaacggtggtccaggaagagggaggagaggaggacgatctggtaggggaaggggaggacgtggttggactcccacagaaaataaatgggaaacggacgatgagctgatggatactgcatcgagtccagtaaagattaatcatggaccgaccagatcttcgtcttcaagcaagagaagacttgatcttgaggaggaacaccaaaaagatgcaaccagtgatattctgcttctggaatcatctgagatggtggagaagaggacccaaggggtacaggagtctggtgacgagatccaaaagatggaagagttcggggcaacaagtagagatgtcaagaaacaaaagatggagggttcaagtaataattctgatttggcaacatcggcgggctccttggaggagcatcgccgggcctaatgtgtttttaagctggaactgtcggggccttgggcgaccccgagcagttcaagagcttgtctgcatggtgcagactcatcgcccaaaggtggtgtttttatcagaaacacgacagaatcaaggttttgtggagaatattaaatggcaaattggccttcgaggatgtctggctgtcaatggtataggaaaaggaggaggaattgccctgttctgggatgaaagcgtaaatgtgactatcaagtcctacaatttgagacatatcgatgcagttatcacagagcagaatcaggatccttggagagctacctttgtttatggtgaaccaaaggctcaagatagacacctgatgtggacacttctaagaagaatcaagcaaaatacaagtgatccttggttaatgattagggatttcaacgaggcaatgtggcagtctgaacacttgtcacaaaaccgaagatctgaaacccaaatgagagagttccgatctgttctatcagattgtgatcttcatgatcttggtttccatgggataccttggacttatgataacatgcaaaggggcgaccgcaatgttagagtgagacttgatagagcagttgcctcgccaaaatggaaagattgattcaaccaagcagttgtgacacatcctacttccccgtgttcagatcatgcacctctgctactgcagaaggaagaacatataagataccaacgacaacaaactatgagatatgaagaagtctgggagagagagtcatccctcccagaggtcatacaaagtgcatggagtgatggcaacgctatcacaaatttaggcgacattagtgcgaagatgaaaaatacaatgtgcaagttatctagatggagtaaagagaagatagggaatgtaagaaagaagattgctgccttacgagacaagttaagagagtgcaggagcatgggatcccttgattccgatgtccaagtccgacaaataaaaaaagaattagaagagctcctgcatagagaggaaatctggtggaagcaacgatcacgtatcatgtggctgaaggaaggtgatcgtaacaccagatacttccacttaaaggcctcatggcgatccaggaagaacagagtaagaaagctaaagagaaacgatggcatggccacatgtgaaataggtgaaatggaagagttggcacacaatttttttcagcagctatatttgaaggatgacagacttaatcctgagaatttattaagcttttatgcacaaaatattacagaagaaatgaatgggaagttaactgaaccgttctcggaggaagaaattagtgatgcactcttccagatcagaccactaaaggcgccggggccggatggttttcctgccagattcttccaaaagaactgggggatacttaaggaggatgttgtcagggcagtgaaaaatttctttgttgatggacagatgcaagaaggagttaatgacactgcaatcgtcatgataccaaagaaaagcctagcggaggatatgaaagatttcaggccgattagtttatgtaatgtggtgtacaaagttgtggctaagtgtctggtgaacagattaaggccactgctacacgatgtgatttctgaagctcagagtgctttcgttcctggaagactaatcacggacaacgctttaatagcgtttgaatgctttcattccatttagaaatgtaatcgtgagaatcaaaacttctgcgccctgaaattagatctctctaaagcttttgaccacgttgattggcaattcctagatggtgtgatggaaaggatgggcttctgtgataaatggcgaagctggatcatggcatgtgtgacttcagttcaatacaacgttcgtttcaatgggcacttgctagaacctttctctccaacgagaggtcttcgccaaggtgatccattgagcccctacctttttctgctagttgcggatggtttatcaaatataataaagagtaacgaatctgaaggtctcattcaacctttgaaggtatgtagaagagcgccaggaatttcgcatctcctgtttgctgatgatagcttgttattttttaaggcggatactgagcaagctagcagaatcagagatgtgctacaaatgtatgaaagcagcacaggacagcttattaatccttctaagtgctccatgcttttcagtgacttttgcccacagcaacatcaggaggacataaaacgaatcctgggggttactaactcctcttttgaggagaaatacttgggactcccaactcccgagggaaggatgaaagctggtcagtttcaaccaatcaaggatagattatccaagagaatgtcagattggaatgaaaaatacatgtcttcaggagcaaaagatgtcttgataaaaagtgttgcccaagctctgccaacgtatacgatgggtatctttaaaatgacagacaagttttgtgaagaagtatcccaaatgattcgcaatttctggtggggtcatgagaaaggagagaagaaagtgcactggatagcgtgggaaaagatcactagcccgaagatccatgggggtttggggtttagggacatgaaatgtttcaatcaagctttgttaactaaacaagcttggaggctgatcacaactcctgagagtctttgcgcccgagttttaaaggcgaaatacttcccaagtggaagtctgctggacacagccttcccgacagtttctttacctacctggaaaggagtccaatatggtnnnnnnnnnnnnnnnnnnnnnnnaatttggagaagatggtggcacagggtgagcgagtcaatgtcctgtggaaaaatgcaaggaacaggctaatctatgtgaatgaactaatggaaccggggttgaaaagctggaatgaaaacctagttcgtcatgtgatgaagaaggatgatgccgaagaggtcctcaagatcaggttattggaatgccaaccggatgattttccagcctggcatttggagaaatcaggactgtttaccgtgaagagtgcatgtagattggcctggaacttatctaatcatggtaggtcagatgcctcgtctagcgatgcaccatcgggtgagaggaagatatggttcgttttgtggaagacgaaagtaccagcaaaaatcaaaatctttgcatggaaattggcacagataggttaccaacttgggacaacaagcgcaaaagaaacattgaaagacaaggtatctgtcaaatatgtggatctagtgtggaagatggttttcatgcaaccgtggcttgtccgagagcgaaagcgttgcgtgaagctattagggaaatctggcacttacctccagagaataagtttgtaaattcaggtccagattggttgttgctattgttggacggatcaaatgaagaagaaaaggctcatacgctgttcacattatggcgggcttggcattgcagaaatgaaattatccatggcaaggagatgagccctatagcaagctctgtcaactttttgatgaactacgaagattgcactctaatgactcggcaacaacctgatgatgtgaaagggaaaggaccaatgtttgtcgagacacacatacaacgacagctgaacgaaaagcaggtgtccaagtggcaaaccccaccagaaggtgtagccaagttgaatgttgatgcaggtttcaaaccggacacaggtgaaacaggcgctgggataataattagggagtgtcgagggctcgtgctactggcttcctgtaagaagctaccgcgatgcagttcggcaatgcaagctgaagccttggcgtgtttggaaggtatccggctagctactgaatgggtgaatatgccacttatcttagaatcagataatgcaagtgtcgtcgctaagttaaacgcgaccaatgtctcaagagcagattggagtggcataatttcagatgttaaagcggcaatgttatgtttagttcaggtgcaagtgcacaggataaagagagattctaataagatagctcatgctttagctcaactggtaatgggatcaggaactaatgcggtctggagattatgctcccctgcagaaattcttgacctcctgaaccaggaatgtaaccctttgttttctcattaatgaattctctctttactgtcaaaaaaaaaattaattcaaacttagacccccaaaacttctaattgatgatataaaatttttaactcagaaggcaaaactttgtacttcaaactccaaaactttcaattgaatttaattgttgtccaccttgttgccatcggtgaggatgagccttagggcttgttggcgaggagggaagaaacaccgacgccccaccaggaggaagaacatagacccaacttgctagggataaggggatatcaccggaatcttgttgaggtatggggagcaacacaccatgaggaaggagagcccggactaactaacatatcgtcgaagagaagggagacaagggtaggccttgcggccgctcgccgccatcacaacaaggaggagcaataaggtggggagtactggttgaaacttccgtacaagctcgtcaccatcctgccgaggaggaggaaatggatggggagcggcaatggcccttccgcttttcgagtatgcaaacaactggtgggagaagccgagcctaagcatgacactgtgttgagggggaggagatgaaggataaggatgttcgtgcatgggccaagtgttctctcgggacaaagctgcacgaattagcatttccatatgaacatggccattctaattggatttaattaatcaaatacgattatgaacatgttcattcttttttttttcattgtagtaaggcatcaaaaattcaatttttgaatcattgtctaatcacaatattgagggggatattttcttgaagattagtgatgatgatgcaattgagtgtttctatggtatgaaaacacactgttaaatgttatccaattcaattcgttgtgttatttaagacattattcaaactatttttactgttcttttgatcaaaagttgtagcttgggctatattttattacccaagttttattttcgatcgctatttatcccattttttttactttaaactagataagtttgttttttaattaatttggatcaccccaaaccacttttttaagcacatcaactatatttaacacattgactccaacataccggataaagtctctcacccatgcacaagccatatctttgcggggggagtggttagacacagctaaagaagaaagttgaggtggtctaaagtgtaaaaaaaaaagtaaaattaactacttcatagtgaaaacatatgtcaatgagttgtgcaaagtgaaactttggcaataaaagataatgcaaagtataactcattttgataaaaaaaaagaccttaattctatttattttgcatgaggattttggtttgactaatcttaagatttgtggaggcacacctagcataataagaatgaaaataaattaggtgaattccatgaacaccaggtattatagtgtgagttacataaaactggaggggtttttgttggttgcacaaaatatataatggctttatagttcataaaaccacaccattaactattttcttttatatactatacatatgacttacaagcttgtaaccaaaatatatgagttattcaaattcaacgcataatgttgcagccatctaaacttaattatttgtttattttgctacagtattaggctaaattggttaatatatatagtggttttgtgaaattttagaaccatgatatgcgtgattttgtgaacctaaactgctagacaacctgttgaattatgacgtcataatgttcgacgtaatcactaagtactgaagcttcaaaacaatggttcaatgtaactggaagttacaaatcatacaaggacagcctctagctagctaacattacaagtaccagtgttaattgagcacacgaagcatacggctggggaaccatacaacaaccattccaatctctacaacctgaacacacccatgttgaactagaatctagtactgcgtagaagcaaagcattctttgcgagcaagcacactagctagcgagccagcaagaaggtgggcatggaagcatgctcgggtccggagcagaaaagtaggcaggaccagagaacggcagcagcgccagcggcgccttcaccattgtctccgtttgggacttgctgatcatctgcgcactcgtcgtcgtcttcatcgtgcggcttgtggagttgctcttcccgctgccgacagcggggcgaggcttcttgttgatgtcccagcgctcggccgtcgacgacgcgcggctcagcggccgcttgctgctgtcccagcgctcgacggagtccgcgcggcaggggctcccggtgctgccggtcgacgacgcagggctgcccggtgtcttgtgcgcgtcccagcgttcgcacgagtcggcgcggcctgggttcccgccgctggccttcgacgtcgacgacgaagctgccgagccgcctgctttcttgttcttgttcgcgtcccagcgttcgcaagcgtcggcgcggcaggggatctcgctgctggagctagacgatgaagctacagaatagccgggtttcttgtgtgcgtcccacctctcgacggcgtcggcgcggccgggcttgggattggaggccggcggagcgcggaaggaggcggggaggatgatgaggcatggcgtcgggagcagaggcagcatctggctcctcggcggggtcgggagcagcgccggaaaattgctcgccggcggggtcgggcgcagcgcagggagaaccgctgccgccatggctagctagctagcttggcgagatgtcacaaaggagagagacagttgtacgtgcggcgaagcgaaccggagacgagagagcgcgctgtggagtggaatcacacgtcgaattgattggctgctacgtccccgagcgcgccttatatcctcacgaatcaattcgactcccgttctgattcggagttcgcaccgccgaggcgccgcgatatcctctcctcggagtaccagtgttaccacagaagtgatgactccgcgacagagattcggactggaaaaaagtgggccggccgtgacatccaggcccagttcgatatgggcttaattcaacaggccgtagtttaccacaatctgtggctctgtgccccggccacattcgccagaccagcatagtcactgacagtccagtccaacatcggaaaccggttttttttttgctttgtaggctttagattaaattgaatgaaccgaatataaatatgaacatggtaattctttttatgaaacctgagccagctttgctggttttatattaaaaggggaggaaactgtacagcaacactaccgataacggtgagaaacaaaggaccaaaagaaaaaacagaggagacgcatagacaagagggagcagagaggaaagcagagctacaaggatcacgggaaggctacagcactaatctcgctaaatcttttgccccgcatcctatccatttgttgatttcatccatgatcttcgtcagcaagtgtggcattgcgagttctttgtttttgaaaactcgccggtttcattcacaccaaatctcccaatttatcatcatgtgaaagggagcacatcccttttgttttgcccttttcggtttggttagctcttctttcccaccaatccagcagagtctcgtcgtcgttgtgtggcgtagggatgtgattgtggtttagtcttaaggagaccttgtcccacacttcctttgtgaaagagcagtccttgaagaggtgttgtgcagtttctaaatttctgtagcaaagctgacaaaaataattgttgggccattgccggcgttgtcggcgatccgctgtccaaatccggttttgcagcaacagccatgtgaagttcttgcacttggacggcgcccaggtcggccagattaggttggctgctcttgatccaattctgccactgaattgacccaaatatgctgattttgctgaatatttgccattgtttgtctatctccaaagaatagtgtcttcggttttatctgttaaggtaatttcaccttcccaaatctactggtagactttgatgaattcatgaactagtgccaaattcagctcgtgccttatgtccctgatccactggttgtcgattagtgcatcgcagactgttcgatgcttccctttggagtggttatatagcgctggtgcgaggtacttgagcgactggtgtcccacccaattggattcccagaaatatgcttttctaccatttccaattgtcaccttggttgttgtagcaaaaacttccttgtcaagatcatcacaaggtggcggtgttctgatccacggtttatttgggcattgccaccgaaacaacatggtaattctttatttcattttagcaaggaatcaggaatttgattcttgaatcattgtccattcacatttattgagagggatgtgtttttaaagattagtgacgatgatggaatggagtgtttctatggtataaaaacgcaccatgactataaatgttattggattcaattccttggttatctaagactttattcaaactatttgtgctgttattttgataaaaataaagaatgtactgctacttgggctacttttattgcttaagtttcactttgaccatcattagtttacctcatctttagttaattttgtttgcattgcaatttgaaccaccccaaactactttttttttaccacatcaacaaccatgaacacatgggctgcagcacaccgataaactctctcactcatgcagaagccatgtaaactagattgaacgcatcattagatctacacatgtaaactaagcagtaaaacatgaacatatcaaatatgcgcaacatgtcgaacacgtaccgaggtggcggaaagaccggttgctcggcaggaactactcgcggttgcgagcatcgacgaaggcgcgaagcacgcgagcggagaggaaggcgagccgtcgcggacgaacagggagcagttgcgcgaagcgcttcccaaaaaccttattgccgccttctcccggtgcaggacgtcgaaggcagaggttccggagacctgctcttccgatcgccggtgcaagccggcgagcgggatggagtagtctacgagcgacggcgcagtacagagtaggaggaaaaccctagattgatttcgcgtgtgttgcgtgaaggcggcggctcggtttatatagagatagatcgcctaatcagggcgcccgtgtaaaccgaaccggataagtcacgcgtaacctatccggactccatgccgttttcacgcaccggattttttgaaatgtttccaaaacaaaacaaatccgaatttcccgtagcaaaacaaaactgcaaaaggaggctgcatctgcgcaagggtgaggagccaattttgcggaccattcgacgcgtacgtcgtgcacacgcgccgcttgccctaccctgccaggccaggccaggcgaggcgaggcgaggcgagtgagcgcgcgcgtgtttcccctcttctctccaccacacatgcttcaagtggctaggagggcatcctcccttttaaggaggtccccctctcctagaataagcaaggttgtactaaactccacatgcatgccatcccatgaggtgggtttttgtgattttccaaagaattaatcttcgaatgggccttagcccatctattaattccaacaatcccccaccaaatctcaaaatccctcgtagatttgccttttccaatgtactgtttatataccagctgttcgatggagaccgattaaggttgaacatccacctagaactccaagctacacttactcacaacttgaacaatggactacgccttgaattgcaagtcttgtgcaagcaagtttcactcagagtcttatctggtcctagaccgactgtagactaccccttgggtggagcgtataagtcatactcctaggtctttagtaagcttcctagaagattcacccaaaatctccatagactgcaaccaacagtcaagcttacaaaggtgagttctttcaagaatgctctgcaggacagcatcttcgctaattaaagccaacagaactcattaaggcacagtgtcacgcccagaaattctcgaaccagaatttctaagctgaatgtgcattaaatccctgtccaggaccagccagggtacacaaacgacaattgttgacatacagatccacgtcttacaaaaatagaaaagattacaaatgcagcggaaaagataaaagcgagctaaaccgggaagcttgacttcagcagcgggcgactccactccacaggcaatccttgacggcagcgacgaaaccaactttgacaaaacagctccaactaggaagatcttcagctctggtgtgggggaaaagagagcaagactgagtactacccactgtactcagcaagtcataccggaagaggaggtatgatgcaggatataaccaaaggaggctagaggttcttttgcataaagctagcatttaaaaac

SEQ ID NO: 6231 - DNA, 21318 bp, Oryza sativa
  unsure (1)..(21318): unsure at all n locations
aggcaggcggcgcgggcgcggcctcctttctccccctctcctgccggcaccattgcgtcgtccgcctcctctcctccttcttcccctgcgggctcgctgcgccatccgccgcgcctacccctctcttgccggcgccatcaccgtccgcctcatctctcccttctccgccgtgggctcgctgtgccatccgccgcgcctgcccctctcccgccggcgccatcgccttccatctcctctcccctttctcccccgcggtctcgctgcgccgtccgccgcgcctgcccctctcccgccggcgccatcgcgttgtctgccttctctcccccttcttccgcgcgtgcttgatgcgccggccgccgcgcctgctcgagagaagcaaggaaaggagaggagagaagtgaagagaaaaataaaagaaagatgagatatggggcccacatcattttgtctcacttacatgtgggctccacatgtttatttattttattttgctgactcgaacgtcacgtcagcgaaaccaggcatctatactgtaatgggatctaaattggacggttttgtacagtttaagagtgaagatttctggttttgcggttaagggacgtcgaaaaaaaatctcgctgttaagtttgagggatctccggtggacttattccgcgtactgaaccttccgactcaacggggctcgaaggcccaaaacgccgctcaaaacggggctccaaggccaaaaattccgcggagagcagctggcggccgtccccgttcgcgtcgcatcgcagcgcagcgtacgcgtgcgtggtgtgtgccgtgccctggtggtggtggagccagccagaattcaagctcgagggcgaggggcgaatcaatccgccacaccgcaccgcatagtgccgcgtcgcgccgcggccgcggggctccagatccggagccgtacgtataacccccctcactcacaacacaacacaccctctcctctctactgttccgccacaagaccccagggcgccgccgccaccgccaccaactcactgggtgagccgccgcggccctaaaccctagcccagcgcgcgcctctcctcctcctcctactccccccatggccgcgccgcaggcttccccgtcgccctccgcgcaagtggtaagctgcttcggtcccctgtctctctgtggttgcgagatttggaggggggtttttctcgccgtggttccgtgctgatctgcaatggcgggggggactgggtgctctctctgcaggtgggcaacgcgttcgtgcagcagtactaccagatcctgcaccagtcgccggatctggtgtaccggttctaccaggacgccagccgcctcggccgcccgcccgccgaccgctacggcgacatggtctccgtcaccaccatggaggtcagcccccgccgcctccagatctggcgccgccgcgaggcggaggcctccatttctgacgatttttttttaattttctggttgggatggtgacacgaagatgggggggtttttggtgtggttccgcaggcgatcaacgagaagatcatggccatggacatgtcgcgggcggagatcaagacggtggattcgcaggagtcgctcggcggcggcgtcaccgtgcttgtcaccggccacctcaccgtccgcgacggcgtgtgccgtgaattctcccagtccttcttcctggcgccgcaggagaagggctactttgtgctcaacgacatgttccgctacgtcggggacggccctacccctgctgctgctgctgctgcggaggtgcagcccgaggcagatgccgtggctccacccctggctaatggtacagctactgctcctctgcagcctgctgctcctgactatggtgtgtttggtgaaacccttaaactctatatagctttttgggggaattagattgtgatatcgatttgttttcccccgttttgtagatgctatgccgcacgaggagccggatgttgtggagaatgtggcggtgcctcctgaggaggaggaggaggtttataatccgcctctggaggaggtggagggtggggctgtggaagaggaacaatcagttcctgaggtgattaatgaagtcccaaataatgtggtgcccgttgtagctcctgcagatgctccggtgtcacacgaggaggcgccaaagaagtcatatgcctcaattgtaggtttcacaaaagcaactttctcaaatttcgagctgtattttgcttataaatttatatctaatcatgaatggtgttttaactgttttattccatatgatttgcaattgtgaaatgcacactgctactctgtaagctactccactccaaatgtgtagttatgcacaaacttttactccctccgggctgataatacttgtcgttttggacaagggtgaagtcaaactttagaatatttgattatgaatcatttttaaaatatttatctttcaaatatggtgactacatgtatagattagtcttaaaaagtactttaataagatcatatatttgctaacaattttatacatattataatgaaaaataattgtcaaagttgttttttgaagaccgtgcccttgtccnaaacgacaagtattatcaacccggagggagtagtagcttagcgtaccactgcactaaatattctgtagtcttatgaggtgcttcttattgacaagtttttatgtgatgtcatccatacactagatctagactgattttgtgcattataatgttttgtcttgatgtcgcacaatctgggagcattaatctattgatggttgaccaggaagaggcagtgctaaagttgaaaaattattgtgcttttttaagtgtagtgcttcaaataaatattagtgacagctttcaaataatttgagtagctttttactgttggccatgatggttgtcatcttgtttggtagcaggtgattggattgaaccattgctcaaatcaaatttttgttctgcattctttgttaatggtatcgtattttttcctgtgctgcaggtcaaagtcatgaaagaagctccagtgccagcccctattcctgctactaggcctgcacctgctgctagacctgcacctcccaaacccgagaagcaatctcctgcccctccggctcctgctccagttgcagatgctactccttttagttctaatgctgagagcagcaatacgcatgagccagaaggtattttctacaatcctatgctttgatcaatactctagatatgtcaattctgttagcttctctgaactttggtctttattttgaagttgatgcacatgcgatatacgtgaggagtctaccattaaatgccactacgacacaactggaggatgagttcaagaagtttggcaccataaaacctgatgggattcaagtcagaagccataaggtacttgtttttttccccttcctctggactttggaaaactatctatgttattctgtctctgaaagtgttgtcaatattttccaatgtaaatgcagattcaagggttctgttatggctttgttgaattcgaggaagctactgcagtccaaagtgctatagaggtagtctttcttagttttgatcattccattttgtcaggttgtttggtgatagtatcaatttgttcatcacacactaattttgatccaatactgtgagcattgttagttcattatcactgcgtgcttttctttagctaccaacagctcttgttgcttgacattatctggtgatgactgcattacatatcatatcttctctaattttgagtaacttgtttttttgttgttgagtggacaccatttatctttacgctgttctgaaaaaaaccattcttttttttttgttccacaactggtctgaaccatgaagcactggtcattgaagagcttagatatgggcaaatttttgtatatgcctgcatgacaacgtaaaatattggatctttccctgagaaactataggtctggctatcactacaacacattgggctgtttaagtattaaacataatattaactcagcaggtaggagagtgcgtgtgaaatggctacctttcacatacacatgtaaaaaaactctccatctgttgctcccattgtaaccaaggttccaaatactgctttgtctggaattatcggtccctggtgaaatctgtactgtatataccagacaaaagttcaagtgctggccagaaaatttctaaatttaaaattttatgtatgagtttgaatcacagccatccagccagtaaccaatcaccccctggttctggaccagtttctggccagcttttggaaccttgggaacaactggaaaatattgctgtggctaaaactattttagaatcccatctgctaactttttgagaaattgctggaattattctgaatatccaattaaggagataaaattgcttattttggctaatgaatggttaattgtgatttgtgggataacagttatttttaacttaaaatcatttatttggaacccttaatttatatttttattggagtttttttcatatttctttactagattaataatccaggtgtaattagggatgtgtgggatcttctctttccaaagaactggtgagcattttttttaaaaaaaatgttttcatgtgttgtggcaaatgaattccatttttggagagctgaaccaaagttttggtgtattgtcaatcccaacattatagttattgtcattgttagcttcgtagatattgctctacgttacataatgtttccactgcattccacccaatggatcagaattatttgttgtgaattctgtaattttgttctcagttcccgatgttgtctggatcctactctgagtttgtattgttcaggttgagctaatcatatcaattcaattgcttccatgatttgctttcaagtttccttaacccttcaacaaaggatatcacttgttatgtgcagtcatgctctgttgccagtatcattgtgtggtgactttgatgtggtttacctttttttacttggtcactgagtattatatacatgcatcaaattctaattgtttttaacttcacacaggcttctcctgtaatgattggtggacgccaatgttttgtcgaggagaagagaacacctggttcacgaggtcagtgtaacagaacactacatgtttatttcttttttcgagttattgtaagtgtagcattggagcatacttaaatgtctgactagtctaaacaccagtagtaatggaataatggtctgcagtagtaattgaaagaaaaagaaaataaaatgaataaatagaaaaaggagaaagtcatcatagttggaaattatcattggaatgtcttcttaatcataggacatgttggatgggctaatttatgttgtcatgagaagcgtgactgcacattttgtgagttcttcaaatggactgcaaagtcatttttgagggatctcaacactctatatctagctgtctagcaaacctcatataatggtagttagaatgttggcacctgaagaattatttccactatatatgagctcaacttgttccaagttctcatcttactgatacgttgcctcaggatccagcagaggaggaaggtttgcaccaggaagaggtaataacaacttcagagctgacgggatgagaggccgtggcaattatagtggaggaaggagctacggaaggggtgatttcagttacagatctgattatggtggcagaggtggtggcagaggtggctctgcgcgtggacctgatgttggctaccagagggttgacggtggtcgtggtggccgtacatcagcaggccctggtgcccctgcaaaatgaggggcgaagtagcttgtgtctctagtattatcattccatggtccttggaatgtccagattcaacataggcttcatcaattgattgcatgctggaattgtcaagcccaatttacaaattatgaggttctatttttgaaggcggcaaaaggggttaaattggttgctaattgtagaatatacacctattcacatgtagtcttagcttggtctttgatgatcagctgatgtgttattttttttctttttgtgttaattttgtcccgtttaagtttggagcattcatttgttgtgtccatttgattttatagttactacgaactgctgaaaatttgattttatagttactacgaactgctgaaataattgatagtttagactctagagtagctggtaaagtagtaattaggagagattttgtcttgttcttgtgatgtcttgaggcgaaggacactcttattgatactagtttgatactggtttatttaattttcgaggaatttaccctgtgcgctttggtcttgttggcactgctattccctcgattgcaattttgctggaggactggtagcgaaccaagtaaatatgcagtcgttgacagtctatcgagttgattagaagatattggttctctgtttggagggtgcaagctatctaaatgaaatggtcgattagaagatactggttcgaggtctgatttgaaggtgccaaggtagtaattccgatcatagcttttgttttatgaattactactgtctaaatgagatctctttggcaggtgccaaggtagatactaggaattttgggatctaagcaaagcccagcggatgaatgattggacaccatgtcaccatgtaatgtcttcactctgcacctccgttcatctcatcaactttgcctaccatttaacttgctacctcgtctcctctaagtcaggcttcctaatcctaggttccatgaggtcataagcatggttttctgtaaaagggaaatattttaagacaggtgttctattgttttcttaaaaaaaagactcatggatggtttagtacaaagtaggtttatctactcattagtttggtgaaaaaacctactcacataaaagaacgagcatcaatgggctctaaggaggagttgaagataaggttatcaaaatcttgtatctattatacgactttataatcctgattaaggtgcttgtttttataattttatataagtagaattacgattctatgtttctaatcctaactacaacctcggattcggattcaggtcgcgattttaatgaccatggttggagaaaaagaaatcatatacctccatgctattagaaaagtgatggaagatactaaggtaacaaataaattaacctaagtatcattattgtgaaccattatttcaaaaaaatagcatgcattggtgaacattaaaaaaaaatcaaatcctatatgatgctgtcttattagttttgtttaatttttctttcacaaaacatgctcctttgaccaatattgatactaatgttgcgttcggcagctgaagaaagtgagtgagtttgtttcgatttctgagcgcacgcttcccaaactactaaacggtgtattttttgtaaaaattttctataggaaagttgctttaaaaaatcatattaatctatttttaaatttaaaatagttaatacttaattaatcatgcgctaatggctcaccttgttttgcgcatcttcccaatcttctcaatctcctcctcctcaaactcaccctaagtgcattcacaatgcaggctacgtattcgagagacccaagacagtagtttgatctagaaccattgtagaaaataggctccacactgcatgtggtcttaaataggacccaaacaaatatcaaaatcctcttaaaatgaacttaaatagaacccaaacaaatatcaaaatactctcaaaaggaacttagcctacaacggtggtgtcccagtcaaagggtcaacaacaaattggatcaaattcccccaactaccccgcttctcattaagtcttttccgcttcctaccacgcttctcatcaagttttctccacttcctccgcccacatcgctcatcgccgttggggcaggagccgctgtgctagttgctagtcaccgcggcagtaagactaagggagtggatagagttggagtccaagaggcgcgggtacggcacgagagccatgacctgcttccccttctctctcttttcctctacgccatcatcgccattccctctggatcctcctcttatccttctcgattgctccacctccatagtaggcggcaacatcacgacggtggaggggaagctatcggagctctccaccaataacagcatcgataaggttatccacaggaaggtcaagataagctgtattcagttccctcccctcatgtgccacttcatgcatttttcccatggctacaccattgcttgtgatttgtggaatggttgtgattgagcgacggtgaatctccgtacaagcaatctccccctccctgatggtgacgagcaaagcggcgcaggaggggggaaacctggtgcacgggaggggctattggggaaacgcttgctttgcatgggcaaaaccacgattcgacgaagctccgacctccacaacgtggtgccacgctcctcttcttgctctgcacatccttgttcagcttgaacaatatgtgaccaatttcggttacgcggtcttcatggggctccgcggcttgaagagatggcgacaaatacctggttcctagcacttgggccaaacgacaatcggcgcatcatgagcaccctaatacaaccatgtttctagtagtgagtgaaaaatatgttagggtgttagtattgtgttgggacttaaatgaaggtggggtgctaaaagcaatcattttctagttttttcgtgttttagcttccaaatttaacaccgctacattcgtttaaaaaaaaattctaaaaaaaaagagagatggaagtgtaaaaccctaaacccaaaaccagaggaagcgacgccactctttccaccttttccgtcccttctccccaacgtttcctcctccgcccctctcccattccatccatggcggagcaagagcaagagcaacagatggattgggaatagaatcaatcgctcgcagcaacaacgcgatcgccgattccaagtttccactcccggaggaggaggaggaggaggaggcggcgattccaatctagattgcgagggggctggtcagcagcaggaggagtagggggagggcaagatgagcacggtggacaagatgctgatcaaggggatccggagcttcgatccggagaacaagaacgtcatcaccttcttcaagcccctcaccctcatcgttggccccaacggcgccggcaaaaccgtgagcgccccaatccaatctctttcccctagcatctgtagtgtgcgcgtgtactgatttttattttttgggtttttttgcttggtttctgtcctccctgcagacgatcatcgagtgcctgaagctctcctgcaccggcgagctgcccccgaactcccgctccggccacaccttcgtgcacgaccccaaggtgagacacacgcgcggcttcagtgttcgtcctcaccatgggctcggggttgagtcgtaggggttttgctgcatttcgggaacaatggtgtgattaatcttgttagtaaggtctattgggggtacccagttcacggtggtttgatagcagtcgtatcgaacaggggttgatgcttttatgatttgtatcttggtggagcgatggattgatgcaattgagggatctcgaatgcctatggaggtgcagtgtgctgtgctattgtgccagggaatgggcttgaaatgaatgatggttattgtggactgaagctgcttcaaggttgttggcataattttctgccaggagttcttttacattacttgtttctgtgggatgtgcaggtggcaggtgagacggaaacaaaagggcagattaagctgcggtttaagacagcagcaggaaaggatgtggtgtgcatccgctccttccagcttacccagaaggcatcaaaaatggagtttaaagcaattgagagcgtcctccagactataaatccacacacgggcgaggtcctcagacttattgtttccccttttgcttccaagttgtttaatatggggccatgcctttgagatttatttatttgattatattgaggcatgggtgtgtttgtttagttacaaaagattcttgaaactccaactgggaaaaataactttgccagcatgtcattggatgatcttgatttggttcagaacacctgtaacccgaaaatgatttctcatgtctattgttgtttgtaactcaaggttcattacaaagctaatattattacatatatcaatcatatgctgtagtttctgttgctatacatgtctctgcctgtaggactttcttgtagtaaatactgtccccatggttgcatacaaagacgtccattattttccttgcactttgtattgtccgtgtcaggtaaacccttgtctcaaatttgagttaagtagatcttagctatgagtctgtggtggttataaatgttttcataaactagaatagccggaagtgcatagttatgtgggaaattttctctcaatttccctttgtattgcataccgattgatattttaattaatagaacaatcagattgcccttatgaaccatgcaacacttctcaaatacatttgatttctttcatttttgatctatttttgtggtcgtagaaaattttcttaggacaccttgtactttctgtgaccacaggtacttagtgtgacattgttgcacataaaaatttgatccatgtgaatctagatgatgggaatttcacacttgtttggttggttctaaataataaatttaaacaaggcaacgggtttgtatcactatggcttcatttggggttgaggtggattatgataaatctcgtttggtaaactgttcttattcaatctaagttggaagcgataatattattgtgttctataaaaatgaaacaattgtgagagatacgatgattgcataacatatttttctaaccattatttgattttttttaaaatagaatgattcttacatttctactacaaatttaaaataagcacagtataatacagcacagccaccacaaattgcgcctaaaggagtactgtatctgttgaacattttaggttacaatgtatattcacagcctaatttgtttttgttattgctgaattcagaaagtctgcctcagctacagatgtgctgatatggatagggagattccagctttaatgggtgtatcaaaggctatactggagaatgttatattcgtgcaccaagatgagtccaattggcctttgcaggatccatcgacacttaagaagaagtttgacgatatcttttctgcgacccggtacttgaatgttttactatttcgtgtttgcttcggaagctctggtcaagagcataaccgttattagttgaaacatgacaatattttgagataaattattctctagagtaatcatcgttattccttgaaatgtcgttatgactagcattggactaccttaatttctgtattgcatgtgcagctataccaaagctctcgaagtcataaaaaaacttcacaaggatcaagcacaggaaatcaagacttttaggttaaagttggagaaccttcagactctaaaagaccaagcatatagggtactctaatcttctgttcaatcattcctgctagactgccattgtatgaaacttttgagttatggtatcgagagttgagttcaacttgtcattgcggaagcacctttgttatttgcttatttgccatgggttgggctatcattttgttctggatctttgaaatgctacaatgtttttctttttttttaaatgattactgatcaactaaaagaaattgaagggattgtatcgttctgtcctgcatttgtgccagaatatatggctaatcagcatattttacctttaattatttgtcataagatgtctgatttatcaacatggtgtcctgctgactttaatgatgttattggtgaagaatgcagaaacaatgtaaatatttggcaattaatgaagtaatttgacagcagacaccattgtaacacatttggtattacttttcacatcaatcacctcccattcaaacttctccccatcttactacgaaccactcccccactccatacatatccttatttaatgggaggcattttgtcttttttctctataattaatttacctcaaataacctagaatcccttgtatttggggatggagggagtatatacatcaagttagatactagttattgtttctatgtgccattcaaagttgtgagaaccagcttttgcatgttcacctgacatccgtagaccctgaaattatttcttaatctattattatatgctacttatgtctcactaacaattgtgtccttgacccacatgtcagcgagacaatgagtgctatataagggatagagtaattgtccatgacccacatgtctcactaacgtaccttttatttttactttaactctcactaattttgacagctccgtgacaatattgctcaagatcaagagaagtcagatgccttaaaaattcaaatggaggaactgagaacaaacgttcaaggtgttgaagacaaaattcgtcgtactgaaaaaagtttagctgacttgaggaggcttcaacaggaaattaactccagtacatctgctagaactacatattttacacttcagcagcaacagtatgctgctctttctgaggaaaacgaaggtaagtgactccttggtgtgtcactgtgccttcaggcttcagcccattagttctcaccattacaacaattgactctgtctttgtttagataccgatgatgaactaaaggagtggcaaacgaaatttgaagaaagaatggcattgctgcaaaataagatcagtaaactagaaagagatgtggatgatgaaaatacaacaagctccttcctttccaaggccataaatgatttgatgcgagaaacaggaaggctccaggcagaagctgacgtaatgttatcatcttttatatcttctttttatgattttatcagtcattattaactatagtggacattgttttatggcgttaaaagtttaaagtaacatccaaatatgtggttttcaggctcacatgtcagtgaaacacgaacgggattcagcaatcagaaagatcttcaccaaacataatcttgggccaatacctgatgctcctttaactgatgctgctgccatgcaccttacaaacataactaaagcaaaactgtcaaatcttaatgatgatttgcaggataagaaggtgagaatactgattctatgtattctggaatttaattgctaaagtatacacttttatttttaacttccgctgattataagcttcaaaatcatttccaaaatcaatatgcgtatggagtttagtcatatagcaaatgtgctctattctgcatccacctcataattgtcctgttttggtgtggcatctcagtggacgtatgagttatgtattaaacagtttttgttggaggaagaatgttactgaatctactcaaatcatttgctcaagtaggcagtgaattttatctagttaatattgaacccacctgttcttaaaaagtatgtgctctgacaatgaaaattccgctttatgaccagaaatctaatgaggcacagaaacagtttctgtggggacgctatcttgaagtaaatactcgctactctgaagttgttggccagatagaatctaaggttgcctccaaggttagtcatggaaagaacattggacaagcacaaatatgatcttctgcaactatctcagaagaaattgtatttcttcacatatcaataacttttcagaaaggtatttcaaggcgcatgaaagataaagagagtgaacgcgatgccgcggaaatggacctttcaaagtacaatcttccccgtattgatgaaaaggagagacatctggtactttcctgatccaattatctttagttcttggaaacatccatatatgtggctgcacttttcttgttacatttttatcagaagtagaaataaatgtcacaggctcacagcattagacagtttgagcattgcacccttaggcgttggctcatatttttctccacatgctttgatgtcttaaagtatgccatcattcttaattctgatgaaagtattttttttgagaataataactgattcatcccatcttaattttggatagcaaattgaagttgaaaggaaagcacttgcgctgggagaaaggaactatgattcaattgtaaatcagaagcgcacagagatatttagcttggaccagaagataaaaacacttcagtgggaaaaagacagcattattagtgattccaatgacagggtactactagacgtgaagaaggatgaattggaagaaagcaagaagaaacttaaaaagatgcatgtttcttcctctctccttttataaccctacttattttatgattcacttttttatatttcccaatcttaaatcttgctgtgtgagaagttcaagtagcacatactgtgtaaaatgcagatttgatgagcataaggacaaaatcagaattgtgtttaaagggaggactccttctgagaaggaagtcaagaaggaacttagtcaagcctttgggtatgtgctactctgtttttcttatatttgtttcaaccagcgatcagtgattcctttgttggttgctgtgatcagttcagttcacctgtgtcatttgtcaagctgtagtttgaaaaagttatctcttccatcaattgacctcatttctgcatttttatcagtgggctactgatagctagtagtagtaatagcagtatctgactatctgtagtcatgcatattttgatcaatcatgcacaccatgagctgatgtacattcaatgcaagtgcagtagcgtacatgataattttaaacataaccgtgtagttgtatgtatatggctgttcattaatgctgggatgattagtcctgtgcacacgaactatcatgtttatgccaattcatcctaatagtagatgtgagaataatacatatgaagtcctctagttgttatttatgcatttagtaatggtacaaaactctgcttggctcaggtctgtagacagagaatacaatgatttgaactcaaaatcccaggaagcagcgcaagagctgaaactggtacagatgaaaatacttgatgctaggagccacttgtcaaagcttcaaaaggaattggatggtaaattcagatattactaccgtacatttatacttacgtaatggcgtgattttatgtgaaatattttgatatctaaaagatccactatggtgtgggatttgaacaaataactttggagaggagtcggttatacgtctccttgaattttcaagtgcaaatgtaccatatttttctcattgctatttttaaacaatggcggatttcctacgaactatgtatattgcatgcatttgatatttatttttttatctttaggctaacctagcacattcctatccaaataaaggaaaatatgtgaaaaatactgataaatttaattagtggaacttaggatgttacaatcataaactaacggagttagattacttttgatcagattggcctgttgttatgggcagaactcagcccctctcattattagataaggttgttaggctttattagataaggctgtaggaggtttgttaggttttattagataaggttgttaggatgtttgttaggagccggctctatataaggagaggcaccagtcatgtggaattaatcaagaaagaagttaaacctatctctagtctcccctcttctctgttcgacctcacccaaactctggggcggcaaggctgcaggcctcgccttcccgttgagcaccccaattcattcctccacataacatccaccccaccacgccattcaccatgcctgccatccatgacctccacatgctgcgccaatcctccagggccatgcagacctccatcacggagatcacagctgggctcgacaaggtgacagaattggtgttggcactccgtgcgggttttgaggccaagggggtggcgttggaaactacgacgacgacgccctctccgccactcgcgacggcaccgccttctctgccatcgtccctgttcgcggctgcggtggaggaaccggtgatgacgatgccctcttcaccgccatcggtccaatcggcggaggtgctgcagcccctggctgtagtgccattttctcagttgtcgttcgcatccgaggctgcggcagtgctgtcacacctcacaacagtccggtcggcgctcgctggggcaccatcaactcagccatcgccatggaagaccatcgtgtcgcgtcgtcaccgttcccttctgcgaccacagcagcagcgagggatcttccagcagcttcctcgagcggcggctgcgattacgctgagcgttgctcgacgacggggagcatcacgtgcggcgccaacggcgtgggatccaggcgggccacgcgcgccgggaaagggggcgcagctgctgcagcacagcgtgagcaacacgcgtgtcaacctcctgggggtggcgccgtctacatgagcagcaggtgtgccacgagagtcggcgcaggaggcagctggttcctcgcgaccccacggcgtcagcccttctcacatgcggctggtgcgcatagccggtacggcgcgtcctcatgcagtgattgcggcatgcacggcgcaagagatgtgacttctggtggcggcgtgagatatgggaacggttcctcgttcgtccctgctgttcggtgggtcaactggaccgtgtctttttggctggtcacgtgatcctctgttgagaagacaagatccatacaacatgtcttgggccaggggctattggagtgggctgcagttgtctaggcaccacacagctttggtctcctttggcaaacatgacagcaagcaggacatttgtggtttttggaacacacagtcacattggtatggcgtccttcctctatgttcttctggatggggcccacctgagcttggcagcagaagaatggcatggaacaccaaaataattttagatttattctttccaaataatgttaggagccgagatgtaaaaggcttaataataggacatcatgtgaagacaagcttgcagctcgcgggcgagctgcttccgaaggaggagggaaaggggactaggatgacatgggtgatcggcacccctcaacctttaggcatggcttccaccgcagctcgaggacgagctgtctcgaaggagggatggagatgttatgggcagaactcagcccctctcattattagataaggttgtaggaggtttgttaggccttttgttaggatgtttgttaggagctggctctatgtaaggagaggcaccacagtcatgtggaattaattaagaaagaagttaaacctatctctagtctcccctcttctctgtttgaccttacccaagctctggggcggcgaggcctgcagcctcgccttcccgttgagcaccccaattcatccctccacataacacctgtgaccatgcaaacatgtgaaatgcaatcgctgttaggattcacatcatttttgcagctcttggcctccattgaggtgagatagtatcagattcttctctcccttggtctctcctcttaacacttggcatagctagctgtggcagtatagctgcagtactgtagttgcagctgcagctagtactagcgagctaggccatggtgtccccattgtgcatgattgctccctgattatgtggtctgcttccttgctgctaccatgatgccagacaaggcaatactggtctatgcagcacttagctcgctctaatcgtctaattaattgcatgtcggatcaaactgggtgtctaggtgttccttccacagatcggtggatgcagttcatgctatgtactcgctctctcttctttagctgtttgtgctcactgaatgtttctttaagtaactgcctttgaccccaaatgagattgatttgtttggttgcatttttgattggatagccaaattggcaggtagttcatgtgattagccttgctgggacattgccttgtactccctccgtttcacaatgtaggactttctagcattgcccacatacatatagatgttaatgaatctaaacacatgcatatgtctagattcattaacatctaaatgaatataggcaatgctagaaagttttacattgtgaaacgaaggaagtaggagataactcatgcattgaggaaatattgttgttgtacatagcgcctttgtggaaggtgtccaagcatctggtagctgccgtgcctcattctttagtactcctatgttagtgcggcggaatttggttggtcatacctgtctaatttactcttttaattgccatcatgttcaaagccaaattgtcctttagactcatcatagttcgttgaataaagctgggactagttctgatctatgcttcacctgaatcatgggtaaatttcttctcaatttgatgacaagaactaatttgattgttttgtctgggcagaaatttagcacactgtacctatatcatcttccaaggttctctcagagatgataataaattaatgttttctcatactgtaaagagaatacaaatattgtcatggaaattaataaagtttttctatggaactaatgaaaggactgctcattcgttttatcttttaagactgtgataagatccattgacacatgtttttctacagcaaagagaagctatgtggagtccaaacttcaatccattacgaagatgtctgctgacattaacatgtttcccaaacatctgaaagatgccatggatgaaagagagaaacaaaaaaagttgatatccataattttagccatttaatttggtctatatatctccttgtgatgtgctaaattcaatgcttcctgcttatatgcagcaatttaagttacgcgaagggaatgcggcaaatgtatgagccttttgaaaatttggctcgtgagctccacatgtgcccttgctgtcaacgtgctttcacacctgatgaagaggatgaatttgtaaagaaggtgcctgatctaataattgatataacatgctgccttttactttgttagagttactttattcatatgagtttttcctaatgtgtctgttgtacctttcagcaaaggacaacgtgtgaaagtactgcagatcgcatgaacaagatctcattggaatgctcaaatgctgaagactttttccagcaattgaataaactcaatgcaacttatgaggaatttgtgaagctgggaaaagaggctatacctctagcagagaagaacttgaaacaacttttggcggatgaaagtgagaaggcacaaacatttgatgatgttagtttcctgttattaacacacaactctgttttagttcccagacataaaagaaatagcagacagtataacctcatgacttaaatgaacttgacttctctggttcaatccaaactgaatatccttgagcttgtatttcgttcctcgtgcccaactcgggcacaattatatcatcccttgccacctcgtgcagtactaaatcagtatatttaatttctttaaaacaaggagttgatctcatactaattgcgactagcctacagcatgctactccctctgtccacaaatataaatgatttggttatatacctggacaagcactcgttcagttacgtagccaaaatcctttatatttgtggacggagagagcatatcttgtttagatggtctgtagttatgtgttgccacctcttctaggccacattggcataaggcttgttttggtgttcttaagctcttcttgattgggcactgtaggatggagtctctcaatgaaatctataaaacacatgtagtttgtggttagctcatgtcatagtcttgtatttaaataagtacttacctttgagaaaatattttaatcatagtatatctgtggtctcatgtgaaatcataactttctttcaattagttacctatgcagataatattgttattgacgaagataatttattatgtataacctatttcgctttgtcttgtttgcattttgatggctttgatctttggagagatgtagttttgtttacagtttccatatgtgatccttcattgcagtttgtcagtgttcttgctcaagttaaaatggacaaggatgcagtgcaggtattgctacagccagttgaaacgattgataggcacgtacaagaaatacagcagttaggaccacaagttgaaaatcttgaatataagcttgatgttcgtggccaaggtgttaaatctttggagcaaatccagttggagttgaactctgtgcagaggacaaggtatttaattctcagaacggagcaaatttgttaagggtaatttggaaccatggaacaaatggcctaaaaaatttatactctgttgatctgttcggaaatttagaaaagagttctcgaaggaattaatcaacaggatattttatgcatgatcagttattggggtcttgaaaaattctagtgcttaagcttttcagggtcgatatgtcacatacactgctctagctatggcaatcaaattaaatgcttacagagctaactgatgcccttaatttgtgggagtaccaaataatgctttagtgaaggatgcacccatccagacttttctgctcatagacagcgcttttctgctctgagacagctatctgtcacatactagttgtagagttccctttttcacttggtactgatagaaataagcgcacaaactggttattggagatctttaggtgctttggctttcaatatgctgtaactatgttgagatactactatatataatatattttctattaccatcttttaagcagtttatttgacctctttattttcttcacgactccacttggaagctggaagcttcactttgtttgatactcttatctattgaacagggacacattgaacaatgaagtggatgatctaagggatcaacaaagaacacttaccgatggtctgactaatgctcagatgcgatggcatgatattagggaagagaagctaaaagcttcaggtgcagtgcacaaatttcaaaaagctgaagaggatttgggacatctagctgaggagaaagaaaaactaacattagaagagaaggtactcctgcttgccttctgtgcacaattttttcttgagtaaatttcataaaaccccacctattatggtccaagttacacaaaaccacagatattttgacatgtggcaagtaaccctggatattatggt
